United States Patent Application Publication US 2022/0102000 A1 - sequence listing, part 11

SEQ ID NO: 2183 - DNA, 17512 bp, Unknown
  16S sequences of unknown bacteria
cgcaccggccacaccgaggccaccgtcgacctgctcaggctggccggcctcaagcaggtgggcctgtgctgcgaggtcatgcgcgacgacggcacgatgatgcgcacgtccgagctgctcggcgtggcaaagcgctacgacctgacggtcatcacgatcaaggagctgcaacgctaccgcaagtaccacgaccacctcgtgacctgcgaggcaagcccgctgctccccaccaagtacggcgagttccgcgcgtacggctacgtgaacaagctcaacggcgagcaccacgtcgcgctggtcaaaggcgacatcggcgacggacaagacgtgctcgtgcgcgtgcattcagaatgcctgaccggcgacgtgttcggctcgatgcgctgcgactgcggcgatcagctcgcggcggccatgatgcagatcgagcgcgaggggcgcggcgtgctgctgtacatgcgccaggagggccgtggcatcgggctcatcaacaagctcaaggcctacgagctgcaggagcagggcatggataccgtcgaggccaacctcgcgctgggctttgaccccgacgaacgcgagtactacatcggcgcgcagatcctgcgcgacttgggcgtcaagaccatgcgccttctgacgaacaaccccgacaaggtctaccagctcgaggagttcggcctcgaaatcaaggaacgcgtgcccatcgagatgcacgccaacgaattcgaccgcaactacctcaagaccaagcaggaaaagatggggcacctcatctcggtccgataagcaccagtaccccaccagcacacccgcagaaaggacaccaccatgaccgtattcgaaggcaagctcgtatccgacggcatcaagatcggcatcgtcaacgcccgcttcaacgagttcatcacctccaagctgctcgcaggggcgctcgacggcctcaagcgccgcggcgtgcgcgacgaggacatagacatcgcctgggttccgggtgcgttcgagatcccgctcatcgcccagaagatggccgaaagcggcaagtacgacgccgtcatctgcctgggcgccgtgatccgcggggcaacgagccactacgaggccgtcgtcaacgaggtctccaagggcatcgccaacgtcgccctgaaggccgacatccccgtcatgttcggcgtgctcaccaccgaaaacatcgagcaggccatcgagcgcgcgggctccaaggccggcaacaagggctccgagtgcgccgagggcgccatcgagatggtcaacctcatccgccagatcgaggcgtagcaccatgaacctgctgttcgactacgacggcacgctgcacgattcgagcgcaacctacctgcccgccttcagaaagacgctcgcctggctcgaggagcacggctacgacgtcgaccgcgagtactccgacgagcagatcggctactggctcggcttctccgccaaagacatgtggaactcgttcgcgcccgagctggacgacgcggtcaaggagacgtgcagcaagatgatcggcgccgagatgcgccggctgaccgaggcgggaaaagcgcggctctaccccggcgttcccgccacgctcgagcgtctcaaggccgaggggcaccggctgttcttcgtcagtaactgtcaccacagctacatgcaaatgcaccgcaaggcgttcgacctcgaccgctacttctcggatttctactgctgcgaggactacgggtggattcccaaggcggacctgttccccaccatccagaaggcttgggggacggggattgccgcgcacgacgacttcatgatcgttggcgaccgcttccacgacatgaacatggcacgcgagcacggcatcaggtccgtcggatgcgcctacggatttggggcgcgcgacgagattgccgacgccgacgccatcgccgaggcgccttcggatttatacggggcaatcacgagagcggccgcctgaagcagcggcgcgatgcctataatatgcacggttcagccacgcgggcttttccaggcccgcgttttttgtcaccgcaaacaggaaggtcgcccatgaaacgctatgcggacatgacgcacgcagaactcgaacagacgctcgcccagctcgaagagcagtacaacgcgttcaaggcgcgtgggctcgacctgaacatggcccgcggcaagccgagcgccgctcagctcgagctgagcctgccgatgctcgacacgctcgactccgcaagcgacctcaccgcaagcgacggcaccgattgccgcaactacggcgtgctcgccggcatccccgaggcgcgctcgttcgtcgcggacatggttggtgcgcgccctgagcaggtcatcgtctgcggcgcctccagcctcaacgtgatgtacgacaccatcgcccgcgcctggacgcacggcgtggcgggcaacacgccctggggcaagctcgacacggtcaggtggctgtgccccgttccgggctacgaccgccacttccgcatctgcgagcacttcggcatcgagatgattcccgtcgagatgaccccggaaggccccgatatggacaaggtgcgcgcgcttgtcgagggcgatgcgtccgtgaagggcatctggtgcgtgcccaagtactccaacccccagggctatagctactccgatacgacggtcagggcgtttgcgcagctcaagcccgcagcagctgacttccgcatcttctgggacaacgcctatgccgtgcaccatctccacgacgacgccgcgcatcaggaccagatcctcaacattctcgacgaatgcgagagggcgggcagccccgacatggccttcgagttctgctcgacctccaagatcaccttccccggagcgggtatcgcggctttcgtctcgagcgaggccaacgtcgcggaagcctgcgccaacatgggcgcgcagaccatcggcttcgacaagctcaaccagctgcgccatgtgcgtttcctcaaggacgccccgacgcttgccgcgcacatgagcaagcacgccgccttgctgcgccccaagttcgaggccgtgctgcagattttcgatgacgagctctccgccacgggggtaggctcgtggacgcgccccaacgggggctacttcatcagcttcaccgcgcccgagggcaccgcgaccgaaatcgtgcggctcgcggcagatgccggcgtcaagctgacgggggcgggcgcgacctggccgtacggcgtcgacccgcacgattccgacatccgcatcgccccgagcttccctacgctcgacgacctcgtgcaagccgcgcacgtcttcaccgtctgcgtccgccttgccgccgtgcgcaagctcctcgcctaggaagcagcgcctttcctacaacccaacgcccgtgggcggctcgtcttcgcgcgtgccgttcacggtgtactccgcccagcgcgcgacgttttcggcatggtcgccgatacgctcgtagtacttcgcgatcatgagcaggttgacggcgtcttgcgcctcggtctgcctgtcgagcatcccctggatgatcttctcgcgaatcttctcgtagtacacgtccgcctcgtcgtccatggcgatggcgcgatgcgcgagtttgaggtcgcccgcaaggtacgagcgcacggcgcagtcgagcatctccgcgacgagcgcccccatgtcgagcaggtcgctgcgctggatgtcgcagacgcgcccctcgagttcggagacgatgcggcagacgtctgccgagaggtcggagacgcgcttgaggtcggtcaccatcttgagggcgcccgatacctcgcgcagatcccccgccacgggctgctgcctgagcaggatgcgcaggcacagactttcgatggcacgctcggcggcggcgttgtcggactgcgccgcatcgacgctccacccctcctcgagacggcccgtgcccgtcgcctcgtacgctttctcgtacagttctttcacatgcgcgcccatcgcctggaccttcgcgtccaggtcggcgagctggcgctcgtattcgattcgcggcatcagccaaaccttcccgtcaaatagtcttgcgtgcgtttgtctttcgggtccgagaagacggcgtcggtatcgccccactcgacgacctctcccagcaggaaataggcggtcttgtcggagatgcgggccgcctgctcgatgttgtgcgtgacgatgatcacgctgattccctcgccggctatctgcccgatcgtgtcctcgatcgagaacgtggcaatcgggtcgagcgccgagcacggctcgtccatcaacacgaccttggggttcatggcaagggtacgcgcgatgcacagacgctgccgctgcccgcccgaaagcgcgtaggcgctcttgtcgagtttgtctttcacctcgtcccacagtgccgccttgacgagcgacgtctccacgatctcgtcgaggcgctttttgtccttgatgccgtgacagcgcggcgcgaaggtgatgttgtcccggatcgacttgcgaaacgggttgggaatctggaacaccatgccaatcgactgcctgagctcgtagaggttttcgtcgggcgtgttgatattgtgaccgtcgtagacgatctcgccgtcgatgtggcagtggggtatctcgcggttcatcaggttcaggcagcgtaagaacgtcgacttgccgcagccggaggggccgatgagcgacgtcacctctccagcggcaaactcgaggttgacgccggaaagcgccaccttggtctcgtcgtagcgaacgcccacgtcatgcgtcgccaggacgggctcgcgcatctctgcctccactgccgcaccgcgggtgtcacgttcggtaatctgcatcattcggccaccagcttctttcccacacgcttgcccacgaagcgcgcgataaggttgaacagcagcacgcagatcatgagcacggccgccgtgccgttcgagatcgcggccaaatcgggcacgacaccttcggagttgatcttccagatgtgcacggccagcgtctctgccgggcggaagatattccacgggcacgtcgggctcgagaagtccaggcacgtgaagtcgagcatgggagccgactgccctgccgtgtagatgagcgccgccgcctcgccgaagacgcgcccggccgacaagatgatgccggtgataatcgcgggcatggcggtgggaagcaggatgtggatggtcgtctcccagcgcgtcaggcccagcgcgaggcctgcgtcgcgttgcgtggtggggacggactcgagcgcctgctggatgacgcgcaccagcagcgggatgttgaagatcgtcagcgcgaacgcgcccgagatgatcgagaagccccagccaaagtagatgacgaacagcaggaagccgaacaggccgacgacgatggacggcagcgacgaaagcacctcgatgaccgtcttgatgatgtgggtcacgcggttgcccggtgcgtactcgacaaggtagatcgccgcgcccaaagacagcggaatcgagatgatcatggtcaggacgagcaggtagaacgagttgaagagctcggggccgatgccgccgccttccttgaactgctcgggtttgcccgtaaggaagctcgggtcgaacgccttttgggcgccgctcgcgatgatgtagacgatgagcgacgcgagcaggatgaagatgaacgccacgattgccgttaggatacccgtggcaatcttatcctcgcgctttgccctcgcgacctgcgccttgatgtcactagccatgcttgacctccgacctgttgccgatgatgtggacgatcaagatgaacacgagcgacatgagcagcaagatcaaggcgagagaccacagcacgtcgttgtagaccgtgcccatcgcctcgttgcccatactcgtcgtgagcacggacgtgagcgttgccgcagggctgacgagcgagtcgggtatcgtcgcagcgttgccgatgaccatctggaccgccagcgcctcgccaaaggcgcgcgccatgccgaggatgatcgccgtcaagatgccgggcgtcgccgccttgagcacgatgtgccaagtgttctgccagcgtgttccgcctagcgccgacgacgacatgcgatatgccgctgggacggcgttgagcgcgtcgatgatgagcgaggtgaccgtcggcagcaccatgaccgccaacacgagcgagcctgccaagatgccgtagcccgtgccgcccgaccacccgcggatccacgggacgacgatcgtcaggccgacgaggccgaacacgaccgacgggatgccgacgagcagctcgagcgcgggacggaacaccgtgttgccgaacttggggttgacttcgacggtgtagattgccgagccgagcgcgaacgggatcacgaacagacacgagagcagcgtgaccgcaaacgagccgaagatcatcggaagcgcgcctacggtgggggcaccggacgcgtcgggctgatgcgggttccaggttacccccgacaaaaagccccacaggtcgacgccgtcgacggcaaacgccgacaggccgcgctgtgcgaccatgacgacgagagagcccaccacgaggatgacgacggcgatgcagaacccggtcagggatttgccgacgcgctccagctggtgtttttgcaacgatttcatgtgcgactgagcttccattcataacaggaagagggacggccgagacggaccgcccctcttcggatgctgtgattgattacaggttcttcacgtttccggaagcatcgcgctcgaccttcatgttggcgatggcgatgtagccgttcttctcgacgagcgaaccctggacgtcgtcggagagcatgtagtcgatgaatgcctgggtggcctcgtcggggttggccgcggtgtacatgtgctcgtaggaccagatcttccaggcgttggtctcgacgttttccgccttgggggctacgccgtcaacggagagcgccttgaagctgtcagtgtagtaggagaacgccaggtagctgatggcacccggggtctctgcgaccatcttggcaacggtgcccgaggagtcctgctcctgcggggtgaagcttgcgggaaccttggtgtcgcccaggacggccttctcgaaggtcgcgcgggtaccagaaccggacgcgcggttgatgacggtgatggcgaggtcctgtccgccgacctgcttccagttggtaacttcgcccgtgaagatcttcttcaggttgtccatggagatgtcgtcgatgttgacgtcggagttcacgaccgggcccatgccgacgacggcgaccttgttgtcggtgatcttggagatgtcgtctttgttcttcagcttctcctcggcgaacacgtcggaatcaccgatctggacggagccttcggcgatctgcgtgatgccctggccagagccgccaccctggacggtaatctgcacgccgctgttcttgcccatgaactgctccgcgcctgcctcgacgagcggctgcagtgccgtcgagccgacggccgtgatcgagccggagaggttttgctgcttgccggagttcgcgctttggccagacccgcatccgaccaagccgagcgtcgccgccatggccacgcacaccgcgcccgtgaccagtgccttggtccacttacccgaaagcttgttcttcatgtttcctatactcctctttcgatgccagtttctttcgtattggaaggccgaccaaactcggtcgaccgggttcccgttcgtgcacgagcaggccaaggggaggacggcccgcccggagttttcccgtcagccaaagtgccccgtgatgtagtcctcggttcgcttgtcgacgggcctggaaaagatctgctcggtcgtgccggactcgacgagatgagccggctcggccatggactcgcgcagcatgaacatcgtgaagtccgagacgcgcgtcgcctgctgcatgttgtgcgtgacgatgaccacggtcatggactgggtgaggtcgcggatggtctgctcgatctggttcgtcgagatggggtcgagcgccgagcagggctcgtccatgagcagcacctcggggtcggtcgccagggcgcgggcgatgcacaggcgctgctgctgaccacccgaaagcccgagcgcactcgacgagagctcgtctttgacctcgtcccacagcgcggcgcgcctcaggcagtcctcgacgagcgggtcaaggtcagagcggctcttcaccccacgcaagcgcgggccataggcgacgttgtcgtagatggaaagagggaacacgctcggctgttggaagaccatccccacgtgcatgcgcagctcgaccgggtcgatcgtgccatggttgatgtcctcgccgtcgagcgcgatggtaccgcccacctcgacgtttccgagcatgtcgttcatgcggttcagacagcgcagcagcgtggacttgccacagccggaaggcccgatgagcgcggtgaccttgttgggcgcgatactggcgcagactcccgccaccgccgtctcgcccgaataggcgaccgatacgtcttccaactcgaaattgcctgccacgtgcaacactccccatccgtttgttcatgcagggcaatcgtagaaacgtgggcaggacgaatggttgaagcattgtgaaaccatgttgcaggcacgtgaaccgcgttgcagcgatgtgaactgtgttaccggcaggtaaactcgcgctgttgcgctcttgttgcggagttctccgcggcagacgcggcgactgtgctagaatctctcacacgatgcgggtgttgccaagtggtaaggccctggcttcccaagccagtattcgcgggttcgaatcccgtcacccgctccatcgaacaagcaggccagccggcatatgccagctggcctttttagttatttacgcggagcggaaaacccgacgcgcgcagttcgtgacaggaccgagctgcaggagatgcgctacagatggcgcagaaccgcgtggaattcctcttccgcctcgctcttgaccgcggcgatgaccgtatcgcccggcatgagcaccgtgctgccgttgatcatctcgaggccgtcttcctcctcgacggcgatgagctgcacttccctgctgaaggggatgttcgcgacctggatgccctcgcggtggtgcatcttcatcggcaagcgcgtctcgatcatgagaatgtcgccctcgcgcagcgagaagaccatgtgcatgtcgccgacgacagcctcctcctcgaccatgcgggcgatgagctcggtggacgagaccggctcgatgccgacctccttgaagatgcggttgttcttggggctgttcacgttggcgatgcaacggggcacgttaaacgccgtcatggcgatctcgcatgcgacgaggttggtgtcgtcgtgccccatgagcgcgatgaacagatcggcgtcgttgacgccggcatccagctgcactgccgaatccgtgccgtcaccctcgacgagcagcacctccggaggcagtgcctcggccagatgctcgatcgagtcgtggtcttcctcgatgacgacgatgcggtggttctgctccagcatcatgttgatgaggtactccgccgtcgtgctgccgccgctgataacgattagcatatccgtctagctcctaatgaatcgggaaagcgccgcatagttctcgcgggcaacgcacacgagcgcgacatcgccgtcgtgcagcaggctccggctgttgggaaggaacgtgtcgtcatcgtgctcgatggcgatgacgcgcgcgccgtattcctcttcgaggtacgaacaggttatcgtctcgtcgtcttcgagattcaccgcgaaccgcgcgacctcgtagtcgccgaaggtgtcgatgtgatgcccgtggcccgactggatcttcgcgaaaatctcttccgcaacaagcgtcgtcccgcacgagaagtcgacgccgagctgcgcgtacgtcttctcgcggcgcgcctcgtaaaggcgcgtgatgacgtgcgggacactgaagatgcggcgccccacctcggcagtcatgaggttcgtgttgtcgttggaggtaacggcagcaaggacgtcgcactcctccacgccggcctccttgaggacctcctcgtcgaacccgatgcccttcacgctgcgtccgttgaaatcgtggcccaggttcttgaaagcatcggcgcgccggtcgacgacggacacgttgtgcccgtcttcggaaaggagcgtggcaagctcgctgccgacgcgcccgcaccccacgacgataatgttcatgcccagtgcacctctcggtcctcgtatcgatgttatgtgcatggtagcgctcccacctccttttgtgtatcgccgtgcacgtcaagagcggcgatgccaagctcctcgcccacctcgaaccacctgccgttgcacggcgagctaaagcgctcgatgacgatgcgcgcatcgtaacaacctgccatccgacgcggcggcatgtcgctcagcgccttgagcacatggccatccccgtcaatgaacgcgatgtcgaggggatgcttcatgccaaaggtgtggacactcctgcacggagcgagcacgagcagcccgcccgcaccaagccaggagggactgcgccccagaagcccccgggcacgctcgagaagcgagagcgcgaagattactcgggctggcgtgcccggctcgcggcgcacatgcgacagcatctcttcggcgcttccttcgcccccgctcctacgaccgcacgtcaccatttcctcgctcctcatagcaactcccctggggtataggggtcgattgcaagcgcataggtatgggtgaagcgcgcggggatgcggtaaccgagcgcccctgcagatccggtatcgaacggccagggcgagaactcgagcttcgcctcgaagatggccatgctcgccagcggcatccccgcgtcgcgcgacgacacgctgacggtctcgtcatgctcggcaaagctttccgagagctctgcctgcaccgcctgcgcacgcgcggacgcatcgtaggaatcccgcgagggcgaggtggcattcgcgagcacgctttgggcggccaggtggtcgaagcgggcacactcgcccaggtagacggcgcaatcgatggcgatgaccagcacgatgagcacaacgggcagcacgacggcaagttccaccgccatctgcccgcgttcgtcgaagcctctctccatagcgcctaccccgccttcgcctgcagcgcgccgagcgcggacgcatactgcgcctgcaagtcgacgggcacgggaagcgtgagcttgccgtcttgcgtgcccagtcccagctcctgcagcgggacacgggcaacgacgaggccctcgtcggtcaggacatcgccaaggtccggaagctcgagctcttcgacgaacatgccgacgagccccttcatgtccccgacggagatatagcccgccgcctgctttgccctcaagagcgcgcctgccgcagacccaccgtcgcgctcgaggatatgggaggtgtttacgagaaccggtttgtacgactgcaggtcgggcggctcgaggctcgtcatggttagggcgtttttgaacttgcccgacgcccagctggaaaggtcgttgcccacgagggggatcttcctcatctggttgtcgaacaggtcctccacggcctcggtgccgcccgtgtatgcacgcagggcatctgaccacgcgccgagcactgcatgcagcaaccccgaccctatcgactcctcgggcatgagccccgtggcgatatcggatatgacgctgccctcatcgtcagcggggtcaggggcaagtgtggcgccagacaccgcgacgcgggcaggagcgccctcggagccggatacgaacggcgtgttcaaagcggattcgggcgcgaaaacgacgcagacgcacccgtacctccccggcggctgcgggtcgtagcgcttcccgcccatcgcggccaccgccttcttcagatcgccgcggattccttccgcctcttcttcgagctcgcgcctgatctgttccgattcgagcgcggccgcgcggtactcctgcgatgcgtcgaccaccgccttgtagtaatactcgaaaccgttgtcgatggacgtggaggctgcggggacgcgccccagggtaaccgccgagaacctgcaggtctcgcagcgctgcacgctcccgccgtcaatctcctggaccgacgccgtaccagagggggtacccgactggtatgcggggcaccccgcatacgcgtgcagcacgcgtttgtcgccgttttgggaaacgggatagatgcgttgcgtgtagaggtacgtcgagcggatctgctccgtgttgcgtgcaagcggcttcaagttgggaagttcgacgcctctctcggtcctttcaatgctcccgcccgagacttccttctgcgcatactcgtagaactgcttgcgcgccacggactctgcgacgcgctcgggggtgcctgctgccgtggagccaggctcgttttgcagacgcagcgcatagtaagccttcgcacgggcaagcggagctgcaaacgtccaggtcttgattgaggagtagctggggttttgggcatcgggaagaccagcgagatgcgaggcacgctcgcgcaggcaggtggaactgccgcagtccgcctcgaaggcgcgctgctttgccgcatcctgctgctcttgcgcacgcttctgctgctcgcttttctcctggatcttcgtctcacgcgactcgatgtcccgcgccgcctcgttcacctcggtattgtcgggcagctccacggggtctgcatgcagcggggacgcaagcgcaatgcccacgtagtcgacgccgctcgcatctgcattcgccgtgatgacctgcgcggagcgcacagcgcagatgacgggcagggcctcttgggcggcattgagccccttgaccgccgtctcggcaaacttgtccctcagctgcagcaccttgctgccagcgctggcgagctctgccgcggcagccgcgccgccggggataaacgacgcgacggcagacgcagcatagaccgtgatcccgacgagcgaaaacgacagcagcgcggcatcgacgacctgtcccgccgtgacgaactccgcaacggcgttgtctgccgccagggctccggcatcggcaacgtactggatctctccggcgcgcgttccgatgataaagccgcgcatcgtgacgaacagcaggccgcatacgacaaggagggcaacagccgctgcaggcgtcgtgaagccgccttcttgcctgacgaataccgagttcatgcccatgcccctacccactcgtcgggagatacagccgcatcgagcacccactgcggcgtgcagctcgcagacgcggagactttctgctccgcgcagccgtcgccggcacgttgactcgagagccccgcagccacgcccagcaggggcagcgggacgacatggtgagtaatctccacctgagagcgcgaaagctcacctcccgagacctcgacggtccacctatcgcgtccaccctcgtggaacacgggcacgttgggcacggcgccaaggcggcgcagcgcatactcgcgcgccgcctgctcgtcttgtgtgctggtcgcgagcatccggcaggtctccgctgccgcagtctgcatggcgcagcggtcgtagagcagcagcatcggctgcaagaacaccccgaacaccaccagcagtaccggcagcagaaacgccgcctcgagcgtcgcctgtcccgattcagaacgaaagcacatcgagcgcacctcctatcgtcccgagcgcatgcgatgccgatgcggaaatgacctgtgacatcccgccatccgcgacgaaatgccagattgcgcccaaagccccgatcatcgccaggagcacgagcccgatgacgaggtactcgagtgccgtctgccccgattcgtcgaggtggaaagccaccggcctgcctaccatggctgttcctacagtccgttcatgccgttcgtgatggcatcccacagctccgtgacctttcccttgaacgcggtgacggcaagcatcgcgataaccgcaagcacgccgacgagaatcgcgtactcggtagtcccctgcccgtcttctctcattcccgccttcttcgcagacagccacgaacaggcgtgcagcgtccttttcctgatttgctccatgtcgaatcctttctctagaaacttgaacctatgaactgaatgagcacggggcccatgatcagaaccaacattgccggcaagatgcacgtgcccgtgggaacgagcatcttgatgggaaccttctcgacctgccgctctatctgcgcaaagcgctcacgcctgatgtcgcgcgcgagcgtcgtgagcatgcccgccagaggagacccataccccatcgcctgcacgaccgtgtccgagaacctcttcaccagctgcgagccaacctggtcggcagcatctttcagcgcccgttcgcgcgtggccacgccacttctccatttgagctgcgccgccctcatcacatgtgagagctctccggggaacttctcgcagtacagcgccagcgccgcgtcgaacgaaagcccgccgcgcatgcccatggcgacgatgtccgcgagcgtgtcgagctggcgatcgcaggcgcgtcgcaaatcatcacggcgccttttgtcgagcatgtgcggtgctcgccgggacaggatgatggcggcgacgagggcgaccggcgcgacccacaccgaggtcaaggctgcaaatacgagtcccgccgccatgaagacggaaaagcacaggaccggatcgcgcaggacgtcttccaactcgagcttgcgccgatgcgtccgcacgtgcagctcgagccgctctgcgaccaggcgaggcagcaggaacccagcagcgcccgcagccacgagcgtcaccatgagaacgagcacactcatctcgcccctccctctcccggtgctgccgacaaatcgacagcgagcgccttcttgaccagcagcacgcacgccgcctcgagaaggagcggcgtgacgagcagggcaacgcccagcggactcgagacgaacgccccaaagtagcccggcgagagcaccgtgatcagcgctgccagcgcgagcggcatccaagcgacgatgcgcgcggacaggcgcccctgggtcgtcttggtccgaagctcttcctcgagctcggcactttggcgcagcgaatccgaaacgctcgcaagcacctcgcccagacttccgccggacctgtgctgtatctccatcgcagcagagaggtacgcgaactccgagccgcccgtccgagcgcgcagcccttgcagcgcctcgtcgagcccctggccagcctgcagatcccagactgtccgcttcagctctcccgccaacggctcgctgcagttgtcggcggcatactcgagcgccttcaccagcgaggtacccgcatcgagcgcgatgctgagcaggcgcagtgcctcgggcatgccctgcttcagcccacgcagacgtcggcgctttcgggcagacgctaatgcacgggagagccgcacgcttcccgtctccaactcccgcatgcgcgcgagcaggccacgtcccttttccacgagcgcgcgggagttgccccacaagtgcgggagcgcctcgacgatacggtaggcagctgtccctgtcgcaacgagcgtaatcacgagcaacgctgcactgagtggcgccatgcctccacctcctcggcactcgcgatacccaggtagggcagatcgtcgacccaatccggaagcgcgccccaggaataggagcccgcacgtcggtcccactgaacgatcggcgtgaagaaacccgccgaaccacccgcgcgggaacctacgtgccgcatcgcgatctgcgtgatgcggcgcttcccgccgcccacgcggtcttgctgcacgacgaggtcgagcgccgaggcaatctgcgtctcgatgatctccacgggcaattccatcccgtagcgcaccatcatgaccagacgtgggacgacctcttcgggcccattggcgtgaagcgtcgtgagcgagccgtcgtgccccgtcgtcatggcctgcagcatgtcggctgcctctgcgccgcggacctcgcccacgacgatgcggtccggccgcatgcgcagcgagttgatgaccagctcgcggatcgtgaccagtcccttgccctcagagttgggcatgcgcgcctcgaggcgcacgacgtgtggatgctcgtcaaagcgcagctccgccgagtcctctatcgtgatgatgcgctcctgcttgggaatatgctgggacagcgcgttgagcaacgtcgtcttgccaccgcccgtgccgccggagaccgcaatgttcttgcgggactgcacgccccagacaagcagcgtctccatctcctccgaaagcgatccgagctcgacaagctccgcgagcgtgtacgcccgtgcccggaacttgcgtatggtgagcgtggtcccacccagcgaaagcggcgggataatcgcattcacacgatgcccctcgggcaagcgtgcgttgacgatcgggctctgctcatcgacccggcgcccgagcggcgagacgatgcggtccaccacaaggcgcagctgctcttcggactcgaacgactcgcggctctgatagagcatgccctcgcgctcgaagaagaccgagccggggccgttgaccatgatctccgtgacggtcgggtcgctcaacaggcgctcgagcgggccgagccccagcaccatgtcgagcgtctccgcgacaatcgcgtccatatcgccgggggccagcgtgggaaagtcacgtgccttgagtatctgctcgattgcagccgtgagctcgatgcgggcgcggtcgcgccccgaagccaaaagctgtgcgatcttttccgaggggacctcctcgtacagcgcatctcgaagctgtacgcgcgcggcatcggcattgcctgcctgcacctgctggcccgagctgggggcaggagcctggaggtagtcagagaacttcatcgcatgcgcccctttcgctcctccacctgcggcacgacgtacaggcgccccatgcgcggcatgatctcttccatcagctgatcgacaccctgcaccacgggcccgttcgcatccaagaactcgctcacctttcccgctgcgagctctgactccaccgtgcgcttgccatcgggaacggtgaagagctcctgtgcggcaaaggccgcctgtgcacgcttgaacacgtctttgcagcgcgggctataccggttgaacacggggaccacgcgcgccgacgcgaccccgacgcgaccgagcagctcgagcgccttgagcgccccgtacacagacgcgcgccgcgcgtccatgaccaggagcacgaggtcagacgaacacaccagaccagccgtcagcccgttccagaactgccccgtgtcggcgacgacgaggtcgggggtgctgcgtatcgaaggcaggcaggcgaccacctcatcgcctgcctgctctgc

SEQ ID NO: 2184 - DNA, 17570 bp, Unknown
  16S sequences of unknown bacteria
ccgagtatgcttccccgccgtactttttcgcaagctcttccgctctgtctatgctcaaatcgcaaaatccgacgatatctatgccggaagccgcgatttttctgccgctgtttccgcagcctataagaacagtttttgtcatgtcatgttcctttcaaaaacaaaagcggacgtgatatgattcagttaccacgcccgccgcagaaacagttaaactgtatctgcaatattctgttaaataatgtcgttatgcctgagcggcttcaacgatcttcgcgaacttttcgggaacgagtgacgcaccgccgataagaccgccgtcaacatcgagcttggagagaagttcagccgcgttgccgtcattcatgcttccgccgtactggattgtgagagcttcggcaacttcatcggagtaaagacctgcgacagtcttacggatgagagcacacacttcttcagcctgatccggagtagcggtaagacctgtaccgatagcccaaacgggttcgtatgcgatgacaacgttcttcatctgctcagcgggaatgccggcgaggtcgagctttgtctgcatggaaacgatttcgtctgtgatgcctgcctgacgctgttcgagaacttcaccgaggcagagtataaccttaagacctgcgtcaagagcggcacgggttctcttgttaactgtggtgtctgtttcgccgaaatactgtcttctttcggagtgaccgatgataacgtattctacgccgcattcgttgagcatatcagcggaaatttcaccggtaaacgcgcccttcttctcgaagtgaacgttctgtgcgccgattttaacctgagtgccttttgcggcttcaacagcgtttgcgatatcaacgaacggtacgcagagaactacttcgcagccgttctttccctctgtaagacgagcggtttcggcaacagcggtctttgcagcggagggagtcatattcattttccagttaccggcaatgataaccttacgggattcttttttcattattattcgccttctgttacagtatttgattatttatcgaggaggcaagcgataccgggaagttcaagaccttcgaggaattcgagagatgcgccgccgcctgtggagatatgagtcatcttgtcagcatagccgagctgttcaacagcagccgcagagtcgccgccgccgatgatggagatagcgcctgattcagccacagccttagctacagcctttgtaccggacgcgaagttttcccattcggatacgcccataggtccgttccaaacaacagtgcctgcgcctgtgatagtcttggagaagagctcctgagtcttttcgccgatatcgagacccatccagccgtccgggatagaatcggagtaaattctcatgaaggttgtgtcttccttgtattcacgaccgataacgttgtctacagggagaaggaatgcaacgcccttttctcttgccttcttcatggtttcgcgagctacatcgagcttgtcctcttcgcagatggatgtgccgatggagttgcccatggagcggaagaatgtgtatgccataccgccgccgattatgagaacgtcaaccttgtcgatgaggttgtttataactcctatcttatcggaaaccttagcgccgccgagaatagcaacgaagggtctcttaggatcgttaagcgcctgacccatgattgtgatttccttctgaatgaggaagccgcagactgcggggaggtatgctgcaacgcctgctgtggaggagtgtgctctgtgtgctgtaccgaacgcgtcgtttacatagatttcagccatagaagcgagcttttcggagaatgcggggtcgttcttctcttctgctgcgtggaaacgaacattttcgagaaggagaacttcgccttccttgaggttcatcgccatttcgtgagtcttctcacctactacatcgggagcgagaactgcgggtacgcctctttcgttgagagcttcagcgataatcttgagggagaggcttgtgcggtccttcttagccttttcaagagcagcttctttagcggcagcctgttcagcttcgggaagagcttcgattttagccttttccttcttattgagggaaaccttttcgtcaagcacgttgtgaggtctgcccatgtgagagcagaggataatctttgcgccgtgctccatgagatacttgattgtggggagagcgccgtcaattctctttgcgtctgtgataacgccgtcttttaccggaacgttaaagtcgcatcttacaaggactcttttgccctttacgtcgatatcctcaacggatttcttgttgtaagtcatattctacctctttgtttgaaatatagaattattttttcacagtattaatataccacaatttcccgatttaatcaaccgttttcacaaaaaaattacgatagaacgaaaatgaagttacatatgggtaacataatgccgaaatgcgcgtattctcggtgcaatccgaacaaaaaaccgccgattatattataatatcgttaaaatagagcctccgccgttgacaactcccgctcaatctgataaaattaccgtatactaaacctttatttacattaaattatatggtagtcctatgcttgacaaaattgtgcttgagaaaaaactccccggcgtgaaggtcgtaacaaaggagctgaccggctcgacgaacaacgacgcgaaggaaatgataaattcctctccctccgacactctgataacctcggagaagcagacgggaggacgcggacggcagggcaagagcttttcttcacccgaaggcgggctttacatgactttgcttctgcggtgcggtatgcccataacgacagcggtcggcgcgacttcatgctcggctgttgcggtttcccgtgcgataaaaaacgtctgcggaattgacacgggaataaaatgggtgaacgatatctacgccggcggaaaaaagctctgcggaatactcacggaagcggtgaacgactactcgcgcgggatatcggaatacctcgtgataggcataggcataaacgtgatgacaacccctgtcgttccatcttcttccgtggaatgcacctgcctctcggagcttggctctgcggcttccagagaagagctgtgcgcgggaattgcgcgtgagcttatctcgatgcgggacaagagctttgacttcagcctgtactccgaagaatacgccgcgcgctccgttgtgataggtcgggagataacctttacccgaaacggagagacaaggcacggcaccgctctcggcatagacaagcacggcggacttatagtttgctccgacaacgaaacgctgctccttgactcgggagagataagcgtaagactgaaaaacctctgatttaaggttattattcagagtatccataaaaaacatgaaatttttacacataccgaaattaaagaaaggctcggtgatgaaaatgacttcgacaaccgacgaaagaaccctcgcctatataaatatgtacgccatactcggcggtcttaccgcactttgcgacattgccacagaagccggcgcaattctcggcagagcaagctgttcaatcggatttgcggtaaaggacggtcctcacgccacgctcaattttgttggcggaagatgcagactgaccgacggcacggacgagagcgacatactcctgcgtttcccctcatgcgacaaattcaacaagatgataaagggcgaatacactcccgtacctgtgcgcggactgactaaggtgtcgtttctgctcggcaaattcaagaagctgacggatctgcttgaagcgtacctaagaccgacgagcgacaagcagcttgacgacggcttcatgagacaaagcacgctcatcatgttccgtgtaatcgtcgccgccgtcgctcagataggcaactacgacaagataggcagcttcagtgcgtcaaacatagtagacggcgtgataaagttcgagataatcggatgcgcaaaggcagctctcgcggttgagggacaccgtcttacgctgcttgacagagtgccgaaaaacatcacgtcgtatatgtcctttgccgatatcaaaagcgcgcgcgatatctttgacggaaacataaacgccgtcaccgctgtcggagaaggaacggtacgcatgggcggcattatctcgcagatcgacaacataaacaagattatgtccagagtggagctttatctgaaataataattggagaataattatgagagaaccttttacatatcctaattcacgcaaggaatttatgcgtgcggctaaagtaatcccgtcgggagtttacggtcatctcggtccggctgagggctgcttcattcccgtcgaggcgttcccgcagttttcgtcgagagcgcagggcagctacttctgggacattgacggacacaggtacatcgactatatgtgcgcgtacggtccgaacattctcggctacaacgaccctgacgtagaagaagccgccgcaaagcagagagaaaaaggagacgttgtaacatccccctcgactgttatgatagacttcgcggagcttcttgtcgacaccgtagcgagcgcaaactgggcgttcttcgcgaaaaacggaaacgatgttacaaccctcgccgtaatgaccgcaagagcgtacactcacagaaaaaagatagtattcttcaagggctactaccacggaatttccgcatggactcaaaaaatcgactgctccggcatacttgaagaagacgttgtgaacaatatctacctcgactggaacaactgggaagaggtcgagaggacgtttgaagaaaaccgcggggagattgctgccgttatcgctcagccgtatatgcacggaaactttgtcgacaacgagctgcccgccgacggatactggaagaagctgcgcaagaaatgctccgacacgggaactgtgctcattgtcgacgacgtccgtgcgggattcagacttgacattgccggaagcgaccactacttcggatttgaagcggacatgatatgcttctgcaaggctctggcaaacggctacaacgtctcggctctatgcggcaaggattttctcaagaacaccgtctcgtcaatgtcgtacacgggaagctactggctctcagctgttccctttgccgccggaattgcctgcattgagaaaatgaagcgtctcgactgtccgaagatactcatcaacaagggtactcgcctgaaaaaagagcttatcaaagctgctacggactacggcttcgaccttcacgtcagcggaattccgtcgctgttctacctgcgcattgcgaacgacaacaacctcatgctccatcaggagtggatagcggaatgcgttcgccgcggagtattcttcacgaaccaccacaaccacttcattaacgccgctctcaccgatgcggatattgacgagaccgtcgacattgcccgcgaggcgttcagcatagtaagaaaccgtcacccggagaactgatatgacatcttttgttttaaagctcatcgccgccataaccatgctcatcgaccacacgggacttattctcttcccgaatcagatgatattccgtataataggcaggctcgcattcccgatatacgcctactgcattgccgagggttttcgttacacgagaaaccgcttcaagtattttctcaggatattcctgctcgggcttttctgccagatagtttacaccatcgtttcgcacgacttgtacataggaatactccttgtgttttccatctcgataatcataatgacgttcaccgaatgcgtaaaaacctcggtgcagggcaaaaaaagcgcgctttcgtcgtttgtcagccgtgttttccatcgcgatatcacaaacgagcaggataaagtcctctcacttgtgctgtgctgtgcgtcaatcatggcggcgttcgtgctgtgtatttatgtggacgtggactacagcttcttcggaatcatgctgccggtattcacgagctttttcagcgacaggaagcagcgtctggtcatgttctccgcctgccttatcgcgctgtgcatagacctcaccgacacgctcatgatacagtactggtccctcgccgcaattccgcttatcgcaatgtacaacggagagcgcggcaagcacagtctgaaatacttcttctatgttttttatcccctgcatctcgctgttctctacggcatacaatattttataaatttaggttgatattatgtttgaatacgcactttttgacctcgacggaaccctgaccgacccggctctcggaattacgaactccataatgtacgcgcttgacaaaatgggacgggagataccgccgcgcgagtcactctacagcttcataggaccgccgcttgtgcagtcatttcagtcgctcggcatgactaaggatgaagcggaaacggcactgcgcacttaccgtgagtatttcagcgtgaagggactgtttgaaaacaaggtttacgacggaattcccgaagctctcgagaacctctcgaatgccggagctaagattatacttgccacatccaagccagaggtttacgccgcgcagatactggagcacttttctcttgacaaatatttcacctcgatatgcggagcttccatggacgaaaaacgcgttgacaaggctgacgtgataaaatacgcgcttgatacaaacggcatttccgacaagtcaaaggtgataatgataggcgacaggcttcacgacatcataggagctgagaaaaacggactcccctctgtcggagtgctgtggggctacggttcacgcgaagaactgacagaagcaggtgcggacaacatcgcagagaacattcccgagatggtaaaaattatcttaggaaataactgaactattttttcgtatcacggaacattcgcctcgcctctttcgtcatataagcataaaatacgacgagagacaagatgggagtgacaagtgatgttaaagaatatcggaaaaacaatactgaggggcggtgctctgttgctgtcgcttttgatgctggcgtcatgctcatcgggaaagcctgcggaggtgtcgtcggagtcgggaatcagccgctacaccgatgttccggaagtgacagtcaacgaccttgtatatcccgctgtttatgttcgtactgacatttacggtgaggacaacacgacatacccccgtcttgtaacgatatccacccgcgaggagcttgaaaaatacacctccgacagcgaaaagatatacgattttgaaacaaacgcctactccgtgagcttctatgacgctgtaacaaagtacgacgccgcgttttttgaaaacaattcgcttgttatggctctgctgaatgaagcgtcaggctcatacacgcacggcaaccgcggattctcgaaaaacgagagcggatatacgctcaacctgataagattcgtaccctcagaggcaacggacgacatggcggcatggcacatcatatttgaagttccgaagtcctcccccgtgcttgagagcgagattaagctcgacatcacggaagaaaacaccgccgcgtaaaactgaaattctaacttctttcaatattaaaataggctttgactctatggggcaaggcttattttattttcacgcaaaaaaactgtgtattagaaaatctacacagctttttttattttcagagaatgtagtcggttatgcagtcgtaccagtgaacgtaggtctcgccgtttatgtcaagtctgtcgttttcggggagcatttctgtccagagcttgccgtatcgcttatatgcccagtcgtttttattgaatctgcgccagagtatcgttcgtccgtttatgtcgaggtattgctcggacacaactccgcagttataggtttcgatatccataacgcatacggtgtcgtatctcctgccgcctatcgtcacggtgtatcgtcccactatatcaagaaggaaatccttgtccgcggtattaatttttgccccagctctggcgacgtctcccttttgtgagagatttgtctcgttgccgcagttgtcctctccgaatccccagtttggcatgaactcatccccgtcgagaaacgtaatatagtttcgcacatctccgtcattcctcagcgtcgcaagatatcggcagtgcgtgtcggtaagctgcgccacaaatgtacggtttacaacgtccgtcttatcagagtatgacgcttcacgagccgtgagttctaccccctcgatgccgtgtacctttgccttgccggtgacctgcatatcgtaaacatggtcgcattttcgtgagggaatatcgtacataccccacgtcagcttttctccgagcttcggcacaagaaaccatcccataagctcttcccatttcaccgaaaacggcttctcattgctctcttctatcttatattcaggcagatattcgggtaactttttcatatcgttttctccttttgatgtattgttgtacggatacttatttttaaaattctgtttggcggtgtgaagtctgcttttgactgtgccgagcggtattccgagccgttttgctatctcagcctgcgggagctccttccagaaatagaggtacagtatctgcttgtcgcggtctccgagcatttccacaacctcgcgcaccgtatcgactaccgaaactccgcatctgccgtaagacatttcactctccgcgacaacatctatcggtatctcgtactgctttgccatacggcggaaataatcggtgcatttgtttcgcgctatgctgataatccacggcttgaaggattctttattcttcagctgcgggaatttactgtatgcggtaatgtagacttcctgcaagatgtcgtccgcgtcgtgtaccatactcacgcggtatctcacgaatctctccactgccgctctgtcgcactcaagcagctgctcaaactcatccatatatccgcctcccttcactatattaaaaccggtttcacttatatagacgggattttacatcgaaaggttcattttagagaaaaaaacaagccccgcaaaaatccgcgaagcctgtcttctcttttatctgataaaatgtgtcgcaacgcgcggctctgtcttcgggagtccgaatttttccttgccgagagcgatacttttcatgaggaacgtcatatttcttgcgagaacgcgcatggtctgctttccctcttcgtcctcgtctgcttctccgggagtgcgtccgtgtatggagttccaatactggcttgacgcgacgggcatggaggatatcataaagtatttgttcagctcgtcaaacgtagcagagcacccgcctcttctcgcacatacgacgctcgcgccgaccttcatcgtcttatcgaagtgggagctgtagaatagtctgtcgaggactgcaatcagcgtcgcgttggcggaagcatagtaaacgggactggcgactacaagaccgtccgctttctcaaacttctcggcgatttcgttcaccacgtcgtcgaatacgcatctgccaagctcaccgcatcttccgcaggcgatacatccgcgaacgtctttgttgccgacctgcacgatttcggtctcgactccctcttccgcgaacacctttctcatctcttcaatggcgatggcagtgtttccggcggacttcgggcttccgtttaaaataagaaccttcattttttcccctttcatttatttttttaagaaaaaacccgaacatctctgctcgggaattattctcatgtgaaatatatgctcaattaaaacgcccagttgccgtcacggaagagcggtactgttgttccgtcagccttaacagcgtcgattgacatatcaggtgcgcctatcatgaagtcaacgtgaatcatggagtcgttgataccgagagcgcggcattcttcaagggtcttttcttcgtaaccgcggatgcagttttcaaagcctgtgccgagagcgaggtggcagcttgcgttttcgtcaaagagtgtttcgtagaatgtgattccagtgttctggatgggagaatcctgaggaatgagagcgcattcgccgaggtaagccgcgttttcgtccattgcaatcatcttgcggaggagttcctcgttcttttcagccttaacgtcgacagccttgccgtccttgaatgtgatggagaagttttcgataagctcgccgcggtatgagagaggtcttgtagctactacagtgccttcagccttgccgcgcataggagaggtgaacacttcttcggagggaatgttggggttgaactctacgccgccgattgtgttttcggagccgccgaggaacatagcttcggggataagtcctaccttgaagtcggtaccgtttgaggagtggtatctgagttcggttgcgccgagggagttgatgtagtcgcatctttctctgaggtcgaggttgtgctgattccatgcttctaccggatcgtcgccgtctgcacgggaggtatagagaatgctttcccagagcttttccatagctgtgcttgctctgagctcggggaatatcttcttcgcccacttcttgccgggaacagcagcgatgcaccactgatacttgttagccattttatcctgtataggcttcatgatgggatatctcttctgaccaacttcgctgaccttcttctggttgattcccttaagtccgtccgggtcgtcggagataatgtgaatcatagcgggaagggtttctgccatgtgttcgagctttgccttttcccagtcctctacctttgcgagagccgctgcctttgcgtaacggtatgtgctctttgtgatgggctggtatgaccactcaaccttaactctgcgtgctcctgccttatagcattcgtcaacaaccatgcggacgaactcgggctgttctacgcttgcgttaatgataacgtcctgacccttctgtacatttacaccctttcttgcgataagagcggcatatttctgaattgcagtctttttcatttaaaataatatatcctttcggtttactttgattctcgcacaagttctattatatgtcacaaggcttatagtgtcaaggcaaaagatgttaattttacttaatataagcgtttccgctcgtcgtaacaagccgcaaatccgcttttccgtcgccgaagatgtatgcttttgcgtttttcgtgtgttcaagctcggtgtacagctttccgctcacgcccttcatgacgacagacgcgccgcttccgttcagattaatcgtaacgtttccgctgacagtaacggactccatttcacctacactgacaaaaccgaactctccgctgccgcttgttgagttgtagtcgatatccgccgcgcttataccgtcaatgctcacgtctcccgacactgttttaactttcaaattctttacgccgcattcggacacggtgatttttccgcttgtggtgttaagctccgcgtctccctcggttctaagggaatttatgccgacgccgcctgatacggttttcagtttaagcgatttcgccgtgatttcgtctgccgtgacgtttgctgaggtcgtgttgaagctaaactctgctcctgtcggcactgctatgaacaaatcctttgtgacttttccaaaaccgctcgtatccatactgtacccgggcttgcagaactgtactttcagcgtgtctccgtcaatatagtagtgcagcttttcgtcctcgtcaatgtcctcgccggtctcatagacgttaagctcaccctcgccgcaggatacgttcacatttccgtaaacccagctcacctctaccttttttatgttcgcagagtcgtatgtaaaattgccggatatatacttgtcgctgtccttgtacagttttccgccgaaagctccgcatgacgaaagcacagccgacagaagagccacagccgccgttcccattataatatgtcttattttcattgtatcattctccttaaatcgtttttatctaaacaaattataccacctcggcatgagactatcaatacaagcgcgtgaatcttaaccatgatttaagctcttcctcactttttttaaggaaacacacataaaacggcgcaatatcgtgtttttttattaatatcgcggattgatttttctcgcgcggtgtggtataattgttcttacttaaaaaaatacgaggttctttaaatgaaggctgttgttaccgttataggacttgattcagtcggtattctcgcgagagtaagctccgtctgtgccgaacacaacgcaaacgtaatcgacgtcacccagtcggttatgcagaagctgttcaccatgataatgctaattgatatctccgacctcaactcggactttgccgctctccagtcgtctttcaacgcgctcggcgaagagataggcatgaagatacacattatgcatgaggacgtattcaactccatgcaccatatttgagaaaggcgtctacctatgctgaacactaccgatattctcgaaaccatacgcatgatagacgacgaaaatctcgacatacgcactattacaatgggcatttcactgctcgactgtgcggactcggatattcacgcttcatgcgacaagatatatgaaaaaatatgccgccgcgccgaacgccttgttcccgtaggagaggaaatcgagcgcacctacggcattccgattataaacaagcgtatctcggtcactccgatatcaatgctctgcgcagtctccggcggcaatcccgtggaatacgcgaaggtgcttgaaaaagccatcggaaaagtcggagtaaacttcctcggcggatattccgctcttgtacacaagggattttccgcgggcgaccgtgagctgataaactccattcccgaagctctcgcggaaaccgaacacgtatgctcttccgtcaacgtaggctcgacaaaagccggaataaacatggacgccgttgcaatgatgggcggtatcatcaagcgtgcggctgagcttaccactgacaaaaactgcatgggcgcggcgaaaattgtcgtactctgcaacgctcccgaggacaacccgttcatggcaggcgctttccacggcgtaggcgagcctgactgtgagataaacgtaggagtatccggtccgggtgtcgttcgttccgctctcacaagatgtcccgacggagatctcacagaagttgcggacataataaagaaaacagccttcaagataacaagaatgggacagctcgtcggaacagcggcttcaaaaaagctcggcgtaccgttcggcattgttgacctttctcttgcccccactcccgcagtaggagactcagtcgcgcacatcatcgaggaaatgggcattgaagtctgcggttctcacggaactacggctgctctcgctctcctcaacgatgccgtaaagaagggcggagttatggcgtcttcccatgtaggcggactgtcaggcgcgtttattcccgtatcggaggacgcaggaatgatagacgcggcacgctccggtgacctcagcatagaaaagcttgaagctatgaccgcagtatgctccgtcggacttgacatgatagtaatccccggcgacactgctccctcgaccatctccgcaatcatcgcagacgaagccgcaataggcatggtcaacagcaagactaccgccgtccgtgtaattcccgcaataggaaagcatgatggagaggagcttgagttcggcggactgttcggctcgggtcccataatgaagctgcacaacgaccgcagttccgagaaattcataagccgcggaggaagaatacccgctccgatgcaggcattgaaaaattagggtaaaatctgaaaaactaacgcaaaagtcgaagaaggaacacaatcaaatatacaaagtgagttcgtaaccatcctcactataagaaaaactacggaacaagctgtgacgcttattttgtagcgcgcggctttttcctttatatgaaaggattaccccagaaatgaaaaacagcaaagtcagatttatcgcatattccgcaatgatagcggcagcttatgtggcacttacaatgatatccgcagcgttcggtctttcttccggcgcgattcaggttcgtatttcggaggcgctgtgtgttcttccgatattcaccctctcagccgttcccggagtgactgtcggatgctttattgcaaatatactctgcggtggaacagtatatgacatagttttcggcacgcttgccacgcttatcgccgccgtcatcacttattttataaaaaatccgctcctatcgtccataccgacaatcgtctcaaacgcagtcatcgtgcctatcgtgctcatcatgtcgggcgtcggcggagtgaatatgttcccctatttcgcgcttaccgtaggactcggcgaggttatatcgtgcggtattctcggaacgattcttgccgtatatatgaaaaagcacccgagggtttctcaggcactttttaaggcttaaactattttacatctgccgacttcagcagctttttgaagtacagtgttccgtcttctctttttataatcaaagcaaaatactcttcatcctcactgtcggacgaggtgcagaccttgaacctcacacgatatgtcttttcggtttcggcaaggtatgttatttcggtttcgggctttgcgctctctgtgactgatggggaaatatacgcaccgaccttcggaagatatttgaatctgtctccgtcgcggtgcgttatttttacgtttccgccaaaatatcggtacatcgtggcttcaaattcgctctcgggaattatctgggatatcgtgtattcgggatacgacttctcagctttctcgataagctccgtgttgccagaatatttcgcgtagccgctttcaagcataaacatgagcaccgcgtccctgtattcccgtatggcatcgttcatattgtcaaacgtcggcagaacagtcttgtcggacacgagcacctccagcatttcgtaaatttcggcggcagtctcgtcgtgaatatcatgtacggagacaatgctctcgctcatgtaatcgtatgtgtcgaatccgagcttgtctgtcagtgagcacgaagtcagaataattatacagaataatacaagtacagtcagtttttttctcatttaattatactcaaacaaaaatattcagttgatacatttgtgtacggctttttttacgtcggcatacatataaagcgaaccgagacatacgagcggtctgtgctcttcctcggcgaaccttacagcttccctcacgccctcgtctatgctgggataggaatgagcttcaacgccgttttcggaaaactcacgcattactcccaccgaatcaagcgagcgggcattttccggcgttacggtgaaggcgcggcaggtgagcggggacagcatttttatcatcctgccgggctccttgtcagccataactcccatgagcagcaccgtttttccgtcatttgtcagcggtgagagatagcactttatgttctccacagccgaggcaataccgttcgggttgtgcgcgccgtcatatatcacaaggggactttttgacagtatctcaaatctcgctttccagtgagcagagaaaagtccgttttccactgcgctgtcgggaattacaataccgctttctctcagtatttctacagctgtcagcacggtcgcggcgtttctcgtctggtacagtccgtggagcgaaagtttcaactcacgtccctcaaacttgaatgaagtcgcgtcaaggtcggttcttatgtcggatattcccgcgaagtccgtcctgtagtatggtgaatgcatttcctccgcttttgtccgaatcacctcttccgctgaattgtcgccttccccgaacagaatcggcacgccttttttgatgattcctgctttttcggcggctatttctgctgttgtgtttccgagtatggcggtatggtcgaggtcgatccctgtgataacggacagtaccggagtttttattacattagtagagtcaagtctgccgccgagtccgcactcaaacaccacgtaatcggcgttctttctcttgtaataggaaagcgcgatggcggtgataagctcaaactcagtcggcgggtctgccattttgtcggcaaactgcttgacatattcggtttccgcggctaagtcgtcgttcgagatgttttcgccgcagtacattattctttcgttgaattcctcaacaaacggagacgtgaagagccctactttatatccggcggcggagagtattgatgacagcatcgcacaggtcgaacctttgccgtttgttcccgcaacgtggatgaagcgcaggctgtcctcgggatttccgagcatatttgtcagctccgttatcctctcaagtccgggtctgcttcctctccatttcacggaatgaatatattcgatagcttcttcgtaattcataatatcaaccaatcgttttctttattttttcacagagctttattacggcgggaatgatgattatcttcaccggaaccataagcgcgtattcgggaagacggtacatgaaccatccccagtatgtctttgagccgtagagaatgcttacccatgccgtattcacgagaagtccgaggacaattccgttaataagcacagcgggaacaacatggcggaagagatttactttttctcctttgaacagagagaacgagccgtcgccgcggtagaggaacagtccgtaaacagcgcccatgagagccgcgcagacagtaaatccggggaaataaggtcctatggggaacaaaagcgctccgataaggtctcccagtcctacgacaatcgcaccgactaagggaccgtacacgacagccgccgccacaacgggaacgaagctgaatcctatcttccagccgaacgtgttaatcgagcagaaacggttcagcactatctcaagcgccacgagaacagccgatgttgtgataactctgacagtcaaacctttgcttctttttttgacattattgttcataataaaaacctcccaaaaaatgtcatacttgcgtttgcgcatacggaacgtgaacattaaatcacacgcctgaacatttctgagagggatcggctcttatatatgtacagcgggatgcgaaattcggaccgcagcggaatgcagttttattctgcctcctgctttcgtccgacaaacaactccccgttttgccggcactttacgcccgaaaatctactctgtcaggaagcctctgaattttatgtattttagccttttatcgcaaaaattcgatttattcagagtatccttagaactttccgtatgagaaaattatagcacagacaaaggtcaaattcaatccccgcaaaataggttaatataaatctatcctttacacagttttttattccgtgcggaaatgcagattgaaatatgtcacaaaaaaagtccccgccgctgttttggtcagcttaggaagcctctgatttaatgttatttttgcaataaaagcccttatattttagcct

SEQ ID NO: 2185 - DNA, 5134 bp, Unknown
  16S sequences of unknown bacteria
tgcgctcttccagcagcggcataaaattcgctgcgaacgcgctgcttcttccctcgtagcgtgttcctacgatctgtgaaagcggaatctgcaccagaccgagattttcctgtggcagcgattcattcggaagaatatcatccagtacctcaagagtcggcttctgtccccggagcaaccggctctgatattcccgttttcctgccttatacgcctttctgtaatcttccattgacatactcatatcctcctgttatgacatctaaaacaatgacatctgttcataatgcgcacccggtatgcgaacggccttcggcgcgtaatcctcaaatgattcttcttccccctgcagtccggcaaacagctctgcataggcatccggaatcgactctctttgcagtgaattcacgagtgctttttgggaaatccgcaggccacgacgcctcaggctcctgatgaggtacgtaagtaacgcctgtggctgcgcatccatctcctcttgcagctcggcagcagacggcagatcctttccgcgattcgctgtatccgcctgcagcgccccaaggaaaacctccgtgttccagaggcactgctccggcttctcctctatgatatgccagattgcaccgtgctcagaagcaaattcccgcagtcctccttttgctgtatccgtaagtcctgtgccgtcctttacgatgtggacctccaccgtccgtccagtcaggcgcgcaaggagcggtgcaagcagataaggaagctcccggtatgcgcctgcatcaaagaaatcaacctgcggccgttcaccaaagaatcccggctgcagcaactcttccatacggcaaatgacctccgcctgcgccgtatcccagaatacgacctttccggtcaggcgaatctgcccgagcacatgcggcgtcagcagctcttccgccatatctgccagttctgtcagctccggatccccgcttttacctcctagtaaagcactcagctcttcctcagaaagctcctccattccgccaaggctgcggttcacctccgtctttgccgtcaccgggacaagctctccgctttgcgcctccatgagaatcggctcggagtttgtcgccagcaggatctggacctgcagcttctcctgcagcctgcgcagcagtcttgtaaagatcacctgtccttttgcagtgagatgtgcctccggctcatcgatcagcacgacgctcgcccgctccgggcagtaacgcaggatcatggagagcacctgcagcatctgcaggcttccgcttccacagctgccaaactccaggcagatgcgttcaccatcccgcttctcctcatactctgagacgacatacagctcactgctctcatagaagtgcagttcacgaagctcaaagcccgtctcctcccgcaggatccgctccagatatgcatacttctccggtgctttcagcttcagatccagcactacattccgaatgttggcgctgatcatcccggcgccgacctgcttcttaagcactgccggaaagagacgctcctcaaacgggcgaagtccggaaaagcaggaaatatacagtggctcctgcttttgcatcgtcggtccgtgcagctcctcctccggggtaagcaccttcacattcaaattgcggaacagctcccgcatatgcagtcttaccacattatgcttttcatccgtcagctccacaatcgcaccgctgttctcatcgtaagtcgcgctgcccctcgcaatttttttataaaacagaccgttcagatcctcctttggcaaaaacgggacatcaaatgtataatatcccgtactgctcaccttcgtctgcagggtcttgcggtctgtcacaagcagctttccctgatgcagactgtgcagtgcaagccagactgcctgcagcaccgtcgtcttcccggcattgttgccgcccatgagaattccaaaaggcggaagctccacctcggtctcacgaaactgtttaaaacgaatcagctttaccgattctatcatattcactcccccatatcggatgtctctattttacgggctgataaagtgcattcatcgctttgcgcttctcctcatctgcttcccttttgcccgttatccctcctgtgtatcagcagactttttcttattaattgtacatgttttttccgtgaaagccaaccacatttttacaaaaatcgctaaaaggttttcgcatatttcatttttccattgtatcccggggaaaaaaatgttagaatgacaacgatggcgtactttatcatttcgccaaaggagtgcagctatgaaaaatacaaccgacaagacattttccgctttgccccctgtcacactgacactggatccgctgaccggcctgctttccagaaacagttttcttgagcaggtacgtatccgactcgaccaggacgcgccaaaagactggtgcatcgccaccattgatctggagcatttcaagctgttcaatgactggtatggacaggaggccggagatcggcttctgaaaaacattgcagactatctcaaacgtattcaggactgttatcattacaccgttggctatttcggaaatgatgacttttttctgttccttcccaatgataacggactgatccgacttgtttttcaaactgtatgcgattatgtccaaaaccaggagcagatggagggctttcttccgatcgtcggtgtatatccgatcacagattctaagcgctccgtcggtaccatgtgtaattatgctcaaattgcagcttcgaccctgaagggaaagttcagccagcgcatctgctattttgaagcagccatggtggaatctctcgaaaaaaagcagcgcgttctgcatgaaatcaacaatggtattccaaatggcgaatttgtcttttacctgcagccaaaatgcgacagccgtacccgcaaaatcaccagcatggaagctctggttcgatggattcatccgaagcgcggactgatccctccaaatgagtttattccgattctggaaaagagcggattgatcacccggctggatatgtacatctggaattctgtctgccagacacttcgcagatggcaggacgaacataagcctgtcgttccgatttcgatcaatatttcgattatcgacattgaaaatatcgatgtaccacgctacctatccagccttacagaacagtatcatctggatccgaagtatctgatggccgagattactgagactgcttttgcagaaaacaatgcagcagtcaaacagacgatcgaccggctccataaaaagggcttcactgtcctgatggacgactttggcagcggttattcttctctcaacatgctcaaggatgccaatatcgatattctaaagctcgatatgaagttcgtagaaatgaatgaagaaaatcacaacaaaggcattcagatcatggattctgtcatcagcatggctcatcgcctgaatctgctgatcgtcgctgaaggcgttgaaacaagtgcgcaggtaagtatgctgcagtctatgaattgtctgtgtgtacagggctattatttttacaggccaatgcctatcactgatgcggaacagctgctctcgcaaacaccgatcgaggactatcacgagctgcgcaccagttttgcacagcagcacaactgcgaagagtatctcgtaagctatgagacacttccatctgtctctgaatccatcactcatattctggaagaaaacacgctggagctggcccgctttaatgtcataaccggggaatatgtcacgataaagaagaatccttttctcacagatgatgccgcaggtacggttcagaacattcacgattacagccatcggctggtcgatcaggggctgattcatccggatgatgcggaagactacctgctgttcatgcagccggaacatctgcagcatctgctcctgcataagcaaacagccgtcttctataccgtccgccgaaaagttgacggactttatgtgcggattctcattgaatttatcacaggactggcctgctctgagaacaatccttacgttgccgtcgtaagaagagttgccgacgacagtgattgatttgatatgtcataaccgaatcaagcaagtcccctgcttattgctttgcgcaattgaagcaggggacttgcttgattcgattaaaagccgccccctcacagcacctgtctgtgagagggcggcttctctatctactgtatcttctccgcggagatttattatccttcaatagctatggcctttttctcctcaactttcttttccggtgtcttcggaatgctcagtttcaaaataccattctcgtatttcgcctttacatcctcctgctttacatcctcaccgacatagaagcttctgctcatcgctcctgcgtaacgctcctgacggatgtacttgccttcctttgtcttttcatccttatccaatcccttcgatgcggaaatagtcagataaccattttcaagcgttgcactgatctcatcggtcttgaatcccggcagatcgacatccagctcatatgagccatccgtctcccggatatcagtcttcatcatgttctttgcattcttaccgtacaacgggctcttcttattaaaaaactctttatcaaacggaaaatccatccaactgtcatcaaataaattctctccaaaaatgctcggcatcaacataagtcatatctcctctctatctaaaccactctgtgttataaacttttccgaaccagaagctctttgaatcggttccggttgatcttcttctgatcatccatctccttttctcttctcctttgttctatgtgtaatatagcacttattattagcactgtcaagaggcgagtgctaataattttgtgaagattgtgtgaacgctacgagccatgcacatttacgtgaaaagccatcgttcaaaatcggttaagtaaccggttacgtaatcggttattttttcattgcgttttttcatgagaattgctatacttaaggatattatagaccgttagccgtcatatgaaggagattcaacttttatgagtaaaaaacaagtaacttttgcagatattgcagaatacacaaatttttcaaagactacaatatcaa

SEQ ID NO: 2186 - DNA, 7029 bp, Unknown
  16S sequences of unknown bacteria
aaactcccattccgttctctcctatctgacttttctgactttatatctggccataaaaccgctcgccgaaaatgccggtgccgacacgcaccatcgtcgcgccctcttcaatcgctacctcatagtcccctgtcattcccatactaagatgagacataaccacattatcaatgtttttctcttttatgtcaacatataattttttcaaattgcggaaatagatgcggttatcttctgcattctcggtatagggagcaatggtcatcagcccgtttacctgaatattcggaagcagacggatctccctgataaagtcttccgtctcctccggacggatcccgaattttgtctcttcgcctgccatattgacctctacgagcaccggaatcacccgcccgcgcttcgccgcctcctcactgactgcctctgccagacgaacggactcgatagaatggatcatacacactttatcaatgatatatttaattttattgcgttgcagatgcccgatcatgtgccagcggatatcttccggcagttgcgggaatttctcccggatttcctgcggcttgttctcaccaaaatcgcgaatctgacagtcatacgcctccatcagcatctcgacaggttttgtcttgctgaccgcgatcagctgtacctctctgcgatcccgaccggaacgcgcacacgccttttgtatattctgctccacaatggacagattttcttttaccatataacactacactcctttgctaatatacgatctgatcctctgtgacctcatccgctctcagaacaatatagtcatatgcggcaagcccatagatattattgctctctacaatgcagtactcctcattttcatctatgatcgtgacctcccggaacaccgcatagcccttattgatattgtaaacaccgtacagtgtctcctcatcatcctcctgcagctgcatatgcttcgccgaattatccaagagaatctcatccccgggtgaaaaaagctgccggtcaacgaggtaggcctttgcctccgaatcatatttataaacattggcagttacataggcggtctctccagactcggcgtatgtaaccttcagagtcacttcgctgtcggttcccgcatttttgatcacgtattcctccggaatcgcgtaaaaattgcgctgcaccagcgcagattccggaatcttcagaccggtctttttattcatgatcagctcgatctctaaataacgatccgaagcgtagcgcaccagagagttactcatggaaatctttccgaaatactctgacccgttttgaatgatcgaaaacggagctgtgaatgtcacattgtccttcaggaaacggaactgcagctttgtggcagacaccagctctgtatgcagcttctcattcaacggaaaatacagcgcccattcctcactcgtcacttctttaaataccggatttccggctgtcactgtcgcattctgacgaaggctcgttgcatgatagctgctctggtcaaatatctcagatgtgagctgtgtttccgtcatagactcatatccgtccgtattatacaagataaagcccgcctgcggtgccgtacactggttccgcacataagacggcgcctcgtccagtccctgcagcatttctgccagtgccgtctggacattggacttgatatcgtaagtacgctgaaacgcattactgctgaaattgatcgtaaagctggaaagcagattctggatgtgctttgcctcttcactgctcatggaaaatgtgctgtagctgaccggagctgtcgtccccgactcatcgacagagcagaccacgctccctgcagaggccttcgccccctcacgcatgtaataccgtaccgtgccggactgcgttgcattgacaacggtctcatcccgaagggaaaacgcatgaaaacgataattccccgtaatcgaaccacgggtaacctcataggctgtgatatgggactctgtcagatacatgaaaatacagatgattagataaataaaaacaatactgaacaggagtgtcccgatattaaaaaaagaatatcttttatactttgttatcttcccattttttttagatttgaacaatcagaaaacctccgaaaatcaacatatcttttttattttaccatgtatgttctaccgagacaaccgttgatttgaataaaatccatttttcgtgatatactgaccatagatacaatgctgcagcattcatcagcaattcagaaaaggaggaatccgaatgaaaggattggactatacggcactgacgcttgtcatcatcggagcgataaactgggggctcatcggccttttccgactggatttggtcagtctgctttttggaaatatgacctggctctcccgagtcgtctacacactggtcggcatctccggcatgtatctcttaagcctctacggaagagtcacagaaatgggatccgagcagatgtaagaactcacggcaaaagagctgctgcaaaaatcattgcagcagctccacttatgtagtcttttttataattccgcaatcatatacttcttcaaatcttccgctatgtcagcgccttcaagggaaatgctgatgacaaacgtcacgccgaacttctccaacttgcggagcaggtcattggccgtcgccgcgtctgtaagcgaaatcttcagaaaactgtcaagatacatctgctccagatcgtgatcctgagaaagaattccataaacgaagccgataaactctccactagactccagctcgaatccggaaacatcaatgagacggatcttattgttcagctcgtacatatgcttcggactcttatccagatatacgatgctgccgtgtgcatccttcacctcggtgtttaccttgtcaagtaaaatttttgtttttccttttccttttgcgcctacaattaactgtatcatggttatctcctcctttggtagcggataaatattcgtgatgtaattatagactattttcacataaattacaacacctaattgcaaatttatcgtctatttatacatatttcacgaatctgtagcaccaattaaagataatacctgattcatctcctgatacagggcatctttgtcgttggcgtgaagaataatcgataaatatggatttccgtataaatccttggaaagcagcgacagacatgcacctgcgtcatctgttgtaccggtctttccgccgtagatcacgacatcgtcaggagcctccgcttcattcgtaaaatagtgattcgttgactcccaggtcacagctccctcactgccgtcacttctcgtatactccgcataataatttttgcggctgataatatcctgaaaaatatcatacttcagagctgtattgtaaatcagataaatatcatagacagaggtataatgctccggatttgtcaggccatgcggattcataaaatgtgagcttgtcgcgccgatggatgccgcctcctcattcatcatctcaacaaaatgatcgaccgatccccccacatgctccgcgatcatcatcgccgcatcgtttccggaagcgagcatcataccataaagcagctgccgcagggaataaacttcgccctctttgatgtcgcagacagaagatccatactcgatatccgccgccgtcgaagtgaccgtgacaagctcgtccagatttccgtatttcagtgcaacaagcgctgtcatgaccttcgtaatactcgcaggggagcgttttgtaaaaatatctttcgcatagacggtacgctcatgattcacatcaaataatcctgcagaatatgcattcagcgtcagagccgcactgttcacatctccggaagccacacacagatctgctgcaaatgcatctgcggtattgcccgtcagaagacttcccccggagctcagtacaggatccgtccggtcatatggagaaaataattcatagtcatgggaacggaacacaaagtaatagaccagaaagcccatcagcgccgtcagcaaaaagagcaaaagcagcacaagaatcagctttcgctgtctttttgcctcctgcgcttctttttgctgaatgcgcgcccattcccgggctgtatagccaaccggctgttcatttttatttgtacatttcacgccactcaagatctcctcgctccagtgatttcagaagcatctctgcagatgcgatatttgtcgccagcgggacattgtggatgtcacacaggcgaattgccttattgacatcaggctcgttgctcctcgcatttaaaggatcccgaaaaaagatcacaaggtcgatctggttctggtcaatcatcgctccaagctgttcctcacctccgatatgtccggcaaggaatttatgaatattcagattcgtgacctcttcgatcagacgtcctgtcgttccggttgcataaagcgtatgctttgcaagaatgctccgatacgcaatgcagagattctgcatcagctttttctttgaatcatgtgcgacaaatgctacattcattcgtttggcctcctttaataaattgtcgaaatatcaatatttgcgggtctgaagtcctacattcagtaccagtccgattccaatacagaagctgaccagcgaagtcagaccatagcttacaaacgggagtgtgatacccgtattgggaatcagtcccgttgtaactgaaatgttgataaaggtctggaaaaaaaccagtgcggacataccgcatccaatcagtgttcccgacagcactttggccctccttccgatcagaagacattccagtgcaatcagaaattccagcagaacaatgatacagcatccaaggaacccaagctcctctcccgctacggcaaagataaaatccgtctgcggctcagagataaaattaccgtttttgacggagcctacatcatcgttattcaatccctttccgtaaagctgtccggaaccgatcgccttgattgagttctgctgctgtcttgcctcatccggatactcgtccggacgcagccatgcatagacacgcttcagctgataattgccgccgccctgctgctcaggctggatcagcacgctcacaaaaatgaccgcaaccggcaccagcactgccagcacaccaaaaacaattcgatagctgaggcccgatacaaaaatcagtacacagaataccccggctactgtaatcgttgtggaaagatccggctccttgtagatcagcaacagctgtacgccaatcagcaaaagagacagtacaatcattcggaacttgctgatctcatcttcgtgaacctcaaaaaatttggcaaaaaacagaatcagaagaattttcgccacatcggatggctgaaactgaaatccgatattgatccagcgtgtcgcaccgtttcgctcgacaccgaacagcaacaccattccgagcaacacggtgctcagcagataaatcagccagtgaaaattcagaacccatgtatagtcgaagagggacacgagcaccatcgcggcgactccgagaatcaatccatatatctgttttttctgaaaatccgcatccgcactcccgataatcaggattccgagaatcgccaatgcgacgacccacaggatcagacggaagcgataatcacttaatctgtattgttttaacatcctgtactccttgctttatctcatagacaatatccatccgcacttcaaagcggtcactgtccagattcaggtattttgaaagaatatttacaatctccttccgcatctgccgtaactcttcctgactgcagtcaagcctgtctgaagcaatcgtcagctctgcccgcgcccgtgcaactgcaccggaacgaacctgcgcatacctgcaaatattcatttcagcctcctacttctttttgaagaacgcggacatacgctgtaaaagtgacgtccgatgctgtagctcaagaagcggaaccgtctcgcccatcagacgccgggcgatattcagatacgcctgaccggccagagtatcacttccgacgacaggttccccatggttcgcggcaatgacaatgctctcttcatcaggaatcgctccgagcagattgactgccaggatctccagcacatcctcgaccgacatcatctcgccgcgttccaccatatccacgcgaatgcgattcagcaccagatcaattttccggataccatctgcctccagaagcccgataatgcggtctgcatcccggatcgctgatacttcaggcgtcgtcacgacaattgcctggtccgctgccgcgatggcattgcggaacccctgctcgatcccggccggacagtccagaataatatagtcaaacagtggcttcagcccgtccacaagcttgatcatctgctccgggctgactgcgcttttgtcgcgcgtctgcgccgacgggagcagatacagattcggataatgcttatccttgatcagtgcctgacggatcctgcaatttccttcaatgacatctaccagattgtagatgatccggttttccagccccatcacgacgtccagattccgcagcccgatatctgtatcgatcagaaccacttttttattcatacgggcaagccccgttccgatgttcgctgtcgacgttgtctttccgactccgccttttccggatgtaattacgataacctgactcatataccatccctccgcttcgcctgccatcattttgccttatttgcgtgtttcttcgcgcacggtacttctgttattatgtcagatattcacacagattttcacttgtgatcggtttgaactgcagatggtcatctttgatatacgccatcttcggatcaagcggatactctccggtatcctttttcttcacgatggcactgcgcgcccgcttatccgcaatgcgcacctgcatgggcttcatcgtaagcgcggccacaaagcagctgcggtcgcctcccgcgcctgcataaatgtctcccatacagcagcccagcacgacgatattaccttttgagatgatg

SEQ ID NO: 2187 - DNA, 15212 bp, Unknown
  16S sequences of unknown bacteria
attttttactacttgtttttaagtcggccctttttgcgcatttttattcacacttctcctccttgattcaggcttcatcccatttcctcctttccttcaggatgtgttagccctttcatcacaatacagtgtacaacaatcttcaaccgcttacaatgatttctttcccacattttcccatgatgacatatcattttgtccatatattcagaaatttattaatatttctgttctgcttttcatggcattgatgggcaaattttaccatgatgctcatcttgcgcatccttgcaggccgttatcgttcccgctgctcccagaaaaaaaagaccgtggcggcaatgccggatggcatcggccgtcatggcccttatgatcatttctctgtcttgcgatgctgcagataatgagagacccgcagctgcagcgcggtcggggccactctcgtcagtgccctcacccacttcatcatcgcgcccgggatgatctcacgcttttcgctgaacatgccgtcgatggcgatcttcgccgctttctgcgcggacatgccgctggtgaagaactccacgctggccacctggttgaattcggtgcgtaccggccccgggcacagcgccgcgacatgcacatggctgccgcgccggcgcagctctccgtagatcgactggctcagccgcagcacatatgccttgctcgcgtaatacgtagccatcagcggtcccggcgcataagccgctatgctcgagacattgaggatatagccatggtcccgctcgatgaagtcgcgcaggaacagcttggtcaagatatgcaccgcacggatattcaggtcgatcatctccagctcccgatccaggctcgtctcatcgaaggggccgcagagcccgaaaccggcattgttgatcaggatatcgatctcttccgccctgactcgctcatagagcatgcggcagctcttctcatcgcgcaggtccatgcagatgacctgtgcgtgttctcctaattcttcgcgcagcgcctgcagcctcgtcagccgtctggccaccaggatcacctcgatgcccatggcggagagctgccgggccatctcgcggccgatgccgctgctcgccccggtgatcagcgccttcatctgctttcctcctgctgcagctgcgcgccgtctatgccgccctgcaggcttccgctcacgccgatcaccgcgtctttgaccagatctgtggcatccagccagaagacgaagcgctcattgtcgctgatcacgatcttctgcaggcggacctgttccctgaacgccttcttggtcagcttcttctccccgttgggcagcgcggcgttgaatttcggcacggccatgtccgccgcgtaattcaccgcgtcattataccatccgacctgacgcttctgcatcgcgtgcaggatacggatgccttcttcctgctttccttcaaaatagactttcgtccgcgctttggcaaatgtctggatgcggcagcgcccttcggcgacctccgcttcctcttcttcggacatgcgcacatccgcctgcggggcatctgcgccgcgcaatgcttcaagctgcggttcgctgcagtcgttttcgatcagctcgagcagttcgaatccctgctcgctgatgcgcaccttcgcatgaaagatggcattcttgcgcagctgctcctgcaacgcatgcacgccttcctcatcgcagctcttctccagccggatcttctcttcgtgaagcacatcgctgccttcttccttccatgcgcgcaggatgatgctcgctctccaatattgcgcctctccgctcttgtgcgcgcccagaccgacaggaccacacagtccgtagatgatcaagggccggtaattctgcttctctctcttcttgaacaagcggtcaaacagtcccatttccttcacctctgcattctgtttcattatagcatgcgtgaggaagcatgtcatgctccctcacgtatctttctcattacgatgttcagatgccgcggatctcatgaaaggcatgctgagcggcgatcgcgccgtcattcgctgccgtcaccacctgacgcagcggcttggcgatcacatcgcctgcgccatagatgcccttgcacgccgtctcgccgttggcatccacgatcatgtagcctttttcatcgagcacatcgagcccctgcaaaaagctgacggccggatcctggccgatgtaagggaagatgccgctgacttccagcgtctgttcgtccccgctgtccacatcgcgcagcacgatgccgttcaccttcatgccgtcatcgaggatgcgcaccggcacatgccggcggatgatctcgatcttctcgttctcctcgatctgcttctgcacatgcgcttcggcacggaagatgtccctgcggatgacgatggtcaccttgcgggcaaactgggtcagatagagcgattcctccagggccgcatttccgccgccgatcacgcagacatcgcggtccttgaagaacgcgccgtcgcagaccgcgcaatagctgacgccgcggccgacattttcttcctctcccggaatgttcagcatgcgctccgctgtcccggtggcgacgatcaccgccttgcacgtatatgccgtgccatccgcgcagatgacctgcttctgttcgccgtcttcgatgcgcacgacttccccataggcatagacggccccgaagctggtcgcgtgctcgaacatctcgcttgccagggatgcgccggaagtcgagcggatgcccggccagttgctgatctcattggtcttgatcagctttccgcccggcgcccccatttccagcatcagggtgctcagccctgcccggctgccatagatcgccgcgctcatgccggccggaccggcgccgatgatcaccagatcgtagtatcgctccattcgcgttcctcctttacgatatcgataagctctctgaattcatgaatgagcgcgcacggagagagtgcctgcagcgcctcctcacgagaagcgtcggacacgaaggccacgctgaacgccgccatgttcttcgccgcctcgatgtcgcttggggaatccccgacatacacgacattgtcatggtcatggcgcagctcgccgcatacgcgcaggatgccctgcggatcaggcttgggacggtcgatctcatcgccgcccagcaccgcgtcgatatagcggccgatcccggtatgggaaagccccatgtcgacgatgtcccgtttcttgttggacatcacgccgaggctgcagcctcgttccttcaatgtgcgcagcacctcttccacaccgtcgaacaaggtcaccagctcatcgtgatgggccttgttgtatgcgcggtagacgtccaccgcatggtctacctccgcctcgctgtcaaaatagcgggcaaagctcacctgcaaaggcgggccgaagaacgcgtccttgtcttgcttggtcacgatatacgaaggcttcagctcatgcatcgtatggacgaacgacgcatccaccagcgcgcgggaatcgatcagggtgccgtccagatcaaagatgacggctggcttttcccggcgaaacggccagaaccgccgaaacagacggtcccagacgccgatgatgccggcgatgccgacgatcaccagcagcaggctcaccagctgcgcgatacgcaggccgcccgccatcagcgcatcgctgcgcatcgattcgatcacaaagcgcaccgcgccataccacgcgcagtatgcccaggccagatcgccgcgcttcctgcggccatgcttgcggtagacgaaggtgatgagcgcaaagccgagcagattggccaggctctcatacagaaaggtcggctcgcggtactgcccgccgatatacatctgatctttgatgaacgagggccatccctgataatacgattcgctgacgacgcggccgaacgcttcttggttgatgaaattgccccagcgtcccagcgcctgcgcgatcaggatattgggaaagatcgcgtccatgacgcgcagcccgtccaccttcatgcggcggaagtaccacaggccgaaggccacgcccgcgatcagaccgccgtgaatggccagtccgccctcccagatataaaagatgcggatgggatcggctacgtatcgttcccactcgaagatcacatagtacagccgggcgccgatgatggcgatcagcagcatcggcacaaagaaattttctaacatctcgctgtcatagccccacttcttcagcgtgcgcaggctcagcacataagcgatcagcgcaccggtgaggatgaacaccgcataccaggtcacatggatgttcccgatggacaacaagatcttgggatcaggaaacagctgcatctgactcctccttattcttttcgataaattccagcacgcgctgctcaaactccttggccgagtccagcccgtccttggccagcatgtaattggtcacggcgctttcgatgatgacgcccatcgaacggccttcgcgcaccggaatggtgatcttgggcacatccacatcgagtatggagaccatcttcttctcttcgatgcccacccggtcataattggcccgcggatcaaattcctccagggtgatctggatatccacattggctttgtgggcgaccgcgccgacgccgtacatgcgcgcgatgttgatcacgccgacgccgcgcagctccagcatgccttccagcagctgcggcgacttgcccaccagatgattgtggatgcggtaacagtccacccggtcatcagcgaccagctgatgaccgcgcttgatgagctccagtgcgatctcgctcttgcccatgccgctttcaccgcagatcatcacgccgatgccatagatgatgagcagctcgccatgcacagagaccgacttggccagccgttcatcgagccaggtgatgatgttgacgatcgtatgattggtcttttcctcacagcagaagaccggaaagttcttttccagcgcgcattcccgcaggatatgcggacactcatgccctctggtgatgacgatggccggcgtttcttctccggtcagaaagtcaaacgagcgcttttgcgcctgctcgctcatcgaatggatataggcgatctccttatcgcccaggatcaccaggcgcttggcctgggagtagtcgaagaagccagccagctccaggcccggccggttggtgtctgtcagctcgatgctgcgtctcagcgactgttcgtcgccggtcagctgttcaaactgaaagtaatccgcaaattccttcactgtcacttttttgtctgccatgctcatccctccagcatctttctcagatatcgtccggtatggctcgtttctgaacgggccacttgttccggtgttccgcacgcgacgatcgtgccgccttcatcgccgccctccgggccgatgtcgatgatatggtccgcgctcttgatcacatcgagattatgctcgatgaccagcacggtgtcgccgttgtccacgatgcgctgcagcacttccagcagcttcttcacgtcgtgcgtatgcaggccggtggtcggctcatccagcacgaacagcgtcttgccggtcgccttgcgctgcagctcgctggcgagcttcacgcgctgcgcctcaccgccggaaagcgtggtcgcgctctgtcccagcttcacatagcccaggcccacgtccttgagcgtctgcagcttatggcggatcttgtgcacgccggagaagaagtcgatggcctcttctacgctcatttccagcacatcataaatgttctttcctttataagtgacctgcaaggtctcttcattgtagcgcttgccgccgcactcttcacacggcacatacacatccggcagaaagtgcatggagatgcgcaggatgccatcgccctggcaggcctcgcatcgcccgcccttcacattgaacgagaagcgccctttttcatatccgcgcagcttggcttccggcgtctgggcaaacagctcgcggatatcgtcaaacacgccggtgtatgtcgccggattggaacgcggcgtgcgtccgatgggatcctgcgagatatcgatgaccttatcgatgttctcgatgccgcggatctccttatgcttgcccggcttgatgcgcagacgccccagggcatgctgcagccccttggtcaggatctcattgaccaacgaggacttgcctgatccgctgacgccggtcacacagatgaaggtgcccagcggaaagtccaccgtgacatttttcaggttgttggccgcgcccttgacgacgcgcagcttcttgccattgcccttgcggcgggtcttcggcacttcgatcttcatgcggccgctcagataattgcccgtgatggaatccgtattggccatgacttcctgcggcgtgccgcaggccacgacctctccgccatggacgcccgcgcccggaccgatgtcgatgatataatccgaagcacgcatcgtatcctcgtcatgttccaccacgatcagagaattgcccagatcacgcatatccttcaacgtggcgatcagacggtcattgtcgcgctgatgcaggccgatgctgggctcatcgagcacatagagcacaccgctgaggtgggagccgatctgcgtagccaggcggatgcgctgcgcctctccgccagacagcgagcccgcgatgcggtccagcgtcagatagtcgagccccacattgagcagaaactgcagccggtcagagatctccttgatgatgagccgggcgatgtctgcctgctgaggggtaagcttcagctcctgcatgaagcgcaccgcctccttcacgctcatcgtcgtccattcatagatgttctttccgccgacatagacgctgagcgcctgctcgttgagccgcttgcccccgcaggtcggacaaggcatctccgccatgaacgtgcccagccattcccgggacatctggctcgtcgtctccatatagcgccgttcgatatgcgtgaccacgccctcgatgaactcattcttatgggtgacattgccgctgcgggaatacagcgtataggcgatcggctcatctgagccatacagcatcatgtccatctgatgcttgtccagctcctcgatcggcgtatgtacatcgatgccgtaatgatccagcagcgccttgaaccgctgccattccagattctctgtaccggcgatattcttataatagacgatgccgccctgcgcgatgctcttcgtgcggtccgggatcaggtagtccacatccaccttctgcgtgatgcccagtcccttgcattccggacatgccccaaagggcgcattgaacgaaaacagcttcggctccagcttggggacagaaaagccgcagtacttgcaagcatagttgctcgaaaagagcagctcgtcctcgtcatatgcgacgatggccaatccgtcgctgagcttcagcgcattctccagcgaatcatgcaggcgggagcggtcatcgctcttcacgatgcggtcgacgaccacatcgatgtcatgcttgcggttcttctccagctgctccacttcttccaggatgcggatctccccatcgatgcgcacgcgcacatagccttccttggtcagccgggccagcagatccttatgcgtgcctttcttgcctctgacgatcggcgcgaggatctgcatccgcgtgcggtccggcagctccatgatgcggtcgatcatctgcttcaccgtctgtgaagtgatcggctcatgatgcgtcggacaatacggcaccccgatccgcgcatagagcagacgcagatagtcatagatttccgtcaccgtgcccacggtcgagcgcggattgttgctggtggtcttctgatcgatggaaatggccggagacagtccctcgatgctgtctacctccggcttttcactgttgcccagaaactgcctggcataagcgctcagcgattccacatagcggcgctggccttccgcatagatggtgtcaaacgccagggaggtcttccctgagccggagacgcccgtcatgatgacaaagcggtcccggggaaccttgacatcgatgttcttcaggttgttttccctggcacccttgatcacgatccattccttgtccatgtaatcaccccgttttatcatttgccgcgccgcacccgcttataccggaggacgcgaagtctcgtatattatataccaggttgttttttttcgcacccggttcgcatgaagttctcctgtgatttcctctgcccgcaaaaaagacagaccgctcgtctgtctttggcatgatctatggcagatccgggcgggtgaaggtcagccgctcgaagatgtagaacagcccgttttgcaccagggggatcagcacgatgccgacacctgcgcataacagctgcagcgggctgagccgcacgagcatgaaccaggaagccagcggcggcacgatgatgcagagcacgaacatcaggcacatcgcgccgaagatgatgcggcggttcatgttgaaggggcggctgatgcggaagagcaccgccagcgagctgcagccggccaggatcacgcacagcgtggagatgacctcctggctgagcggctcgatggccgtcagggcatagacatagaagaccgagagcacgacgcataacgcgccgggcaaggccttgctgaagacattgcgtaaaaagtttccccgcacccgctcatgattgggctccagcgccaggaagaacgaggggatgccgatggataccgtggagatcagcgtcagctggatcggttcaaacggatagatgggaatgaagaacaacgtcagaaagccgaggatcaccgaaaaagacgtcttgaccaggaacaaggaagccgtgcgctggatattgttgatgacgcggcgcccttcgttgacgatgtctggaagatgcgagaaattggaatcgagcagcacgaggttggcgatgttcttggccgcctcgctgccctgcgccatggcgatggagcagtctgcctccttcagcgccatgacatcattgacgccgtctccggtcatggccgtgatatggcctttgcgtttcagcgcctcgatcatctgctttttctgtaccggcgatacccggccgaacaccgtataacgttccaccgccgcttcgatttcttcttccttcagcgcagaggcatccacgcagaggtctgcgtcacggacgccggcagccgcagcgatctgttgcaccgtccgcgcatcatccccgctgatgatcttgacgtcgacgccctgatcataaaaatagtccaggatctcaggcgcttctgggcggatcggatcgctgagcacgatcagcgcgagcagcgtgcagtccatgtcatgcagatcgtcctggatctcatccgggctggcagcgagcgcgatgactcgtttgccttgcgcggccagatcgctgatccgccgttccacgtcctcctgccgctgcacaaagatgaactcatatgcgccgatcagataggtccctcgctcttcgtatgtcacgccgctggccttgcgggcgctggaaaacgccagcgtctttgcgctctgccagccctcctgcggtgaagcataggcgcggatggcctgagcggtcgcgttggtatcctgcaggtcatggaagcagtgtccgaggatctcctggatatccgcatccgcataggggatcacttcctccaccgtcatgcagcccgccgtgatcgtcccggtcttatcgcagcacagcgtatccacacgcgccagcgtctcgatgcagtacagctcctgcaccagcgtattcttgcgggccaggttgatcgtgcccactgccagcgcgacgctggtcagcagcacgagcccctccgggatcatgcccagcaccgccgccaccgtggccgggatggcatcattgagcgcggcatgcgtaaagaacagctgctttcccatcagcagcagccccatcggcacgatgatgatgctcacggtcttgatgatgaaattgatcgcatcacgcagctgtgaaggatggcggcgcacctgccgggcatgatcgaggatcgtgtggacatacgtctgtctgccgacagcacagacttgcgcgcagacatgcccgctgaccgcaaagctgccggaatacaaaaagctgcccgcttccttgaggatgatgtctgactccccgctcaccagcgattcattgcattccagcctgccctcccggacgatggcatcgcaggggatctgatctccgttggacagaaacaacagatcgtccatgacgatctcatccagggccagctcacattctctgccatcgcgcagggccttcacatgcgtctgcgagagcagcgagagcctgtccagcacacgcttggagcggatctcctgaaagatgccgatgacgatattggaaataatgacgcccagaaagagcatattgcggtaattgccggtgatgaagaccaatgcggccaggataacattgatgaggttgaacagcgtcatcagattgtcccggaagatcatgcggtagctcttggtcgtcttcttcagctgttcattatattcacccttttccctgcgggcagccgcctcctcagcggtgagtcccttacgcaggtcagtatatgatcgaagctttacatccatgcaaacacctgccttgtttctcacattatagcatatccgtttttccccgacggtttcacaaatgtaagatttctgaaaagcagatgaaaaaaccgtcttccacagtgttttcattcaacattgatcctatatgtccagcatagcctgttccgaatgatccggcacgttcttctacgcaccaaaaggggcgtataccgcccctttgcgttcatttcctgaaaccagatcatgctaataccaatcgtgcttctccttttcatcgaaggaccgagatgttttcctggatatgccttggattgctggagccaggagctgttgccgccgcttgctccatggtatggatcaagacctttacagctgtcttttcatcatcactgcattgctctctggaagaaatccgtcatctgatcaaaggggatcacttccagattgtcatacagatcggtatgcaccgcatcagggatgatcagcagttccttgttctctggcttcggattgcctttcatcatggcagcataggcatcccggctgaaatagcaggagtgggccttttccccatgaatgatcagcaccgctgagcggatctcattgctgtagtgaaggataggctgattcataaaagacatcgtaccggtcacattccacccgccgttggaattcaaagaacgtggatgatagccgcgagccgtcttgtaatagtcgtgataatctttgacatagaaaggcgcgtcctctggcacttctgctgccacgccgccgcccaaggcatgagcgccattccggcagtcttcgatacgctgggcattgagcgcctttttcttttcataccgggctgcttcactgtcctctgcatcaaaatagccattggcgttcacacgggccatatcatacatggtggaggccaccgtggccttgatccgggtatcgagggcagcggcattcagggccatccctccccatccgcagatgccgatgatcccgatcttctctggatttacatcttcccgcatacagagatgatcgaccgcagcctgaaaatcttctgtattgatatccggggatgccatataccggggctggccgccgctttcgccagtaaacgaaggatcaaaggcgatcgtcaagaaaccgcgctccgccattgtctgggcgtacaggccagcagcctgctccttcaccgcgccaaaggggccgcatacggcaatggctgccagcttgccctcggcatgcttagacttatacagatcagccgccagggtgatgccatagcgattgcggaaagtcaccttgctgtgctcaaccttatcgctttgcggaaaggtcttatcccattcctttgtcaagatcattttttcttccatgtcaagatacctccattcgatcatttcttgcggaccgtttgtccgcgcttcatggtgcaaaccatgcgctatgcaaggaaagaagctgaaactgctcttgccttcttcctcccttttgcagctgcagatattttcagatcatggcttcttcacagccagcatcgttcaagttgcgaagaagccgcgctgtttcagaaatttcacccatgactctgccacctttaccgctttcattataatgtcatgcccaaagcataacaaatacctaatttgaaaaccgtgttttgcttttcaggcatatcaaagaacgctataatgattatgctaggaggatcgatatggaactaagagtacttcgctatttcttgacgatagccagggaaggaagcatcacgaacgcggccaacgttttgcatgtcacacagccgacactttcccggcagatccatgacctggaagaagagctgggacagcggctgtttgttcgcggcagccgcaatatgagcttgactgccgaaggcatgatcttgcggaaacgtgcagaagagatcatctccatggtcgataaaacagaagccgaatttcattcaatgagcaatgtcgtgagcggcgatatctatatcggcggcggagaaactgaggcagtcaaactgatcgcacagatcgtctatgagctgcgcacagcttatccggaaattcattatcatctgtacagcggaaatgctgaggatgtcaccgaacggctggataaaggcttattggattttgggctgttgattcagcctgcagacatctccaaatacgattacttcaatattcctgccagagatacgtggggcgtcatcatgcgaaaagacatccctctagcaaaaaaagaaacgatcagaaaagaagatctgctgaacgttcccttgatctgctcacgtcaggtcatttcagaagagcggcacaggaatgaatttgccgagtggtttggcgaggatttcgacaagctggacatcgtcacgacgttcaacctcgtctataacgctgccatcatggtcgaagccggagtgggctatgccatcacgatcgacaagatcgccaatacgactgaaagcagcagtctctgtttccgcccgctggagccgcagctcgattcaggattaaatatcatctggaaaaaggaccaggtgttttccgcagcagcagcgttattcttcaaaaaactgcgtgagcattttggttaggcgcacgcgaaaacggcaatcagaaatgcatctgattgccattttcgtcatgtctgcctccagcctaagttcagccagatcagacagtctgcgtattttcctgcaatttcagataaagctgtgcccacgttgactcaatgtagggacggacaaaccatacaccgatacggaaagccagcgtgcccaggatgagccatcccagaaacgacaggctgagcacgaacatctccgccttgtgtcccatggtcatcttccggctgagcgcgaatgcgtcttcggcgcgcatgtccggctgctgcgcgagcagatacgggatcatgcggtattcatatgatttgacgatgcccgggatgaccagcaagagcgaccaggccagtatcttgacactgaccaggaacatcaccttcaccacattcaggtagtgggaagaaaaagcggaaaataatgtggaaaacggctgcggaccggaagcagcgccgagataatagcggtttgtgcccactttgatcacattgccgataaacaccatgagcatgatggcgatgagcgcgaaaaacagcgcgttttgcagctgaagcatctgcagccaagggatgttcagccagatcgaccgtccgttcaccgtcagattcagaccgccgcgcagcgggagcagatgctgttcgctgagcatatcaaggatgtccgcaaacgcgtcagtaagcagataagcgaccagcgagaccgaaaacatcatccagtagctgtgtttcatcatggcttttgccttctctttgagttcagctcttgtccacatgaggttccctcccttcatctccagcatacgccttgcccgcttcctggtcaacaaaaaaagccgcagtcatttcactgcagcttctttgatcagatattcataaatttctgtgcggcggtcacgatggacatcttgtagacttcgtccgcattgcatccgcgggacagatcattgatcggcgcattcagtccctgcaggatcggtccgatggcttcccatccgcccaggcgggcagcgatcttgtaaccgatgtttccggcatcgatgttcgggaagatgaacgtgttgatgtttccggcaatctcggattccggtgccttcagcgcagcgacctccggcgccacgcagcagtcgaactgcatctcgccttccaccttgtaatccagcggcatgcggctcagacggatcgctgcttcgcgcaccttcgatacgctctcgcccttagcagaaccaagcgtagaataagaaagcagaccgatgcgcggcgtcatgcccagctgcttgacggtgttcgccgtctgcatggtgatctccaccagttcatcgacattcggattgatattgatcgagcagtcgcccatgaccagctgttcctcgcccttgacgagcacgaagcagctggaaacgatggagttgcccggtgcggccttgaccaactgcagcgccgggcgtaccgtatccgctgtagaataggtcgcgccgcccagcagaccgtccgcgtagcccatctgcaccagcatcgtgccgaaatagttggtctgctgcagcgccttgcggcatgctgcctcatccatctttcctcggcgcagctcaatcatgcgtgtgaccatcttgtccatgtccgtaaattcctgcggacacatgatcttaattccgctcagatcgtggctgtacagcttcgccgtcgctgcgatctcatctttgtctcccagcaggatcggattcaggatcccctcccgctgcagacggacggccgcctcctgcacacggttatcaggaccttcggtaaatacgatgcgtactcctttgcccttgatcttttctcgtaaatcatctacaaacattgtctgtaagccctctctttcatacagtactaagtatacatcgtcatatggtaaaaaaaaagtccaaacaatgtgaactttctcacaaaaacacccacgaaattggca

SEQ ID NO: 2188 - DNA, 32759 bp, Unknown
  16S sequences of unknown bacteria
agcgcggcgaaaagcgcgggatagccattggcgaaaagcgtggcgaagagcgcggggaaaagcgcggcaagctggaaacggcgcgggccatgctgaaggagctgcccatagaccaggtcgcgcgcttcacgggcctttcgcgggaagaactacaatcgctggccggcgaaattgccccgcgaggctaaggggcgaatgtatatgacctggcaaattcgtcaacgggaagcggagctgctcggggaaaaacgcggcattgccatcggcgaaaagcgtggcgaagaacgcggcgaaaagcgcggcattgccattggcgaagagcgcggtgaaaagcgcggcattgccattggcgaagagcgcggtgaaaagcgcggcattaccattggcgaaaagcgcggcaagctggaaacggcgcgggccatgctgaaggagctgcccatagaccaggtcgcgcgcttcacgggcctttcgcgggaagaactacaatcgctggccggcgaaattgccccgcagggctaagggcaaagccgccgcggctatagtagtcgtatgcacaatggcttttgcggatgaccgccgggggatgcgtctttcggcggtcgatttatacacatttttacgtttctaacgtgtggattttacgatttgccctgctcccaaaaagaggcggttccttgacatagatgctctatcatgctataatttatagtatctgaattgcatagcgcggttcagaattcgtaaggaggggtttacccatgaaaaggacattgtccctcgttctcgcgctgagcatgctgctttgcggcgttgctttcgcggaagacgcagccactccggaagagagctacacgtataacctggctctctcggagttcccgaccaactggagcccgcacaaccagcagacggcgacggactccgaagtgactaagtttatcgctccgggtctgtacacttttgattacaacgatacgatggacggctatgtgatggagccgtacgccgccgccgatttccccgtagacgtgaccgcggactacgtgggcgaagagtggggcattgaagagggcgaaaccgctcgcgcttggaagatcccgctgcgcgacgatctgatgtgggacgatggcacccccatcaccgcgcaggattttgtggatagcgccgaactgctgctcaatccggacgcgcagaactaccgcgcggacaccatgtacctcaccaacctggtggttaccaacgcggaagactacgccaagcagggcgtagagagcgacaccacgctgcgcgcctatatggagatcgcgggcgcggcggacgtcgattccttcctggccgagtacggcgagctggacggctatatcaactggagcgattcctttggcgacacctatgatttcgagaccgaagcctggaccggcgcggcggaagacgccatcgtcgacacgggcctcacgctggccgagctgtacaccttctatacggaaggcgcgggcggcgaatatatcacctgggcggatgacgctggcaagcgtgaatacgcgctggatgagctgtacgccaagtacaccccggaagggggcatcagcttcgacagcgtaggcataaaggcgcccagcgataccgagctggtgctcatcctggaaaagccgctggaaggtttctacctgtggtacagcctcaccgatagctggctggtgaagaccgacctgtacaacgagtgcaccaccatggaagacggcgtgtacaacaacacgtacggcaccagcgtggaaaccaccgcttcttacggcccctattctttgaccactttccagtccgacagggagtatgcgctcaccaagaacccctactggttcggcaatgacgatcccgcctatgagggccagtatcagaccaccacgatccattacgactatgtgcaggaagtttccacccatctggagatgttcctgaacggccagctggattccttcggcctggatgtcgaccacatcgacgagtacggcaccagcgactacacctactattctgagggcgacagcgtgttcgccatggcgttcaacccggatttcgaggccctggaagccaaccaggcggccgccggcgaaaacatcaacaagaccatcctcaccgtgaaggacttccgcatggctatgtccctggccatgaaccgcgcggagttctgcctggcgaccgacccgctgaaccagccggccttcgcactgtatggcagccagatcgtcgcggatccggacaacggtatcttctaccgcaacaccgacgtggccaagaacgttgtggtgaatttctggggcctggccgatgaaatcggcgcggataagctctatcccaccgtggacgatgccatcgatagcatcaccggctacaacctggagatggccaagacctatttcgattccgcgtatgactacgccatcgagaacggcctgatggacgaggacgacgtcgtgcagatcaccgtcggcacgccgaacgccaccgccgccttctacaacaatggctacgacttcatcgtgaacaactacaccgaggccgtcaagggcaccaagctcgagggcaagctcaccttcacgcgcgactccacgctgggcaacggtttcgccgatgcgctgcgcaacaacaacgtggatatgctcttcggcgtgggctggacgggttccaccttcgatccctacaacctgatgaccgcttacaccaccagcaactatcagtatgacccgtcgtgggatacgtccaccgcgatgctggacatcaccatcgacgatgtgacctacaccgccagcgtgctggattggacgaacgccatctccggcctggagatcactgccaccaccgcagacggcgaagaagcgaccctgtccttcccctacagcaccgacgcgcatgaggccgaactgcgcatcaccgtgctgggtgagctggaaaatgccgtgctgcagaactacgacttcatcccgctgatgaacgattccaacgccactgtggtgggtatgcaggtgcagtactacacggacgaggaagtcttccccatgggctatggtggagtgcagtacctgacctacaactactctgacgcggagtgggatgcttacgtcgctgaacagggcggcaccctgaactaccgctaaatcctttcgcgtttctttgggcgcgacgccgaccagggccttccctggccggcgtccatccaattcttgcaaaaaatccagcgcatggtttgcggccgcacccggcggaaggcgcgtcggatgcagccgcaaaccatggagggaaaggggcaaacgcatggtaaagtacgtatgcaaacgagttctattgctgctgatggtattttttgtgatcatatccatctgctttgtgctgatcaagttgctgccgaacaagccggcagagcagttcggcaaagacatggcgctgattgaaatgcgccgcgaggcattgggctacaataagccgctgatcgagcaatactggatcttcatccagaaatcgctgatcgggggcgattggggcataagcgaaacgctgtatctgggccagaatgtgtgggataaatttatggagaagatgccagccaccatgctggtgaactcctatgccatgctgttcagcgtgccgctgggattgctgtttggtatctatgccgcgctgcgcaaaaacaagtggcaggatcactttatttccaccgcggtaatgatctttgtgtccgttccttcctatgtgtatgcgttcctcgtgcaatacctgctttgtttcaagctaaagtggttcccattccagatggccgcgggattcgactatttttcgtgggaaaccttccattccctgatcccggcaatcctgtccctgggctttggcaccattgcgggcctcacacgctacacccgcgcggagctcacggaggtgctcaccagcgattatctgctgctggcgcgcaccaaggggctttctcgcgcgcagaccaccgtgcggcacgcgctgcgcaattctatggtgcccattttccccatgattctgggcgaattcatcggcatcatcggcggttcgctgatcatcgagcagattttcggcatccccggcgtgggcgcgctgtatattgattctatcactgcagccacgcccgactacaatttcttcatgctcctttcggccttttacacgctcgttggcctggtcagcggcattctggtcgacctgagctatggctttatcgacccgagaatcagaatggggagtaagaaatgatgagcgagaacagacaatacgaacacattcccgctagcgaattcgcctttgtggcggacgcggatcgcttgcacgacaaaaagttggaaaccaagccgatcggctatttcaaagatgtgctgatccgcttttcacgcaacaagagctcggtggtggcggcgttcatcatcctgttcttggtgctctatgccatctttgtgcccatcttttgcgaaacaaactattcccgctcgctgacggataccatgtatctgaactatggccgtctgccgcccgattggaacggcctgtttggcatcgacggtacgggcaaggcgacggtgaactccgccacttacctgacctaccgggcgctggccgaggaaactgggctgaatcctgtgctggaagtgtaccgcgcagattacaccgaccccaccgccagccagagttccacgtattacgatatcctgcgcgacaattattacaccatgggcatgatgtatctcacgctcacgccccagcaatacgaggatctgcaggcctggcaggatgaaacgggcgtccaggtgatctatcccgccatcacggatagccgccagtccgacgccaacatctggtacgaggccaaccgcaagggcgtgccgcagctggacgatgagggcaatttccagcccatctaccgcaccaccacgccggaggacacctcctaccacagcctgcgcattgccagcgataccgatccggaagcgccctacgcctatgcccgcgtgaccggcacttcggacgcgcgctcctatgtggtgcgcgtgtgcaaatacacctatttccaataccgctacggctttgagccgtcctttgtgttcggcaccaacgcccgcgggcaggatatcctcacccgcctggccgccggcgcgcgcttcagccttatcctcgccatctgcgtttccgccatcaacctgttcatcggcgcgatttatggcgccatcgagggctactatggcggcgcggtcgacctcattatggagcgcgtgagcgatattctcaatggtatccccttcgtcgtggtgacgacgctgttccagctgcacttatccaagcgggtgggcgtggtgccagcgctgctattcgcctttgtttccacggggtggatcggcatggccagccgcgtgcgcatgcagttctatcgctttaagggccaggaatacgtgctcgccgcgcgcacgctgggcgcgaacgaccggcggctgatgttcaagcacatcttccccaattcgatgggcacgattatcaccgcttccgtgttgatcatccctggcgtcatctttagtgaatcttcgctcacctatatgggcatcgtgaacctggaatcttccacgctcaccagcgtgggttccatgctagcgaacgggcgcagttatctatccaccgacccgtacattatcttcttcccagcgctgttcattgccctgttggaagtctctttcaacctgtttggcaacggcctgcgcgacgcgttcaatccttcactgaggggagcggaataagatggagaaaaaactgcaagttcacaatctgcgcgtctctttccgcacggtttccggcaaggtgcaggcggtgcgcaacatcagcttcgatctgcacaagggcgaaaccctggccatcgtgggcgaatccggttctggcaagtccgtcacctccaaggccgtgctcggcatcctggcgggcaacgccattgtggaaggcggcgaaatcctctacgacggcatggatctgctcaaaatcaacgaggaagatttctatcgcctgcgcggcgataagctggccatgatcttccaggatccgctttccagcctgaaccccatcatgcgcattggcaagcagctcaccgaggccatgatcctcaagggccgcgcgcgtcagaaatccagcaaggcggaattccacgccaagctcgatttgctggaaaaatacatgtgcgaagccaatcccagctctgaggggcaaatccgcgaggcgtgcgcgctgttccgccagttcgaaatgcggcacacgcgcctggaactcgcctataacgaggcgctggaagccgcgcaggaagcacaggaagaaattgaaaacgtcctgttcctgatcgaaaagaacgctttgaaggacgcggccacgcgcctcaaggaaatccgcgattttgcgcggaaaaccgaaaatccctatgtggtttcggcccgctttggcgagctgaaatcgctggccgatgggttgaccagcggcctgcgcgcgcaggcccgccagaattacgcgcccgccgcgcaaaagctaaagcagatgcaagccattctcgcagaagccatcgcgctggaaaagccggatttcttcgccctgggtttcgcgcaggaaaagaacgctccgcaggcaccgcagggcgatgtggctgccaaaaacgcctattacgagcgttatctcaacgagaatttcctcaatgaattcctccgcctggccgaaagcggcctggcctggagcgataagaagcatatggcgctgcgcgaaaaggccatcgccatgctggacaagggcatcgccgcgctgaagcttgaggattgcgaggccgccatggccgcgttcaagccgctggtgggcgatatttccaaggctgtggacgaatccatcgagccgctcgacgtggtaaaggacagcgcggcttgcacattctctggcagcctcaaggcctttatggccgcccgggcggacggcgagcgcaacaacgcgcgcaaaatcgccaaatacgagcgccagatgcggcgctacaatcgcctggtggagcggggacggcagcccgattggaaagtggccgccgccaccaccgtggattttgagctgaaccgctcgaacatcctgagtctgctcaacaacctgcgcgcgcactatgtcgtgaaaaacgaagaagcgccgggcgaggatcgccgcgccaaggcggaacaactgatcgagtatatcaaggattgcgcttccggcatggtgtacaaaatcaccaagcgcgccgcgcgcaaccgggcgcttaagctgatggacgaggtgggcatccccgagccgcgcaagcgctatcgccagtatccgtttgagttctccggcggcatgcgccagcgcatcgtcatcgccatcgcactggcggccaatccggatatcctcatttgcgacgagccgaccaccgcgctggacgtcacgattcaggcgcagatcctggagctgatcaaccggctgaaggaaaagcgcaagctgtccatcattttcatcacgcacgatctgggtgtggtggccaacatggcggaccgcattgccgtgatgtacgcggggcagattgtggaatatggcacggcggaagaagtgttctattcgcccgcgcatccctacacttgggcgctgctttcctccatgccggatctggaaacccgcgaacgcctggaggccatccctggcacgccgccgaacatgatctatccccccaagggcgacgcgttcgccgagcgcaaccgctacgcgatgaagatcgatttcgagcgccagccgccggccttccccatcacggaaacgcactgggccgcgacttggctgctgcatcccgacgcgcccaaggtggatccgcccaagatcgttaccgaccgaatcgccaaaatgcgcgcgaagatgagggggaacgcaaatgcctgaccgcaaagacgatgtattgctgcgggtggagcacctgtgccagtacttcaaggaaaataaggccgtcgatgacgtaagcttcgacatcaaaaagggcgaagttttcggcctggtgggcgaatccggctgtggcaaaaccactaccggccgctccatcatcaagctgtacgacatcacctccggcagcatctatttcaagggccaccgcatcgccgcgggcacgcgctcctataagcaggccattgcccaggcgcgcgcggaaatgaaatctgcctcgcccgagcgcaagcaggagctcaagtccttcatcgccgcgcagcgcgcggaaatccacagcgcgcggtacgatcatgagaattgcgataagctttacgcggatgagatgctccgcgaggtggatgcgcggtatcagccgctattggccagcgcgcagggcgaggaactggcgcgcttgaaggaacactatgaatacgaccgccgcgctgcccgcaaccagcgctatatcacgcagatccagatgatctttcaggatcccatcgcctcgctggacccgcgcatgaccgtgtacgaaaccatctcggagggcctggtcatccgcggcgaaacggacaagcgcgtgatcgatgagaaggtctataacgtgctggaaatggtcggcctggtgcgcgagcacgccaaccgctatccgcacgagttctccggcggccagcgccagcgcatcggcgtggcgcgcgccgtggtgatgaaccccgaattgatcatcgcggacgagccggtgagcgcgctggacgtgtccatccaggcgcaggttatcaacttgctgaacgacctgcggcacaagctgggcctcaccatcctcttcatcgcgcacgacctttccgtcgtgaagtatttttccgatcgtatcggcgtgatgtattatggcaagatggtagagcttgctccgtcggacgagctgttcgatcatccgctgcatccctacacccgctcgctgctctcggccattccgctgcccgatccgctttacgagcgccagcgccagcgcatccgctatgagccgctggccgagcacgattattcggtggataagccttccctgcgcgagatcgtgccggggcatttcgtgcaatgcaacgacgcggaattcgccgcctatcgggcgcgcatgggcgtgtagcatgaaaagccgcaacgcccagcgatggttgcaatatggcgttagcgcgctggtcggtttggcgctgtccttggccgtggcggtttcgcgcgggctgtccggcagtgtgaatctggcttggaacgcgcgctatctgagcgacggcttcttcgtggccgggctgctgatgacgggcgtcggcgcgctggtgctggttgcctccaccgatttcttcgatatcttcacgtacggttttaaaagcctgctggtgctcttcacgccgctcaaaaagccgcgcgagcacatgaattttttcgattataagcaggagcgtgccgggcggcgcggcggaaagcaattttttctgctcttcacggggctggcctttctgctgctcgcgctcgcgtgcctgtgggtgtattataattgctaagacaattgcccgcggtggaaaaaaccaccgcgggcaattgcatattcttccggcaatgccgtgctattttccctgcttttccagaaagcggcccatgcgctttacggcctcttcgattttgtccagcgaagtggcgtaagaaagccggatatgtccttcgccgccctggccaaaggcggtgccgggcacggcggcgaccttctggtcgtagagcagcgcttcgcagaaagcgtcgctggataggcccgttccggcgatggaggggaaggcgtaaaacgcgcccagcggttcgaagcaggaaaggccaatttcgcccagcgccttcaccaggaaacggcggcggcggtcgtaggcgcgcaccatcttctgcacatccgcgtaaccgctggcggcgttgctgcgcagggcttccagcgcggcatactgcccggcggtgggcgcgcagagcatagtgtattggtgaatcttgaacatggattccatgatgtccttcggcgcacaggcccagcccatgcgccagccggtcatggcgaaggccttggaaaagccgttgagcacgatggtgttgtcgcgcatgccctcaatggcggcaatgctgtggtgcgtgcccgcgtaggtcagctccgcgtagatttcatcggaaatcacgagtacgccgctttcgcgcaacacatccgccagtgcgcgcagttcgctctcgggcatcaccgcgccggtggggttgttgggatagggcaggatgatggccttggtcttcggcgtaatgtgcgcctttacgtcctgcgcggtaatgcggaagccattttccgcccgggtgggcacgggcacgcacacgccgtgtgaaaagcgcacgcccggcgcgtaggaaacataggaaggatcgggtacgagcacctcgtccccggggtttacaattgcgcgcagcgccaggtcgatgccctcgctcgcgcccacggtgaccaaaatctcgttttccggccggtattccaggccaaaacgctcgcgctggtattcgttgatggcccggcgcagctcaatcaggccccagttgctggtgtaatgcgtatggcctgcgcgcatggaataaatggccgcgtcagaatacgcccacggggtcacaaaatccggttcgcccacgccgagagaaatcgcgtccttcatctcgctgacgatatcgaagaatttgcggatgccgctgggcggcacgcaggcgatgtgctccgccagccggggactcatggcgacacctgcagacggtcgtcctgcgaggtgccggaaacgatcacgccgtctactttgtattttttcagcacgaaatgcgtggcggtggagagcacatgctccagcgtggagagcttttcagacacgaacagggccagctccttgatcgtgcggcctttcaccaacaccatcagatcgtatgcgccgctcatgaggtacacgcttgaaacctcctcaaagcggtaaatgcgctcggcgatcacgtcgaatccctcgtcgcgctgcggggtcacgcgcacttcgatgagcgcctccacactgtcgcgatccactttgtcccagttgatcatggcaggatagcgcaaaatcacgcccgaattttccaggcgcgcgatggcttccgcggcttccgtctgcgaaacgccgcattgcgcggcgatggtgtggatgggcgtgcgcgcgtcctgttgcaaaatttccaaaatatcgatgtccagcctgctgagcatagcctcgcctccttatttcccctattgtagcccacgcgcgcgcgagcgtcaagcaaaattttggcggcaaaccggcaaactctgtccatcgcatccgggctgcgcggtgctgggcacattcgcctgctgcggctaagcgagcggcgcgtccgcgtggggcagagcgcgcacgcaaacataataggcggaaagcaggatcgccgccgcgcctgcccaggcggcgatttccgcgaaaaagatggaattggggccgaaaatggcgggcaacgtccacacgaccgctacgcgcagggcaaattccgcaatgccggaaaccatggggatcagcgtgttccccatgccttgcaaagcgctgcggtaaacatacagcacgtatagcacggagaggaacgcgctcatggtgttgagataggcgagcgcggtctgcgtggcgctggcaacttcttccggcgtgccggagatgaacaggggcacgagaaaacggcccagtgtgagcatcagcacggaaatcaccacggaaacgccgagccccacgactagacctgtatgcacgccgcgccgcacgcgcaaatattgctttgcgccgatgttttgccccacgaaggtggagatggcgtatcccagggagatcgccgcgatttccaatagcgcatagagcttattggtggccgtgaagcccgcgatgaacaacatgccatagccgttgacagcggattgcacgatcaatccgcccacggcgatgatgacgttttgaaacgcgacgggcaggcccaaccgcatcaagcgcgcgaatagcgccccttctttgcgcaattgcaggcgcacgggccgcagatagggaatgcgccgcatgcgccataggcagaacgcggcggaaaggccttgcgcgaatacggtcgcgcccgccgctccggcaatgccccaatgaaagaggaacacaaagacggaatccagcacgatgttgaccaccgaggcgatggccatggcccatagcggcgttttgctatcgcccagcgcgcgcaaaatggccgcgcacaggttgaaggccacggtgaagggaatgccgcaatagagcgtgcgcacgtagagcaccgcgccgggcagcacgtccgccggggtggacatggccgtcagcgtgggtagcagcgtggcctggctggcgatggatagcgcgatggccagcaggatggaaagcaatagcgcgccggaaaccgccttttgcagctggccaaaatccttggcgccaaagtggatggccaccagtacgccaaaaccctgcgtgaagccctgggcgatgccgctcaccagccagttgagccagtccgccgcgcccaccgaggccagcgcggtcacgcccagcccctggccgacgatggccgtgtccaccaccacatatagttgctgcaaaatgttgcccagcatcagcggcagggcaaagcggatgagcaggcgcaggggcgaaccctccgtcatgctcttgatagaattgcgcgcctgctccatgggcagcgcctcctcgcgtttcagaatgcaaaatccatttttcagattatagcatggagcggttctatctgtcaatcgtacctgcgcgctcagatttcccacttggccagccacagcgcgaactggctataggcgtcgtaccacgcattgtatagttcttcgttcttttgcagcgcgtatttgtccgccgcggaatcgtaggtgtagttgcccgcgcgcaattccgacagcgcggtggccgcgacctgctgcgcgctttccacgatggtcaccaggtcttccagatcgtttgcgctgatggcgcgaatgcgttcgatcaggccggggaaataatcttcgccggcttcctgcgcgtagccataagggccggtatcctgcaaatacatttccacatcgcccgggtacaggaaataaacgacttcgcttccgtcatcgtcggtatagccgctctggtactccgtccattggcagaggaaatgcaggtaatcgaacatggaattgatctcggccaccacgccatccgaagcgatggactgccacagtgcgtaatcctcggacagtgcggcgagatccacgatttcataggaagcgtctgcgatccggtagttgtagacatagccatattcgtccgtatagtcctctatgcgcaatgtgcccgtcacgcggatggcctggtcggtatagccgaaggtctgcccttcgggcgcgtagaccgccatggtgttggcgagctgcgcggtgttgggcgcgcagaaggggcaactttggtagggcatgttcatgagatacaggaattttccgctcagtggggagagtgtcgccatatagcccacgatggaaacggttttgtcgtcgagcgcggtgagggtttccaggcttacggcgtcggtaaactttaacgcggttgcgccctcttcgccgggcgccgcgccggagcagcccgccaggagcaaaagtgcggcggcgagcgaaatggccaggatttttttcatagcggtattcctcacgatagcatttttaagcggtcaatccatctttgcgggccatggcaaaaattcgcgccatggtgggcaacacgctcagcacaaagaccgcgccggcaatggcccattcccggggataggtgcgccatacattgagcacaatgcccatggaggcgacgagattgcccatcaggcccagcaaaaggtgtttgcacagcaaggccagcagagaacccgcgaggccgatcagcccattttgaatgaggtaaagctgcgctatgcgccgcatgctgatgccgatcaggcgcatgagggcgatttccttctgggcgtcgtacatattcagcagcgtgatcaccgatatgaccacgatgttcatgagcaggactaccgcgcacagcgcgtacacgattttgctggaagtatccacctgctccagcacttcgcgcagcacggtggaaggattgatgcacaagagcgaagcgtcgccgctgtaggcgtccagcaggcggtaatagtcgttgaaactcttgctctttaccaaaatggcgcagatttcgccctccacgtgcgtttcttcttcatcttcgtccgtgtggccctgcgaatggacggcccacacggtttcatagtgggtgaacactacgttgtcgtaggccgtgccggtcgcctggagaatgccggtcacggttagcggcgcggcttcgtgcgtgctgcctgtgccggctagcccatgggaggtgacgatttcatcgcccacgtttagaccgtattgctgggctacggcgctgcccacaacggcttcgtaggtcgcggaaaacatcgtgcccgaggcgagagattttcccgccagaaaatccgccgtggtgcccacgattttcgcgctgccgaagctgtcgcccatggtgaatggcacaacagcgtttgccaagtcgctgttttcgatttcctccacataagcgtagtccagcgtacccaggggttcgtcggtgaagaataaggtgttcatcgccaactgcgtggcgctaccggcagggccgatgatcaaatcgtaataagcggcggtgtttacgatgccttcgttcacctgctgcgcgatgttgaaggatagcaacgccacgcacgcggatagcacgatggaaagcgccacgagcagcacgcgggcgcggtgcaccgccatgtttttcagcgcgaatttaagcattctgcacaccttctttcgcacaaaaagaagcgacggcattcatatcgatggtctcgtcaaagagcgggcagagccgttcatcgtgcgtgacgcacagcagcgttttgccgcgggcggcgtccagcagcgcttccatcacgctgcggccaatggcgtagttcagattgccggtcggctcatcggccaggagaattgccgggcgctttaccagcgcgcgcgcaatgcatacccgctgtttttcgccgccggaaagattgcgaaccttgcgggatttcagcgcaaggatgcccagccgctcaagtagcgcgtccatcccggaaatatcgatgttttccagcttcaggatgccgatgttgtcggatacgcgcatgtcctccagcagattaaagtcttggaagatgtagccgatgttttggatgcggaaggcgtcgcgcgccttctggttggcggcgcaaatgtcccagccgtcgataaagacgctgccttcgcgcggcgtgagcacgccggcgatcaaattgagcaatgtggatttgccacagccggaagcgcccagcagggcatacgttttgccgctttcaaaggtgagattggtataggaaatttgcgattcatcccggaatcgcataaggagatttttcaattgaatcatagaggttcctttccgcgtcttgcgcgcgagaatcgagcacacccatggatatggggttgcaaaacagggcgaaggccgctggccaaacgtggcccggcgcttcgcttcgcgtggttgatctttttatggctttacgctggaaaaaggaaccccgtcaacacaggagcagaattttttgttccacaagggtactgatagcggcgcacttttccgcgcgctttgtctgggcgcgcaggatgcggacgctggcccatttgcacagcaagggcaagaaaaggctgagggcgaatagcacgtccaagcattgcgccagcacagggcaaatgggacagtgcgcggcttggcaatcatgccaggcaaaagcggccataaacgcggcggagcatacccatgctgcgcaaagcagggcaatgagcaaaacggcgcgttgtttgcggttcatgggcacacctcctgttcgttggtatatttttattatagggatgaatgtagcaaatgaatggttaaacgatgaaatatgcttaaactatttgtgccaaatttcccccgattcgccctttcgcggcgcttggatcctatatacaattgtggaagcagatttcgcgcgccgattcccctggcgttggcgcgggcagggacgcgctttcttcggctgcaacagcgtcgtcctgggcgaattccgtcatatgcgcccaatagcgcttgggcatgtgtgacatgcggcagcgctcgtttctgcgtccttcgatggcgatggcatcgtagaacgcgcgccatagcgcgcggatttcgcgctcttttgccccgggcgggggaggcgtgaagttcgctaacggcgcgatgcgccatcgccctccttcggccaccagcgcttgggcatgggtttcgtcgaaaatcaagatggggcaggcgctgtaccggcccgcaaagtgctcggccaataggggaagcacgcggtttttgggcgcgatggtggctgccagcaatccgccgcaatccgcaaagcggataaagccgctgagcaaatgcgcctcgttttgcgcgtgacgcacggcggcaaagagcggggcgatggtttcatccgccagcatgtgcatcaccgcgggcccggctttgtatcccaggcgcaaaaaggccagcaagcggatctcccggcaattgagacaagtatgaaaagcgacgtacacgaattcttccgcttcgcgcgagatgcggcggggaatggaggccgccacgcggctggcacgggaagcgtccgtggggatggcgcgcgcgggaaacaggctcagttgcgcgccgtcctccgccagaatgtccgaggggatttcctgcttttcgaagctctcaaacacgcagcagagaaatccctcgtagctgccatcgtaaagataggctatatctgtccgcttaggcatagggcgatgtcctcctgtgtggggtcgaaaaaggaaagctgctccaccggatgctcgatgcgctgcacctgcgtgcgggagcatagggcgcggatgagcgcttcttcttgcaggcgcgcgccgggaaaggatttgccagcgcacagcaggaaatattgcgcgcgcttgagcaccacgcccagctttttcaggctttcaaaggttagcgtgcccgtgcgccgcgcggccacgatgcgccgggcgctctttacgcctacgccgggcacgcgcagcagggtttccagcggcgcgcgattgacttccacggggaattgctccatatggttgagcgcccagttgcacttgggatcgagcaggggatgaaaattgggatgcgcttcatcgagcaattcctccgccgcgaagccgtaatagcgcaatagccagtccgcctgatacagccggtgctcgcgcagcagcggcgggcgctggcccagtgcgggcaagttcggcccggcgaccacgggcatataggcggaataaaacacgcgctttagggcgtatttcttgtatagcgcagcggaaagcagcaggatttgccggtcggtttccggcgtagcgccgatgatcagttgcgtgctctgccccgcgggggcgaagcgcggcgcgtgcgcgtagcgcgcaagctcgtaccggcttgcggcaatgccttcgcggatttgcgccatgggcgcgaggatggcctcttttttcttttccggcgccaatagattcaggctcttttgggaaggcaattcgatgttcacgctcatgcggtcggccagcgcgccgatggcctgaatcagccgggggtccgcgccggggatggccttggcgtggatgtatccgccaaagcggtattcctcgcgcaacagccgcagcgtggcgagcatgcgttcgcaggtgtaatccgggttcttcaccacggcggagctcaaaaacaggccctcaatgtaattgcgcttgtagaattcgatggtcagctccgccagttcgcgcggggtgaacgtggcgcgaggaacgtcgttttctcggcggttgacgcaatagctgcaattgtaggcgcaggcgttgctcatcagcaccttgagaagcgatatgcagcgcccatccgcggcgaagctgtggcaaatgccgcatgccactgcgctgcccaggccgcccgcctgccccttgcgatccagcccgctggaagtgcaggcaacatcgtatttcgccgcgtccgtcaaaatgcgcagcttatccatgagcacggtgggatttggcatgcaaaagaccttctttctacacagatagaacatatgttctatctgtattatagcacatattttcgattttgaaagcgaacaccgcgtgaaattttggcgtatgacgctccgcggcatgcggattcgtctgcccgcgtatattgggccagcggccttttgcgcgcgacgcttgcgcgccccgcgcagctgtggtataatgccaaaaaggcttaaggaggcatctatgatctacaatgccatcaagcatattctcccggaattccggtttgaggggcaataccgctcggtagaagaactcacgagtgggaacatcaacaatacctaccacttgcaatatgccaaagaaggcaaaatcattcactacacgctgcaacacatcaatcagtttgtcttcaaagagccggataaggtgatggacaacattctgatggtgaccatgcacttgcgcgacgatcttgtgcgcgagggaatcaatccctaccgccatgtgctggaattgatttccacgcgcgcgggcggcgtgatgcatcgcgacgcaatgggcgattattggcgcgcttaccgctatatcgacaacgccgttccctatgatgtactggaaaaaccccggcattattacgagattggccgcgcgtttggcgaattccagcgccgtttgcgcacctttcccgcccagcgcctgcacgaaaccatccccgattttcacaacaccacgcggcggttttacgcgttcgtggccgccgtggcggaagaccgcgcgggccgcgtcgacgcgctggaggatgagatcgaattcttttttgagcgccgcaaaatgatgaacgaaatcgtgcgccgcttgaaaacgggcgaattgcccctgcgcgtgacccataacgacaccaagagcaacaacgtgctcatcgaccaggaaaccgatgaagccatctgcgtgatcgacctggatacggtgatgcccggctcttcgctctacgattttggcgacgccgtgcgctttggcgcttccaccgccgctgaggatgaggaagatctcagcaaaatcggcctggatatggaaaaataccggctgtttaccgaaggctttttgcgcgagaccaatggcttcctcaccgaaaaggaaatcggcctgttgccgttgggcgtaaaggtgatcacctgcgaattggccatgcgcttcctcacggattacatcgatggcgaccgctatttcaaggtgaattctcccacgcacaatttggcgcgcgcgcacgcgcaaatgaagctgctgaccgacattgaagccaaagaagaagaaatgtatcgcgtactgatggagattatacgggaggaaacatgaagattttggttacgggctttgagccctttggcagcgacgcggaaaaccctacgctgctggcagtcaacgcgctgccggaaacccttgcgggcgcgcggattcttaagcgtattttgcccgtttcgttccaggcggcccagcgcatggtgcgggcggccgttgcccaggaaggcgtggacgcggcggtgctcaccggcctcgccggcggacgggccaagatcagcctggagcgcgtggccatcaacgtgcaggacgcccgcatgccggataacgacggggattgccctgtggatttgcccatccgcgcggaaggcccggcggcctattttgctacgctgcccctccgccgcatccaggcgggcctgcaagatgcgggcatcccggtggaaatttccaatagcgcgggcacctacgtgtgcaatctagcgatgtattgcgcgctggatgaaatcgcgctgctgggcttgcgcgcgcgggcaggctttatccacgtgccatatctgccacaacaagcccaggcgcatggcgcgcccggcatgcgcctggaagaaaccgtgcgcgcgcttaccacggcgctggaaattctcgcgggcggcggcgcttgaacgggcatcttctgcttggagatagcaaaaaccaggcgcaagggagcgaaagctgcccttgcgcctggttttgcttgattgaaggcgccaaaaggttttcgccttactgcgcgaactggctcatgtatagcgcttcgtacttgccgtgcagggccatcagttcttcgtggctgccgcactccttgatgtcgccctgctccatatagaggatcatatccgcgtcgcggatggtggaaaggcggtgggcgatgacgaaggacgtgcgcccctgcatcagtcgcgccatggccttctgaatgagctgttcggtgtgggtatccacgttgctggtggcttcgtccaggatcatgatctccggatcggaagccatggcccgggcgatggttagcaattggcgctggccttgggaaatgttctgcgcgccgctggcgagcgggaaatcatagccgccgggcagggttttgataaaactctccacgctggccgagcgggcggcggcatacacggcctcttccggcatatcctcttttgcgtaggcgatgttgtcgcggatgctgccttcaaagagccaggcgtcttgcagcaccatgccaaagcggtcgcgcaactcgtggcgcgtcatggcgcgcgtgtctacgccgtccaccagaatgctgccgccgtccacctcgtaaaagcgcatcagcaggttgatgagcgtggtcttccccgcgcccgtggggcccacgatggccaccttttggccaggttgcacggcgatgttgacgtcctgcatcagccgccgttgcggcgtataaccaaaggccacgtggcggaattccaccgcgcccgcgcgtttctccggaacgatgccgggcacgggatcgggactttcctcttccgcgtccaacagggcgaagatgcgccccgccgccgcagccgccgcgccaaagctgcccgccatgcccgcgatgctggtgaaaggctgggaaaactgtttggtgtattgcagcatggcctgcacgtcgccaatgcgcatgctgccctgcaaaacaaagaggcagcccagcacggcgctgagggcatagccgaggttattgaccagatccgtgatgggcgtgaccttgcccgaggcggtttccgcgctctgggcgcagcgctgcaactgggcgttgatctggtcgaattccgccttggcgcgcggcgcgtagttaaaggcggaaaccagctcctggccgttgtacatttcttcaatatagccgttgagctggcccagcagttcctgctggtgggcataatgcttggcgcccgctttcatcacgcccagggaggaaagcagcgatacgggcaccatggccacggcgatgagcgccagcttggggctggtggcgagcatcatcaccaggatgcccacggcggtgaccacttgcgtgacgatctgtgtcaggttctggcttaaggcgctgttgacggtatctacgtcgttggtgatggtgctgaggatttcgccatgggtgtgggtatcgtaatagcccagtttcatggcgtgcatcttgcgggcgatatcgccgcgcagcgtttccatcacgcgggcggtcaggcgggtcatgccgaagctctgtaaaacggcgaagagctgcgccgccagatagaggcccaccagcattgccaacagcaaaagaatggtttcccagtcgaagacgccgctggccacgccgtcgtacagttccgaagtgatgccgcccatcaccgccggggtgagcacggtgaatacggtgctgagtacggccgccagcatcacgaggatcagccggaaccggtagcagcccagataggcgaacagccgcttaaacgcatgcgatttcacgggcaacttcctcctctcccaattgcaactgcgcgatctcgcggtagagcgcgcaagtgcgcaaaagttctttgtgcgttccgttgccgacgatttggccgtcttccatcacgaggatgcggtcggcgtcgaggatggtgctcacccgctgagcgacgatgagcatcgtcgcgccgcccatattttcgcgcaggcgggcgcgcagcgtgcggtcggtcttcatgtccagcgcggaaaaactgtcgtcgaacaagtagatttccggttgcttcaccacggcgcgggcaatggccatgcgctgacgctggccgccggaaaggttcgtgccgccctgggcaatggcggcgtggtacgcgccgtctttttgctcgatgaattcatcggcgcaggcgatatgcgccgcctcccgccattgttcttcgccgctttgctcgtcgccaaagcgcaggttggaggccacgtcgccggaaaagagcacgttcttctgcggcacatagccgatgagactgcgcagctcctccaatttgtatttttttacatccataccgtccacgtaaatgtggccgaacatagcgtcgtagagccgcggcaccagcttgagtacgctggatttgccgcagcccgtgcggccgatgatggccgtgacctctccggcatggctttcaaagctgatgtccttgagcacgggttcgtccgccccgggataggcgaaagtcacatggtcgaaaaccacgctggcgcgttccgggcgctcgctggcgctgtggttgccgctctggatggagctttccgcgtttagcacctcagcgatgcgccgcgcgcaggcgtaggacatgggaaagagcagaatcaccagcgcgagcatcatgatggcggtcaggatcatgctgatgtactggctgttggccaccagcgcgcccacgtccatctcgcccgtggaaacgtaccacgcgcccatgcccatcaccgccgccgtggtcacgccgaaaatcacctggatgaccggcatcagcagcgcggaaacgcgcccagagcgaatggtgagggcggcgaggtcgccgttggcctcgtcaaagcgcgccatttccttttcctgctggttgaaggcgcggatcacgcgcacgccttccagcgtttccagaaagcgcttgttgaggcggtcgatcttctgccgcagcgccaccgaatagcgcgaaacaaagatcacgatggctcccgcgccgagcagcagcgccggaatggcaaggttcaacacgctgctcagctcgccgcccgtcagcgacgaaagcaccaggccggccacggccatcagcggcgccgttaccccgaggcgcagcagcagcgagaggaacatttgcacgttggtgacatccgatgtgctgcgcgtgacgaggctggccgtgccgaatttttccacctcggcggcggaaaggtcctgcacgcggtggaacacttcgcggcgcaaatcggcggcaaacttggtggatatcctggccgatagcacggtggccgcgatgttgaacaagcagcccagcaacgccagcacggccatcaccgccgcgatgatgagaatcgcgctgcggttctcctgcgctacgccaacatcgatcatgctggccagcgccgtgggcaagagcatcgccgttacggcggaaagcagcatcagcgccagcagggcgaatacctgcttgccgctgagcttcacgcgggaaaaaatcgtacccatggtgtggtgttcctttccgtttgccgccattgtgcttgacaagcggcaaaaagtatgatagtattagagatacgatagtatcaacaatattagaataccatagaaacggaaattgtcaatagcttgcgcaaaagtggaataaacgacgactttcgtttcaatgatacccaaactagggaggcgtttccgatgcggagaacgactgcgactacggaatatctcaaagagtgcatgggcacggcgctgctagaactgatgcgggaaaagccgctggaaaagatcagcattgaggaaatgacggccagggccgacgtgggccgctccacctatttccgctattttaagaacaaagaggaagtgctttcttttaaaatcgtttgcttgtggaagcgcttcgacgcgcaacaccacgtgggcgagcataccgcttcggacgaagccgcggcggcgcgaatgttttttgaattttgcctctccatgcgcgaggtcagcgaccttctctatgctacgggccatcaaggctgcattcttgacgcctatttgcaaattcttcgcccggatgcggacggtgagaacgcgctggaatactaccgcagcaacatgaccgcttatgccctttatggcctggtgaatgcctggatcctgcgcggctaccgggaaactcccgcggagatggagcgcatcgtcctcgattggatggatcgtcctgaaaaacaggaaccatgaccggcgtggcgcggttggcggttaaaagaaagaaagttaacggcaacttctgttcgaaaccttgcgcgcctgtggtataataagaaaaacaatggtttcaactgcacaattcccatcgacgataaaaatggagggcgatgcacatgggcacaaaggccgtggaaaagggcgagttcccgtttgcggcggcatttttggagcatggccatatctatgggcaatgccaggggttgatagaggcgggagcgcaactcaaatgggtgtacgatcccgacgccaaaaaagtggaggcgtttctgcgcaaatttcccgacgccaagcccgcgcgctgctatgaggaaattctggaagattccagcgttcgcctggtggccgcggcagccgtgcccagcgagcggtgcgcgctgggcatccaggccatggaggcgggcaaggactatttcaccgataaaggcccgctcaccacgctggagcagttggaggacgccaaggccgccgtgcggcgcacggggcgcaaatacgctgtatattatggggaacgcctgcactcggaatgctcggtgttggctgggcaaatggtcaaaagcggagcgattggccgggtgattcaggtgctaggcctgggtccgcaccggttggggccggtttcttcccggccggattggttcttcgaccgtgcgaaaaccggcggcattttgatcgacatcggcagccaccagattgagcaattcttgttttacgcgggcacggaggacgcgcgcatcgatatggcgcgcacggccaaccgcttccacgaggattatcccggcatcgacgattatggcgatgtggcgctcacgggcgcgaacggtgcgatgggttatctgcgggtcgattggctcacgcccgatgggctctccagttggggagacggacgcctcgtgatcgtgggggaaaagggctttatcgaactgcgcaaaaacctggatatcgccactgggaacggcggcaaccagctttacatttgcgattccttgggcgagcggcacatcaacgccacgggcatgaccggctatccctatttttccgatttgatcctcgattgcctgaaccgcacggaaaacgccatgacgcaatcgcacgcgttcaaggcggcggaactggctgtgcgcgcgcaaatgctggcggaggaaaagaaataaatggcgctgctggaaattcaggatctgcacaaatcgttcggcgctcaagaagtgctcaagggcatatcgctgtccatcgcgcacggcgaattcgtcacactgttggggccatccggttgcggcaaaaccaccacgctgcgcatcattgccggactggaacagccggatagcggccgggtgctgctttccggccaggacgtgacggcgctgccgccggataagcgcaatgtgaacaccgtgttccagaactacgcgttgttcccgcacatgaacgtggaaaagaacatctcttatggcctgcgcgtgcgcggcgcaaaaaaagcggattggcaaaagtgcgtggaggaaatgctgcggctggtgcaactggaaggctatgaaaagcgcatgccttcccagctttcgggcgggcagcgtcagcgcgtggccatcgcgcgcgcggtggtgctcaatccggacgcgttgctgctcgatgagccgctgggcgcgctggatttgcaactgcgccgccagatgcaaagcgagctgaaaaccatccagaagcgcgtgggcatcgcctttgtctacatcacgcacgaccaggaagaggccatgaacatgtccgaccgcatcgccatcatgcgcgccgggcagttcgagcaggtcggcacgccggaagatgtgtacgaccggccgcagacgaattttgccgcgcggttcatcgggcaaacgaacctgctatccggcgaagtgctctcgctggaaaacggcctggcgcgtctgcgcgtgggcgaggcccttgtggaagccgcgcccggcggttatacgccgcgcgtaggtgagcgcgcggccatctgcctgcgcacggaacgcgtgcgccttttgaaggaggcgcagggctttggcctggcgggcacggtgcgcgaaaggcactacgcgggcggttcgctgcgcttcaccatcgaagcccaggggcagaccatccacgcccaggcggtggacgcggccgcgtttgcgccgggtgaaagcgtctttgtcagttgggacgcgcgcgcggtttcgctcgtgccggaggcggacgcatgagcgcccgcaagataggccgcgctgcgctgtggatgcgcgcgcccatgctcctgtgggcgctggcgttcgtgggcgcaacgctgggctatgtgcttgtcatcagctttctcacgcgcgatagcgaaggatatggcgtggtggcccaattcacgctggacaactaccgccgcctgctcaatcccaattatttgcaggttttctggcaaagcgtgaagctggcgtttcacaccacggttatctgtttattgatagggtatccgttcggctatctgatggcgcgcgcgagcgctttctggcgctccattctcatgctgctggtgattgtgccgttttggaccaacgcgctggtgcgcatctatggctggaaaattttgctgatggccaacggccccatcaacaatttcctcatggccattgggctgatcgattccccgctcaagctgctcaacacctatggcgcggtgctgctgggcatggtgtacgcgctgatcccctttatgatcctgccgacgtacacttcggtggaaaagctcgattggtcggtggtggaggccgggcgcgatctgggcgcgggccgggtgcgcgcgttcttcacggtcacgctgccgctcacggccccgggcgtgatggccgggtgcgtgttggtgttcgtgccctccatgggcctgttcttcatcagcgatttgctcggcggcgccacggaagtgctggccggttcgctgatccgcgatcagttgctcaagagccgcgattggccgtttgccgccgcgctttccatggtgctgttggtgatcacgtgcgtgcttctatgggtctacgcgcgcctgggtggcaaatccagcgatatgacgattttttagggcggaggaggctgcgcatgcgaaaatccaaatttgctcccgtgtatctcacgctcgtgctcatcgccctgtatttgcccatcgtggtggtggtgctctattcgttcaacgccaacaccagccggtttacgtttgatttcacgggcttctccctgcagcactatgcgggccttttgaaggacaccaagggtctggtggccgcgctgaaaaacagcctcatcctggccggatatagcctggcgctttccgtggtgctgggcacgctgggcgcggtgggcatggccaagcgctccttccgcgggatgaacgcggcgcaaacgctggtgactttgcccatcatggtgccggaaatcatcttgggcatggcgtttctggccgtgttcacgtttctcgatttgcccatgggcatgttcacgctggtgctcgcgcacacgaccttttgcgtgccttacatcttcatcatcgtcaagggccggttggcgggcatggatccttccatcgtggaggccgcgcgcgacttgggtgccagcgaagcgcgggcctttttcgatattacgctgcccctgatcgcaccgggcgtggtgagcggcgcgctgctggcctttgccatgagcatggacgactttatcatcagctttttcgtgaccggagcgaccaccaccacgctgccgctgaaggtctactcgtcggtgaagaccggcgtctcccctcaggtcaacgcgctgtgcacgctcacgctgttcgtcgtggccgtgctcgttgcgctgagcaaatccatcacaaggaggaaccacacatgaaacgattccttgccctctgcctcgcgctgtcgctcgtcctcaccctagcccctgcgctgggcgaagaggaaaaagtgctcaacatcttctcgtgggaaggctatgtggatgaaaccaccatcgccaatttcaccgcggaaaccggcatttccatcaattatgccgtgtttgccagcaatgaggaaatgctcatgaagctgcaggccaacggcgccagcgaatacgacatcatcattgccagcgactacatcctttccctcgcgcgcaaggagaacctgctgctcccgctggacaaggaacagctcaccggctgggaaaacctcaatcccgcctatctcgaccagtactttgatcccggcaacgtgtacaccatgccctataccgtgggcgtgcccatgatcgtgtacgatccggcgcgggtggccgaacccatcacgtccttcgacgatttgtggcgcgaggaattccgcgataacctctgcctgctggacgacgcgcgcgtgatgatcggcgccgtgctcaaaacgctgggttattcctataacaccacggacgatgcggagctggccgaagccaaggaaaagctgctcgccctgcgcgataacgtgcgcgtgctggattacgataccgcctatatgcatctgctctcgggcgaggtggttgccggttatctgttcacgccctatgtggtgatctgccagatggaaaacccggatctggtggccgtgttcccggaagagggcatcggctttggcattgattcgctggccatcccggccaacgcgccgcacccgcagaacgcgcatatcttcctcgattacctgctgcgtcccgaagtggcggcgcacgtggcggagtggcaactgtacaccaatccgaacctcgccgccgacccgctgatttccgaggaaaccaagcagtatgccgcgctcaacgtgcccgaagaattgctcgccaccaaggaatatgtggaagacgtgggcgaatacgagagcgtctatcaggaaatctggatggagttcaagctgcaataggcaaaaaaacgcccgcaaagcgggcgacgatttcctcaggataccccaacggccccggaagcaacgcttccggggccgctcatttctgtggatttttctttacgcgcccgcgttttcgttcgtggtttcagacgtggcttgcggcgtaggcagcgcttccacctcaacggcttccgtgcttgcggtcagcggcgcatctgccgccatgttgttgatgatatccgccagccagggcagattctcaatggcttccgccataaaggcgctcatcgcgctggtcacttccatggaaagtgcggccagggacgcttcgtccatggtatcaatggaaaccgtttccagaccggcctgcgcaatggcgggcaactccgtgcgcaagccatattccaccgccgcggtgagcgtgccgtcaggtgcggacagcgtgagcgtgcccgcttcgctgtgggcgttttcatcgccggtaaaggccgtggacagctcgatggcaaccgtttcgcccgcttcttccacttgcaaaatggcgtagcgcgaagtggcgttatcggtgttgtaatggaaatcgatggccgtatcgtccgcataggccgaaacgttgtggataatgaactcgccgctctcgtcccagccggtgtcatagccgaaatacagcgtttgttcgccgttttccgtcatgctgagctgcacatcgccagaagcgtcgtcataggcgctaaagtgcatttccagcagatcggtttccgtgccgccgtcggtgaaggcataggcggcgaagccatcttcgggcatgtacagatccagatagaagtaaatgggcgtttcatcttccggggaatcgtagagggtgaagatgtagctgagcagctcttcggaatcctcggtggtaaagatgtcgatttcggcatagggctcgctggcgaacatggcgtcgatctcttccaggctcgtctgcgtcatggtcacatctgcgccagcttcttccatcactgccgccatgtcttccactatatccgtcataatggcgtagccatccaccaccgcgtcgcgcagcacatccgtggggatggtgatcagcacgtcggtgcagctatgcgtatcgtcgtacatttcaaaatcgatgttttggatgatgatcgcgtcttccgccagcgcattgatctgttcgccgaggccggtaaaatacgcttcaaattgcgccgcatacgcttcaacatccagcgaagcgctcatgtcaaaaaagcccgtttcatacgccgcaagcagttcttccaggtcgctctcgctcacaccggcggcttgcatcagcgcctccagcgggagcacataccggttggaaagcccgtccatggcaaaggaaattccctcttcgccaatcgtacccacgacggaaagcgtagcgtcccccgcctcgctcgtggcgtacagcgcaagttccttgtcgatgacggcgccgatttccatgcccaggccgctcaaatccgttgtggcgccgtcgatgttcagttgcaggtcggaaagcttgaaatacgcgcccatcgcttcggcgggagcctcggcaagggcaacgggcgatagcgcgagcaacgcgcacagcaggcatgcaaggcaacgagtggtgatacgcatgtcagtaacccctttccataattgtacctatgatttttgactgcgccgccaggcactgagttcccacgcgcggcgcaaattgcgttaagaatttggcaaaattccttcaaaatcttgttcttccgcttccgccagcgcgtcgagtacgccttgtgcggagagcgaatcgccaagcggactggcgagcatggtggcaaaatccgtgagcccgggcacattctggatcgcgcccgccgcaaagttcaaaaccagcgattgcatgcgcgccgccagcgccatttgttctgcctccgtcagctcgtccatgcgaaccacgggcatatccatgccatcgaggaagcctgccgccccttcgacgggcacggtcgaagcttccagcgcgaaagcggcggaaaactcttccgcgttcagggaaaaggttcccacctcgcgcgtaccgccgccttccagcggcgcaatctgcgcgtcgtacagcgcttccaggcggaaagcgtccgtcccgtcgtcccccgtcaatatggcgcgccattgtgcgatttcgtccgtgcgcagtcccgtggcggaaaacgccatatcgttcgccgcggcggaaatctgcgaggattgcgcgccgtccgtttcttccaccgcggcggaaaagcgcgcgtcctgccagctggcctcgagcgacagattgccgccctgcgtgttgaggtcaaccgcgcccatttgctggccagattgcgaggcggttagctgaaagacggaatccgtttccccgcgcaggccttcggcttcgagcgcaagcccgttttctatggtcaaacgcagcgaaaaggcgttgtcatccgatacggcaagcgtacccgtcgcgcccgacagatcgggaagctccgcgggcaagagcgccccaaggagcgtttttagctcttggccgctcatggataccgcgtactggcgtaccgggcgcgtttcgcccaggatttccgcctcgccatcttcggccgtgcccgtttgcagcgcggccatccaggaatccagcaggtcttgccagaactgcgcgctggatagcgattgcacatcccaggcggccagagacgaagccgagggcagcgcgtacaacccatccaagccgtccataaagagcaaaatttgtccatcctggcggcccatgcccagggcgagccgcgcgtcgcccgcgtccaggcgcaaatattggtcgccgcccaattggctcagcgtgaaagacaggccttcgagcgcgagcacatcctcgccttccagctgaaagacgggatcgcgtagcacaatggtgcggctattttcttccgccagcgccgcaccgctccccagcgccaggatgaggacgaacaggccggaaagcaaaattcttccatatcggttcatgggaatcctccgtagggccgccgcgcgggcggcctgggtcgaaaaagaatcaggcgttcttcatgtgccaggtcgcgggatagcacagcgcgaagagcaccagtgcgtccaggaattcgcggcccagtcgcgcgccaaaggtggtattcgaataataggcttcgagcgcggggagcacggaattttccagaaagcggataaactgctcaatccagtacacgatctgcgtggcataggaagacacttccacctggat

SEQ ID NO: 2189 - DNA, 9723 bp, Unknown
  16S sequences of unknown bacteria
ctgaaggggtagagggcaatgacgagaaagggaacaaaattaagcagcgaatacagagcaatttcacacattccgagggtgctttccatgtcattcgccgtcctttctcattgcatcgaatttaaacgaggaataggcctccagcgcctctcttgcacgccgtcggcttatggggactatctgcccgtcggacatgacaaaggtgtcgtttcttttggcggtcacctcgccaaggtttattataagccctcttccggggctgaaaaaccgcgaatggcagcataaaagctcggtaatttccgaaaaggaggcgcgaaggcggatctcccctccctccttgcaatggagcgttacgaaatgagaggaacagtcggcggatattatgtcgcacagcgcagctttcctgccgtcgggaaggcgaacggctcgggacagctcaaggcggttcaaatcaagtcggtcgaacatggccttaaggcgagccgggtcccacggcttgcggagatagtaggaggcgccgacttcatagctttcgcttgcaaaatcattgcttgaggtgcagaaaacgatgcatatttcgccgtcgtttttgcgaatttcttttgcgacctccatgccggtcagccgatccataaaaatgtcgagaataataaggtcgaaatttcggctgtcggcacagcgcaaaaattcctcaccggaagaaaaccacacaatgtccgtcctgtcggtaagcagctgtgaaatttgtgttttaagcagctcaaaggccgagcggtcgtcgtcaacaacggcaattttcaaagcgtatccccccttattcaaaactgattttatcacagcttttattttcccgcaagtcaaaatgtgcagacggcggtgaaaaaagctgtttacagaaggaaaattatatgttaaaattgagaagaaaagaaaacaaaaacaaccgaaaagagggaaaggcatgaccgaaaaggagcttaaaagactcggaaaagccgagctttgcgagcttgtagccgctcagggtaaaaagatagaacgccttgaggaggagcttgccgacgcaaagcaaaagcttgaggatagggaggtcaccctgtcaagctgcggaacgcttgccgaagccgcgctcaagctcaacgggatttttgaggacgccgaccgcgccgccgaacagtatcttgaaagcctgcgcgaccgtgaggccgaggccgacagcataatagaggacgcaaaccgccgtgccgacgaaatcgttcactcggccgaaataagcgccggcgaaatccttgccaaggccgacgccgccgctcaggacaagctggagagctttacggcgcagttcaaggaatttatcacatctcacacataaaatgcacgaccgaggacaaggctgagcgttaataaggcagttttgcttcaaaataacatctttttgcacaacgaatgcgttaaatcccacagatatgcgccggcattatctgtgggatttgccttttcttttatcaaaaatatatcattttgaagtgcgttgcagtttctaagcttaaaattctttcgtaccgaatttgaaaaacggtgcaaagcggtcgtcttgagaggatttttatgcgagaaaccaatacttccttatgaacactcagccgaagttctcggtctttttgtttgaaaaaatcaaaaagactccttgacctaaagtcagctttaggtatataatatacccgtaaagccgcttatactttcaaaaagatgagcgggcggcggaaaagactttgcctgtgtcttttttcgcttctttaccgcctgccgacggttttccgtttgcaggccgatctttgataatataagaaaggatgcaatgtatgaaagggtttgaaaacgtaaagaaaaatttcggattcggatgtatgaggcttcccatgaagggcgacgaggtcgaccttgaacagtttcaggaaatggttgacatattcatggccgagggctttaactatttcgacaccgcaagggtttatctcggcggaaaaagcaaaacggcaatcagagaatgtgtttcaaaacgctataaacgcgaggattttgttcgtgttgacaagctctcgaacgaccttttcaaaaccgaggaggaggttcggccgctttttgaaaagcagcttgaatcctgcggagtggattatttcgacatttatcttctccatgctcagaccaaggagcttttcgaaaaatataaaaaatgccgcgcctatgagcaggcctttgagctgaaggccgagggcaagataaagcatgtgggtctttccttccacgacaaggccgaggtgcttgagcaaattctcaccgagtatcccgagcttgaggtggttcagattcagtttaactatgtggactatgaggacgcgggcgtcgagtcgagaaagtgctatgaggtctgcagaaagcacggaaaacccgttgtggtcatggagccggtgagaggcggctatcttgccaatctccccgaggacgcgaaaaaggtgctggacgaccttcacggcggcatccccgcaagctatgccatccgctttgctgcgggatttgacggtatgctctgcgtgctttcgggtatgagcaatctcgagcagctgcgcgacaatctttcctatatgaaggagtttaagcctctcgacgagcgggaaagcgccgccgtcaaaagagtttgcgaaatcttcaaatcaaagcacatgattccctgcaccgcctgccattattgcaccgacggatgtcccaaaaaaattcttattcccgaccttttctcatgtctcaattccaagagaatatacaaggattggaacgccgattattactataacgcggcatacaccaaatataacggaaaggcctccgactgtatcggctgcggaaaatgcgaaaagtcatgtccccagcaccttgaaataagaaagcttctcaaagaggttgcacaggagtttgaaaagcgatgattgaataccgaaaactaaaaaagggtgaggaacgcataagcaccctcggactcggcatgggcggaatgcagtcggccccgccggaggaaatcgaggcggtcataaaaaaggccgtgcaaaacggtataaacttctttgacctttgcgcggggggagcctcggtttacgagcccttcggaaaggctgtcgccgactgtcgggacaaaatttattttcaactccatttcggcaccgtttataatgacaagggcgaatacggctggtcaagaaagctgtccgaggttcaaaagacctttgaatgggagcttgaaactcttaaaaccgactatgtcgacttcggatttctgcattgcgtggacagcgagggcgacatcgacgacctaaattcaagcggtataaccgattttgtccgttcgcttaaggaaaagggaattgtccgacatctcggcttttcttcccacaccccctcggtggcgaaaaagcttatagaaagcggctttgccgacatgatgatgttttcggtaaatcccgcatacgaccttgaaaaaggcgacgaatacggtatcggaagcaccgccgagcgtgccgagcttttccgtctttgcgaggcgcagggcgtcggaatttcggtcatgaagcccttccacggagaggtcagctgctgtcggaaaagacgtctcccttcggcgttgaaatgaccaagaaccaatgtatacaatatgctctcgaccgtcccgccgttatgaccgtcgtgcccggcgtgcgcagtatggccgaccttgacgagctgcttgaattttcgtcggctgcggaaagtgacaccgattattcgattatcggccgatttacccccgcggcggcgctcgggcattgcgtctactgcaatcattgcctgccctgtcccgcagggcttgacatcggtcttatcaataaatattacgacctttcccttgcgggggacaaaatggctcacgaccattacggcaaactgaaaataaacgcaaaaagctgcgtcggctgcggccattgcgaccgccgatgtcctttcggcgtgaagcagtcgcgccgtatgaccgaaatttcagaatattttgaaaaaggagaatgttaaaatgcttgaaaactatcttgaaagaacaaatcttcaatccggtaaaaaaatctcggtaaaggcggccgtcaccgtcggccttatctgccttgccgtcattcttccccaaatcgcccatttggcggtcggtccctcggcgggaatgacgctgcttcccatgtatcttcccgcgctgctcggcggttgccttctcggagcaaaatggggccttttcacgggaattctctctcctctcgcctcctttgccgtgacatccgcattcggttcggccatgcccgctgccgcccgtctgccctttatgatggccgagcttgcggtttttgcccttgtttcgggactcttttcaaataaaatcgcaaagaatgcgctttttgctttccccgcagtcattgccgcggaaatttcgggaagaggatttttcctcctttcggtagcggctcttcagggcgttactccccttaaaacggccgtgatttggcagcagatacagaccggatttgtcggtcttgccgttcaggcggtgctggttccccttatggtaatcgcaatcaaaaaaatcatggataaagaggcaaaataatttgcaaaagcaaagcccgccacagaaacaacttctgcggcgggtttttgtgtttaaaaatatgtgctttcagctctgttttacgggaatgtcgacaacaaaaagctcgttgttatgctttcttattatgtcggcaaggtcctgcgaattcagccagaccgtggccgtgttgtcgcagggatgaacgccgatgcggccgtcgccttcaaaaaattctttgtcaagaaagacctttacaagactttgctcgtcgctgagaattccaaggggcgtgaccgagccgggagtcagctttaaaaagctcataagctcgtcgggagaggcaaaggacagggttttggtgccgtaggtctttttaaactgcttaaggtcgacccgcttgtcgcctctgacggttatgagataataattatttctcttgtcgtctctgacaaaaaggttttttgcgtcgcggtcgggatagggaaggggcgtgtcggtcaattcgtccatgctgaaaacggcctcgtgctcggtgacctcgaaatcaagtcccccgctctttaaaaagtcatatatctgctgctttgtcatgatgtttctccttgttcttttgaatgagtctttttgtgaaaacggtcaacggaaccatgattatatagaaaaacgaaatgaaataagggaaaatccccatgccgaaggcctggccgaccgctccgcaaagagcgggaacgaaaaggattccaacataggccgcccccatttgagcgctcatgaccgagcgggaaacgccgtttccgaagctttcgggagtgagaaaattgaaattcgggaaaaggggaccgttgctcagccccgcaagaaacagcgcggcggccgatatttcccaccgtcccggtatgaagaaaagcgcgagagcgacgccgagaagtatttggctgaattttatgattgtccagctgtgaagctttgcggcgagcattcccgacaaaaatcttccgagtgccatgccgatgtagaaaagcatgataatgcgggcggcaagctcggccgacaggtgcttgtgttccacaagaaaggtgcttccccagcccccgcagctccattcgatggcacaggtgcatataaaaagcaggcacatttgcgccgctccggggattttgagtgtgcttttaagggaaagagcggcttcttttcggctttcgtcgtgttcatttccgcgaacctttttccacaccggaagggtgcaaaacaaaagcagcgaaagggcgccctgtataaaaaaggctatgagatagcctccccgccagccgtattttccgccgattacaagagacattatgtaggggctgaccgacaccccaaccccgtaaaagcaatggagaaagctcatgtgagttgcggaatagtgaagagaaacatagtcgttaagcgccacatccaccgctcccgcccccattccgaggggcagcgcaaaaaggcacataaaaaatatactcggcgaaaccgaaaacccgagcagcgccgcagcggtcatgagggtgcttacggcggtgacgcggctcgtgccgaattttgaaatgatttttgcgctgataagacttgaaacaatggttccgagggagattatgacggttacaaagctgccgaaggaaatgggaatgttaaaatccgaataaattgccggccaggccgttccgaaaagggagtcgggaataccgagcccgataaatgcggcgtatatgacggcaagaagaagggttgccaaaaaaatcatcctttaaaatttgctgtgggtattataccgcaaaaagagcggaaatcaaacagaaaattcacttttcctcggcgggagaaataaatttaatgggcagagcaatctgagttatataggactgcttgtcctccccgtgggtgggcggcccctccatataaatgtttcggaaatatccgtggggagtcatgcccttttcttttgcataatcaagcagccgacggtggattttgggaaaatcctcataagccccgcgataatatatacatatacattgcgtttggtgaaagacctttatgttttcgccgcggctttgcttttccaccgggattatataaagaccgctgttttcctcatccgcaaaacattgcgtgcacattttgttttcggtgtcgattttatagtttttcaccgcctcgatgtaggtctttctcaggcaatcggtcttttgcgccaagtttgcgtttttaaattcgcggcaaaagccggtaaaggcgggcagcgtggctgtttttatgtcgttttgcgaggcttttgcctggcggagacggagctgggcgatatattggtcgagctgatttctcaaaagcacaaggcggtcgatctgctcgccgagggtgtcggaatttccgaaatattccttgatttccccaagcgaaagcccgagattttgcagcgcccgtataagcctgatgtgaaccatgttgtcggccgaataatatctaaaaccgctgtcgggatttttgcggtcgggtgtgagcaatccctgctcctcataattgagtatcatgcgccttgaaaccccgagggcctttgccacctcgcctatctgaaaaagagactcgtttttccgctccataaaaacctcccgaaaagataaaaaatctcttgactcgtacattgatgtacgatgtatactcattatagtcaaaattcaaaaaaagtcaacgtttgtcttgcaaggagcaatgagaagtatgaaaaggtttaaaaatctttcgttcagggaaaaggcggagtacataagcattcttgtgctgtatccctttttcctgctgttcggccgattggggaggagcattcggctgttcggcaccaaaagacggcagattacggcgagcgcactaagccttgccgtaatactgtcgatgctgtcattttcggcctttgcggccgatttttccgacgataccgatttcggtatttcggtttacgacgttgccgtgaccggtgcgaactataaggatgttctcgccggaaccgaaaacgccgggacggtcagctttgaccccgacggcaatgtcctcacccttaaagggcttaatctttccaaaagcgcaagcagatattataatctgctgaccgtaaacagagacagcataaccgttcgccttgagggcgaaaattctctcacaaccgtttccaccggcgtcagctatgccatacagacgataaagacctcggggaatcttacctttgacggaacgggcagtctgcttgtcgaaacgggaaagtccaaaaaggacgtctacggcattaaatgtgagggctcctttgcccaaaagggcggcaatgttatcgttaaaaacagcgacagcaccgcaacaaagggtctttataataatcaggctgtgtatgtaagcggcgcaatagatttgaccggcggaaagctcacggccgaggccggcaagggaatacagctctctgccgcgcttatgaccacctctgccgacattaacataaccgacgctacggccgtgctcgtcagcggagcgggcggaagcgacagctatgccctttacaccaacgaaaacataaccgtgacaaattcaaagcttgacctttcctccgccgatgtctcggggaacagctatgcaatgcagacgggcggcggcaaaaagctttcggtgacaaattccgaaataaccgcaacctcgggagcgggcgaattcagccttcccatatggacctcgagcgccgagcttaaggagagcaccgtcaccgcagagggcggtatggcatcctgcgaatcctacggtatgtctgcggcggaattccaaatggacggcggtacggtctccctcaagggaggcgacgcggccgactggagtatcggtctttggagcagcaacgcaaaaatccttaacggcacccttaaagcatcggtgggaaccgccgacggaaccaatgccataacctcatcgccctctttcgggaccgtgaaaatgacggttgttgcgggtaccgatgaagaaacggccgtcaaggtgaccgagcccaccgacgacacctattggtcaagtcggtatgtgcaaatttctccctatgttcatgagcacgaatggagcatatacctttcctatgacctcgagcatcattggcgcgactgcattgccgatgactgcgacataaccgccgattcggacaagaaggactatgccgcccattcttataccgagcaaaatcccattgacaggtatcgcgagcgtgcggccgattatctttcgcccgcggtttacagatattcctgtgtttgcggtgctatgggaacggaaacctttgaatacggagatgtcgttgccgatgaaataaagcccggcggagacattctgatttcggaaaattcgattaaaaaggcgctcaacgccgtgaccttcggtctctttttcaaggatacccagaccgtcaccgtgaccgcctatgacaatgaaagcggccttaagtcggtggaatatctcaagtctcccgaaattttaagcgaaaccgcccttgccgcggcggagggctggagcctttacgagactcccatttcggtcgagcccctaaaccccgccgtcatctatgttaaaatcaccgatatgcagggcaacgtcaccctgctttgctccgacggcattaccgtcgacaacatagcccccgtaatcgagggaatagagcagggcaaaacctactgcgaggcaaaaaccgtgacggttaacgaacagtatgtcgacagcgtgacggttaacggccaaagcgtcgagcttgaccaaagcggtgcatttgagcttttgccgaaggcgggagagcagaagattgtcgtctccgacaaggcgggtaacaccgccgaaatgacggtcacagtcaatgacggacatactcccgaggccgacgacggcgattgcaccacccccgtttactgccttttctgcaaggccgaaaccgctgccgccaaggaacatgatttttcgggcgaatggcagaaggacggggaggggcactaccgcacctgccttaatgaaggcgttccaaaagatcg

SEQ ID NO: 2190 - DNA, 2029 bp, Unknown
  16S sequences of unknown bacteria
caggtcggtgttgatgggctggatcagcagttcgttggagaaattgccgtcggagccgaaggggaaggtgcgcagcaggaaaaagcgcagcgcgtccacaccgaacttttcgctgagcagatagggatccaccacgtttcccttgctcttgctcattttgccgccgtccagcagcagccagccgtggccgaatacctttttgggcaggggcagctccatgctcatcagcatggcgggccagatgatggagtggaagcgcacgatttccttgcccacaatgtgcacgtccgcgggccagtatttttcgcagtcgtcgtagcgctcattgaggtagcccagggccgtcatatagttgaacagggcatccacccacacatagaccacgtgaccggggtcgaaatccaccgggatgccccaggtgaagctggtgcgggacacacacagatcctccaggcccggatcaataaagttgttcaccatctcgtttacgcggctgcgaggctccagaaaatcggtgttgaccagaagatcgcgcacccggccggcgtatttgctcaggcggaagaaataagcctcctcctcagcgtcaatcacatcgcggccgcagtcgggacatttgccgtccaccaactggctttctgtccagaaagattcgcagggcttgcagtatttgcccttgtaggtacccttataaatatcgcccttgtcgtacattttgcggaagattttctgaatgctctccacatgatagtcgtccgtggtgcggatgaaacggtcgttggaaacgttcatcagcttccaaagatctttcacgccccgctgaccttccacaatgtggtccacaaattcctgcgggctgacgccggcctcgcgggctttgtcttcaattttctggccatgctcgtccgttccggtgaggaacatcacgtcaaagcccttcaggcgcttgtagcgggcgatggcgtcagtggccacggtgcagtaggtatggccgatgtgcagcttgtcgctgggataataaatcggcgtggtgatataaaacttctctttttccataattgttttctctccttctcgccgctccgaatgaaagagggcggaatttcctttgtgccgcaaagatagcgttaaaaacagtataccatgctttggtttattttaacagagaaatgtcacatttcctgtcccatctgccaaaaatacggggcagccgtcctttggaatgcctttccggtggacaaattgaaattattttgttatacttttgttactattgtaaccattctactgcctgcggccttttctgccgcggcgccggaaaggaagtttgaccgttatgaaaaaacgtcttttcagcgctctgtgcgctgtttcgctggttctgtcgctgagcggaacggccctggcctccacttattccgtcacgctgacggcagaggaggccgccggggaaatccctgtactgctcaccatccccgccattacgccggctgccccggggcaggaggccgaccgcatcgtgctcagcgcccccaccgcaggcgcggcggtggagatccccatcaacggcaaagcctccgacgccgatctcctgctggtggacgaacagggcctctacgaagccgccgaggataccgtgcgcggcgagagcaccgtgtccaccatgctgcccggcacccggtccaccgtgctgattctgaaaaagccgcccttcacggatctctcccgcaccgcctggtattacggcggcgtggtctatgcttaccacaatcagctcatgagcggcgtttcctccaccaaattttcccccaacagcgccgccgaccgcgccatgctggtcacgatcctccaccgcacagcgggcaaacccgccgccgatggcggcgtgtcctttgccgacgtgcccggcgggaaatactattccgccgccgtgtcttgggcagccggggagggttttgtcaccggctccggcagcggcaacttcaaccccaccggaaaactgacgcgggaacaactcgccgtggtgctg

SEQ ID NO: 2191 - DNA, 18097 bp, Unknown
  16S sequences of unknown bacteria
cgttttctgcacacggcggcaggtctttcccctcagtgggctgttctggccgcaattgtgctcgccgccagtttttacgcttttctggccctccttctgcgcatggtcacacgggaagatctcgcgttgattccaaaaggagaaaaaattgcaaaaatcctgcacattcgctgaaaaacgcccctcccgccggcatttgcgtcggtttttatccacccgggggcgtcaaaagacggtataagccgttcaaaattggaaaaaatgattgcaaagagagaaaaattatggtagattttgaattccgggaacactataccatagacgatctgcgtcggatcgtcgccatcctgcgccaccccggcggctgcccctgggacgccgagcagacccatgaaagtctgcgccgctgtctgatggaggaatgctgcgaagtgctggaggccatcgaccgcagggacgacgcccttttgtgcgaagagctgggcgacgtgctgcttcaggtggtattccacgcttctctggccgaggatacgggccggtttgatctggacgctgtggcggacggcatctgtaaaaagatgatcttccgccacccccacgtattcggctccgcgtcggcggacaccacggaagaggtgctttccaactgggataccctcaaacgtgaggaaaagggcatcgaaaacgatgcggacgcgctgcgcgctgtagcgcggacgctgcccgccctgtggcgcgcggagaaggttctgaaaaaggccgccaaagccggctttgcctggccggatatctccggtgccatggacaagctggccgaggaacaggaagaactgcgcgtggccgtggcagagcacacgaacatccgcgaagaactgggggatgtgctctttgccgccgccgctgtggcccgctatgccgggatcgaccctgagcaggccctgcaggaggctaccgacaagtatatctcccgcttcgcctgcatggaacgcagcgcagccgaacagggccgttccattgccggcatgcgcctggatgaaatgatccaggcctggaaccacgcaaaacagaaactacaacaagatacacaggaggacaaaaacaatgaataaacaggaactgatcagcgcagccgctgaaaagaccggcttttccaagaaagacaccgaagccaccgtcaccgccgtgctggagaccatcatctccgctctggaggacaacgaaaaggtccagctggtgggctttggctcctttgaagtgaaagagcgcgccgcccgcatcggccgcaaccccaaaaccaaggaggccatcgagattcccgcttccaaagcccctgtcttcaagcccagcaaggcgctcaaggacattctggccaagtaaggagcctgtgtcatgcggctggataaatacctgaaagtttcccgcctgatcaagcgccgcaccgtggccaacgaagcctgcgatgccgagcgtgtcagcgtcaacggccgtcctcagcgggcgtcttacgacgtgaaggtgggcgaccggatctccatccgcttcggtgaaaaaaccgtcacggtggaggtgctctccatcagcgagactgccggcaaggccgacgcgcccactttgtaccgcgaagtggcgggcgaatgattcatatccgaaccgatcccttcataaactgaggataagctcaagtttatggagggatctttttatggcctatgacgagggcgcgctctcccgcgcgcatcattatctgcacatggagggccgcgaacagctcaccgtggccggggtagaggacgtggaccgtttcgatgaaaccggcattgtgatgaccaccagcgccggcgtgctgatcatcaccggcagcaacctgcacatcggcaagctgagcctggagggcggcgagctgcatgtggacggacagatcgactcgctcgcttatgaggacgaccggcgccagggcggcgggttcttctcccgcctgttcgggtgaggggaaatggagatttatatttcccagcagctcgcgcttttctccggcgccgcccttttgggcgccgttctgggactggcttacgacctgctgcgctccgtgcggcggcgctggcagcgtctgctggccgtatgcgacgtgctgttctgtctggccgtagcggccggttccatcggctacacactgcgcgccgccgggggagagctgcggctctacctcgccgtgggcatggtgctgggagcggggctgtatttcctggctttcagcgcgctgctgcgtccactgtgggacttctggatcgatgtggcagcgtcctttctgcatctttgtgcgctcccgctgcagctgggcaaaatttttttgcaaaaagtcgcccggcgcctgaaaaaactctttcatttttggtataaatgggttaaaatattgaattataagtgggcgttcattcttgtccgccgcaatcgggaaaggagccggagccatgaaagaagcacaggaacatccccgcaagtcaaagtccggcgccgccggcattctgacaaaggtcgtgctggtggccgtactggcgtacgcaggcgccacgctgctgcacctgcagaaccagctgcagaccgcccgggagcaggaaacacagctcgccgcccaggtgcaggagctgcaggacaaaaataacgccctccgctcggacattgccgcctccggcgatccggacaaactggaggacgtggcccgcagcgaactgggcatggtagagagcggcgaaaaagtattttacgaaaccggttcttaagagagcagaaaccatcaaaaagagaaagacagggtcacctggcgaagggagtaacaacaaacaatatggagcttggcgtagggagcattttggaaggcaaagtcaccggcatcacaaaatttggggcatttgtgtccctgggggaaaacaagtccggcctggtgcacatttcagagatcgcaaacacatatgtcaacgatattcatgagcacctgcaggaagggcaggccgtgaaggtcaaagtgctggccattgacgaaaacggccgcatcaacctatccatcaagcgtgccttgcccaatccgggccaagggcaggggggtgtccgcggcgttcagggcgggcgtggtgctgcgcaccgcagcacaggcagcgcccagcgcccgggtttcaccaggggcggcgcccgggctgcagcgcccgccgttcccatgacggcggaggaatcgttcgaggcaaagctgaaagccttcatgacggaatcggaggggaagatttccgatttgaaccactccatggacaagcgcggacggcgcagataagcaaaaatgcacagcgcaggcgctgtgcattttttcgatgcagcatactttcctccggaggcagcagatgcgtcctaggttttccgcacaggcagaacggcacgccgcagcagaaacgcactgcatccgcactccgcgctgcgccgcagggcaaatttcccggcatgcagatccccgggaaccccgcgttccagattcccgccgcacagcggcgaacaaaaaaacacagatattttgaatcctgcgaaagggtgtgaacgagttgttgatcgtaaacgcgcagatccttcccgtggtgggggaggaaattgcgcagggattcctgcagatcgaaaatggaaaaattgtctccctcgggccgatggcgcaggctccggcagacagggaacggtacgatgctgccggcgcgctggccctgcccggctttatcgacgcccattgccacctgggcgtatgcggcgacggcctgggcatagagtccgacgagtgtaacgaaatgagcgatccggtcaccccccagctgcgggccatcgacggcgtaaaccccatggaccgctgctttgccgaagccgtcgccgcaggcgtcacctgcgtgctcaccggcccgggcagcgccaatgccatcggcggggaggtcatcgccatgaaaacggcgggccgccgcatcgacgatctctgcgtgcgctttccgggctgcatgaaattcgccctgggcgaaaatcccaaaatgacctacggcgagaaacgcgaaacacccatgacccgcatggccaccgccgccctgatccgggaagagctgtacaaagcccgggagtatatggacaagcgcgcccgggcagaaaccgatcccgacgccgacgcgccggactacgacgccaagctggaggccctggtccccgtgctgcggcgggaggtgcccgcccatttccatgcccaccgggccgatgacatgctcaccgccatccgcatcgcccgggaattcgatctggactatgttctggtgcacggcacggaagggcacctcattgccgatatcctcgccgccgagggcgcccgtgtgatctgcgggccgctgctcaccgaccgcagcaaaccggaattgtctcatcagaccattgaaaacccggcccgcctggcccgcgcaggcattccgctggccatctgcaccgaccatccggagcttccgatccagtatctgcccctgtccgccgccatggcggtgcgcgcaggactggacaagacggcagcactgcgcgccattaccattgacgcagcgcggctggccggcgtggcagatcgcgtaggttccttggaagcgggcaaggacgcagacgtcgtgctctgctcggctcatcctttttccatggactgcaccattcaggccgtctttatcgacggaaaacagacaggagtgtgagtgcgtcatgcgcgaaatcgactgtgaacaaatcatactggcagtaaaaaacctgtgcatcaacgccaactgtttcctgcccgccgacgtgcgccgcgcccttgacgggacccgggagagcgaacaatccgaggtgggccgcgctattttgggcgatctggcggagaactaccgcctggccgacgccgagcacctgcccatctgccaggacaccggtatggccgtgctctttgtggagctgggacaggaggtacacatcaccggcggcctgctggaggacgctctgaatgaaggcgtgcgccggggttacgtggacgggctgctgcgtctgagcgtggtagccgaccccatccgccggggcaacacaaacgataacacacccgctgtgatccacctgcgcctggtgaagggcgaccagctgaaaatcaccgtggcgcccaagggattcggcagcgaaaacatgagcgtgctgaaaatgttcaagcctgccgccaccgtggaggagatcgaagactttatcgtctccgccgtggaccaggccggttccaatccctgtccgcccatcgtgctgggcgtcggcgtgggcggcacgtcggaacaggtgatggagctggccaagcgcgctctgctgcgcccggtgggccagccccacaccgacgcgttttatgccgatatggagcggcggctgctggagaagatcaaccgcctgggcatcggtcctcagggtctgggcggcataaccacagctctggcggtccatatcgaaaccgcccccacccacatcgccggcctgccctccgggctgaatctgagctgccatgtgctgcggcacgcggaagcaacgctgtaaaaaagaatcacgcacaccggaaaaagggaggcccatcatgaaacgactgttcaccctgttctgcgcagccggactgctgctcgctttggcagcctgcggccggcaggccgaagaaccggccagcaccctgaagccccatgtcttttcggcggaaacagaaaccataatcgatctattgacggaagcaaacgaggctttctgtctttacgactacgacgtggatgagaccattcggagctgccgcaccacgctttggtcctacgaaaacggcgcgtgggtcagcaaggcccagtctgccggaaacctgagcgcgcagcagggccagttcggcttctatctggaccgaaacggatcctataccggctatgacatccaggaggatgggcatacggcgtactgctatgaaggatctctgcccgtttttgaggagagcgcgccctccggctcctctgtcaatcagaatgagcaggagatcgtacccggccaggaaatctgcctgtacgtccgcctgcgcgcccccgacggagcagataccgttgcgttttccaccgaatccttccgctcgtatccctgcagcgctggctgcgccgtcaccataactttttacgatacgctgctgccggaggacccataaaaacaaaacaggagcacggggcctgcaggtcccgtgctccttctttttttcctttgttcccgcgttacgttccccagagatacttgtccgcgaaaatattcatgctgtcactccgggccgtgcagatcagaaccacacgataagcccgcgccagcgccacggcgcggtcggtgggaaccgcattgctggccagcagcggcacgcctgcgcggatggccttttccatcatatccgccgggatccggccggaggaaaagagcacgcaccggcgcagatccacgccgtccatcagggcgcggcccacggccttgtccagtgcgttgtggcggccgatatcctcgcagcagtacagaatctccccgtcctgcatcaaaaagcagctgtgaatcccgtgggtggcgcggtacagcggggcgccggcgtgaaaggcccggcccagcgcatagatccagcgcggctcccagcggaagtcgccccgccgccgaagcgccttttccgcaccgtccgccgccagcggagcggacaggttcgccggacctcgcgtaaccgcctccgcctgtgtgccttcggcgctgaccgcaatagagcacacatcctctaccccggcaatgcgtccttcggtatacagatgccccagcaccagagcggaaagctctgtgggcgtgcacaccagcgtttcctccggcacaccgttgaggaaaagcttcatatggttttcctgcaggactgtgcgctcttcccagcgcggaatggccgtcatagggtcgatgcgcaccatgtcctgctccaccgcgccgcgcggcgcagtgcaaagatcgatgatctccatggcccgcacctcaggtatgggccgccccgtccagagtcagggcatcgatggcggcgcgaaattccgtggaatcgcgcacggtgaggtaagagacggtgcacagctttccgccgcgcacaaaagcgtaggcaaagcacagccggttgttcccgctgctgtcggcagcgcggaattcatagcggtaagccggcacactgccgaaggccacgtccttcgccgaaacgctggcaatgttgaccacatagcccagcgtctgcagatcctgcgccaacagctcctttacctcgcccttggtatactgcaccacgggtttggccggattcaatccttccactgtccgcaccgccgcttcgcagcggtacgccccggaggcgctggtcagccccgcgcggccctccgcgctctgtgcgtcccggctgccgggcagatacactgtcaggccaccgatcaggtcggacagatcctgccggtccagcaccacaaagcgttcgcgctctttgggcaggatcatccgcgcagccagggcggacagttcggcgcgggtgatcgttgcctccggacggaacgcgcactccggcccgctgccggtcagcaccccggcattgtagagcagcaaaatggaatgatagtatttcccctgcggcacatcggtcagatgatcgatgcggttgacggcgtgtagctccgccggcgggagggcgtcggcaaagaggtaagccacctctgcccgggtggcggcgcgggtataatcgtcaaaatcccccgcctggatcagcccttctttcacggcatactccacataaggccggtaccagtttgcgccggaaccgcttttcacggcgctttttccattgttgtacacctcgtggatccggcaggacagcgtcagagcttcggccacactgaccgtgccccggggattgaacttcccgtacgtcccctgcatcaggccgtactcatagcagatctttgcgctgtcggcataccacgcgccgctccacacgtccttgaattggcccgtataggaggcagtcttttgaaagttgctcatatgctcggccgccggcgccatggcgcacagccccagggccaacgccgcggacaggaccagtgccgtcagtttgcgcatcttcatggctcttttctccttctctttcgtatcagcaataacagaaccgattgtacaggatattccggtatttggcaagaaaaagcgctcgaacggcggcgtcagcgcaatgtctgcagcacttccaccatgttttcggcaaacaggcgcgcggcatagagcgcctcgtccagcgaatttccggcagcccccacctccaccagcagcgatccggtggtggcgtgttcgttgtagcgggaattgcgcagatacatggggcgcatcagggtggggtagtcctccagcaggttctgctgcagaagcacagccagtttgagattctcctgccagtggccgtggggcaggccgctgccgtcgctgcccaccacaatggagagctgcgccgcgttcttcccgttcacatcggaaatcaccttgtaggtgttgccgtcgctgtcttcaatggcgtcccggtggatgtccagcacaaagtgaatggagggatatttttcaaggtaggcctggatggacgtttccgcccggtcatacgcgtcattgtagcctgccgcatcgtagagcgtgcggtcatggagcactgaaatacccgcctcttcaaacacctcggcaatttcatcgcccacccggaccacattgtaatctgtgtcctcggtgcgggtggcgccgtcgtcgttgtattcctgtccctccggcatggtataagattccgtagcgtgggtgtggagaatcaggatttgcggcatctcgtccgtgaataccgctgcggggcgcgttttcatcagcgcgtccagatctacgttgtaatcggtggtattggagatatacacatccttccacaccagataccccgcgctgttggtgggatgaatggttttcgcaggcacgccgttgtcgttgtcatgattcacctctgcggcttcattgtcctccggatcgatcactgtgccctcatgggtttcatcggggctggcggcgctgtctccttccgctgcgctgtcctcctgggcaacggcctccgccgccgcgcggttgctttgcagcatggcgctgtcctgcatggccagcgcggtcagcacgcccaggggcgagcgttcctccgtacggtcgctgttccaggcagccagttccgcgcgcagcaccgccgcaccgatgctgccggccgtaatctccccccagccgccggcagcgccggcagccagcacaaacgcaaacagcgccatggccagcgccgccgcccgccgtggggcggcctgtccctttttttgtcgcttcatcggtgtaagcacttcctttatcctgatcgtgatgcaccatcctatgcacagattcaccgaagtataccgccttgcaatttccaggggaatgtgatagtatcacactattcccatccgcctttgaccggcctgcgctgcacttcggccgccccactctggaggtgctcatgaaaaagaaagaaaaacccggcgcacagttccgcaccgtggaaaacaagcgcctgatctcggcgctgtatatcctgctgcgcatttctgtggtgatggtgctcattgcccaggtgctcaacggaaactttgaaaacgtgatgctctgcgtgctgacgctgattctgttcacgctgccctcccttatcgagcgccggctgaagattgacctgcccgacacgctggaaatcgttattctgctgtttatctattccgcagaaattctcggcgagattcgggcattttatgtcattttcccgttctgggacaccgttctgcacaccttgaacggctttttgtgcgcggcgatcggcttttcgctgatcgaccttttaaaccgaagcaaaaaatttacgttttccctctctccgctctacgtggcggtggtgtccttctgtttttccatgaccataggcgtactgtgggagttttttgaatgcgccatggatcaattctttttcctcgacatgcaaaaagacaccgtcatccccgcgatcagctccgtgctgctggatcctgccggcggcaaccacccccagctgatcaacggtatccgggacgtgatcatcgtctacggcgacggcacgcagcaggcgctcggcgtgggcggctatcttgatatcggccttctggataccatggaagatttgttcgtcaatttcatcggcgccaccgtgttttccctggtgggctattgctatatcaaacgccgcggacagggcaagtttgcccgtcgctttatccctcgcattctggaggacgcagacagcaattcctctgaaaaagaaaaaccgtaaaaaaaggtctcccggcagccgccgggagacctttttaacattcttttcaggaatctatcttcatcgtccgctttcccggcagggccaggagaaagatcgtggaaaccaccagcgcaaagccggcgtaatccatgggaaggaaggggacatggagccaaaacaccgagagcagcgtggataccagcggctctgtggcgctaagaatccccgctttggccggccccaccagcgccacaccggtaaaatacagcccgaaacacagcacgctgcccaccagtacgatcacggcaaacgccgcccaggccggcgggtcaaaaacgccttccatatggctccagggacggcgcagcagacataaaaacacccctgcaatcaccatcccccagccagtggaggtcagcgtgccgcattcggccgtcaggcgccggggctgcacagaatagagcgatgtggcaaacgccgaaaccagcccccagaacagcgcctcctttgacaacaccagcgtggagggatcgccgtgggtcgtcagcagaaacgtgcccagcgccgccagaaccacggctatcgtttcgttggtttccggcagccgccgggcgcgcagagccacccacagcacaatcagcaccgggccgaggtagcacaggatggtggccgtggtggcgttagccgcccgaatggtcgtatagtaggaatactggcacagtccgatgcccagaacgccgaacaccagtacgtcggcccggttccgcccggagacaaacacgcgcagcaggttctgccgcccctccaggccggcgaccagcagcagcatcagcacccccgccaaaaggatgcgcagcgggatgataaagtccacgctccagccgcgctgatcgaataaaaactggccacacacgccggccaccccccaggccgcgcccgccagcaaacagcacaaatatccttttttctgcggggaacgtccccgcttctgcaccgtcggctcctctgcagccgccgattctttcactgccgagctttgtgtgcactctattgtttccatcaaagcggctccttctgttttccatttttccatgcggacgctgtaaaccttttaccgtgtcccttccaaggcaaaaaagcgcagggcgttttcccaggtaatacgctccgcttcttctgcacaaatccccttgattgccgcaatccgctccgccacatagggcagatagcgcgaatcgttgcgcttaccccggaagggaaccggtgcaagataagggctgtccgtttccagcagcagccggtcgaggggggcgtaagccgccacttccggcgctttccgggcattcttaaaggtcagcgccccgccgaaccccagataccagccccggtccagcagtattcttgcatcctccaccgaaccggaatagcagtggaactcgccgcgcacccctggaaaagcgcgcaccatgtccatgcagtcgccgtgggcgtcccggtcatggatcaccacgggcagatccaattgctccgccagagccatctgccgggccattacttccttttggaacgcccggggagggttttcctcccaatagtagtccaggccgatttcaccaatggccactgccttcgggtgggctgccagggcttcgagggccgcaaagtccgcctcgtccgcgccggcacagttctccgggtgcagtcccacagcagcatacacaatatcataccgctccgccagggcaatggccgcgcgggaagagtctgcggtgcagcctggattaaccacggctcctatgcccgcctccggcagggacttcagcaccgcatcccgatcgttgtcaaagcgctcatcgtcgtaatgagcgtgcgtatcaaaaaacattgggtatctcctccttgtcttgcgcaccacgtccgcgctgtatggttcccggttcaccgcggaaacagaagaaagagcgctcccttcgaaagaacaaggaaacactctccatcatagcatgattttaacgaaaaacaatttattttgcaatgatttttgcacagaaaacagcaaattcttgtttgctttctcgccttttttcataaactttcaaaaccacccggcttttttgtaaaatcaggggaaaaatcattgacagtgaccagccaatcaagcataataaagttcctttcagggcattctctctgtagacaattgccacagagcaaacatgtgccttatcccgatcgatacgcagcctgctgtgcggcattcagcgaaacactacatgttgtcctcttcgcttgacatgcacaagatattgtggtaggctctatctgtaacggctctttcccgaaaaaggcgaagcgttcccatcccggcgatccatcgctttcccacaagcggtgcacctgcggcaacgaatgtggaatcttaaatccgcaaacaaacgacgcacacggcgcaccctgaagggtgcgccttaatctttttgccccgccgggccccgttcatccttatcaaaccgcttccgcacggaagcttcgggctgcggcccgatacgatcatgaccaccaggaaggaataggaggttctctactatgaacgcaatcaatgtccgcaaattcatccaggaaaactacacgccctacgatggcgatgccggcttcctcgccggccccactgagcgcaccaccaagctgtggaacgaagtgctggagctgatgaagcaggagcgctccgccggcggcgtgctggacttcgacaccaagatcatttccgatatcacctcccacgcagccggctatatcgacaaagagctggagcagatcgtgggcctgcagaccgataagcccctcaagcgcgccatcatgcctttcggcggcatccgcgtggtgcgcaccagtgtggaagaacacggcggcaagcttgacccggaagtggagcgcatcttcaaataccgcaagactcacaacgacggcgtgtttgacgtatacaccgacgaaatcaagatcgcccgcagcaacaagctcctcaccggcctgcccgacgcctacggccgcggccgcatcatcggcgactaccgccgcgtggccctgtatggcgtggactttttgattgagcagaagaaagaggccgtgcagcgctacgtccacgccgatatgagcgacgacctgatgcgcaagcgcgaggaactggccgagcagatccgcgccctgaaggagctgaaggaaatggccgccagctacggctgcgacatctccaagcccgcccaggacacgaaggaagccattcagtggctctatttcggctatctggccgccgtcaaggaacagaacggcgcagccatgagcctgggccgcacttccaccttcctggatatctatgccgagcgcgacctcaagagcggcaaatacaccgaagaacagattcaggaatttgtagatcattttatcatgaaactgcgcatggtccgcttcctgcgcaccaaagtctacgattctcttttctccggcgaccccacctgggtcaccgagtctctggccggcatgggcatggacggccgccacatggtcactaagatgacctaccggtatctgcataccctggaaaacctggggccggcgccggaaccgaacctgaccgtgctgtggagcagccgcctgccggagcccttcaagcactacgcagcccacatttccattgccacctccgccatccagtatgagaacgacgacctgatgcgccccgatctgggcgacgactacggcattgcctgctgcgtttcccccatgcgcatcggcaagcagatgcagttcttcggcgcccgcgccaatctggccaaggcgctgatgtacgccatcaacggcggccgcgatgaactgacgggcgaacaggtcaccgaccgttacgaacccatcaccagcgagtacctcgatttcgatgaggtgatggaaaaattccaggtcaccatgcgccacctggcccgcgtgtatatgaacgccctgtactgcatccactatatgcacgacaaatatgactacgagcgcatcgaaatggccctgatggacgaggaaatgaaacgcaccaccgcctgcggcatcgcgggcctgagcgtggtggccgacagcctgtccgccatcaagtatgccagggtcaagcccatccgcgacgagaacggcatggccgtggattttgaaatcgaaggcgacttccccaaatacggcaacaacgacgaccgggtggatgaactggcccagtgggcggtgagctatttcatggatgcgctgcgccagcagcagacctaccgccgctccatcgccacgcagtcggtgctgaccatcacttccaacgtggtctacggcaagaataccggctccacacccgacgggcgcaagcgcggcgagccgctggctcccggcgccaaccccatgcacggccgcgactgcaacggcgccattgcttcgctgtcttccgtggccaaaatccccttcgaggacgcccaggacggtatttcctacacgttcaccattgtccctcaggctctgggcaagaccagggaagaccaggaggccaacctgtacgccctgctggatggctacgccgaaaagggcggccaccatatcaacgtgaacgtcctcaaccgcgaaacgctgcttgacgccatggatcaccctgaaaaatatccccagctgaccatccgcgtgtccggctacgctgtcaactttatcaaactgacccgtgagcagcagctggacgtgatcagccgcacgttccacgaaaagttctgagccatggctctgacaggacgcatccactcactggaaagcttcggcgccgtggacgggccaggcgtacgctatgtaatcttttttcagggctgcccgctgcgctgcatctactgtcacaatccggacacctggccgctcaaaggcggccgggaagtcacggtgcaggagctggtggaaggcctgctgccttaccgtcctttcctgcgcaccggcggcgtgacgctgaccggcggcgagccgctgctgcagagcgcatttgtttttgagctgatccgcgccctgcacgcagaagggtttcacaccgccatcgacaccgccggctccattcccctggaaacctgccgggaggccgtggacgaagcggacatgctgctgctggacatcaaagctctggagccaaagctctgccgcatgatctccggcagcggcggcgaacatgccaaagctctgctccagcattgcgaagatactcaaaaaaccgtctggctgcgccatgtggtagtgccggactatacgctcaactacagcaaactggccgacctggcggattatctgaaaggattttcctgcattgagcgggtggaactgctgccctttcatcagatgggcagctacaaatgggctgcggaacgcctgcactacgccctgcaggacaagcgcactcctaccggcgaagaaatggacgaagcccgcaggatttttgccgacgcggggctgaaggtccagtgacgctctttccatacgacagcaaaacgcatcgtgctcccattttcgagaaaaatgggagcacgatctttttttacgccagatggaacatccatttggacagcacataccccagcagagcgcaggcggggaaggtaagcagccaggccagaaccatccggcccgcaatgcggcggtccacttttccgccgcctgccgcgcccgcacccatcaccgcgcaggttttggtgtgggtcgtggataccggcaggcctcctgccgtggccagcagcaggcacgccaccgccgccgtatccgcggcaaagccctgatagggcataagggacgtcatatcctggcccacggcgcggataatacgccgcccgcccacggcggtgcccgcgcccatgaccagcgcgcacagcagcgcttcccacaacggcgcgctttccagctgcggcggccgtcccgcccgcagagcctccgccaacagcagaacgccgaggaatttctgtccatcctgggcgccgtggcaaaaagccatagctgccgcgccggcgacctgccagcgccggaaccgctgcgcggcccgctccaggcagccgcgtcccaaaaacaaacgcatcagaacacacaggccgcctcccagcaccagtcccaggagtaccgaaaggagcatcccccaccatacctttccccaggccgccgcattgacgccgctcatcgtcccctgcagagccaccgccgcgccggacaacgccgccagcagcgcgtggctctcgctggtgggaatcccaaacgcccaggccgccacggcccagagcacaatgcttaacagcgccgcgcacagggccgtctgagcctgcgcccgcccgctaaaatcgccgatctccagcaccgtggccgccaccgccggacacagcgccgcggaaagaacggcccccagcagattgcacactgccgccagagcaatggcccggcccatgcgcagcgcaccggtacccactgccgtggcaatggcgttgggcgcatcggtccagccgttgacaaaaatgaccgccagcgtcagcagcaccggcggcgataagagaatttccacagcacgtccgcccctttctctctactgtacgaagcgcacaatgcaactatgccactcttttgcggccaaaaaagagcacgaaagcatctgctttcgcgctctttttcaatatgatccgatctcagccacctttttgtttcagcagagcttcgcgcccgccggaatggcgtcgtccaccatgatcaggttcagtttttcctcgcctttctccgtatgcacagcggagagcagcatgccctggctttccagccccatcattttccggggcggcaggttgacgatggccaccagggttttgcccaccagctcttccggcccataatacgcatgaattcccgaaaggatctggcgatccgtaccggtgccgtcatccagggtgaaccggagcagtttcgcgctctttttcaccgcttcacaggccttcactttcacggcccggaagtcgtttttgcagaaggtgtcgaaatccaccggctcggtcagctgcggttccagctcaatggggggcagggcagccttgcgggcctctgcctcggcctcctccagctcggtcagggccttatccatgtcgatgcgggggaacaggttctcccccttggtcacagcgctgctctccgccagcgtaccccagcgggccgcgctgtcccaggtacgcccatcttcggcggcgccgatctgggcaaagagcttttcgcagctgccggggataaatggcatcagcagcacgccgcagatgcgggtgacttccagcagattatacagcacgtgagccagccgcgctccgttctgctccatatttttggccagagcccagggcgcattttcatcgatatacttgttggcccgatcgatgaccctgaacacttccgccagagcagtgtggggcgcaaagtgctccatggcgtcttcgtatttctcgcgcagcatcagggcggcggagatcagctccacatcaaacttgacgggatcgccctcggggaagttgaacgccaggttgacctcgctccggctcctgcgggcatcggcgtacaagccgttgagatactgctcatcctccgtggcgccgctgccttccggcctgt

SEQ ID NO: 2192 - DNA, 32759 bp, Unknown
  16S sequences of unknown bacteria
aggccttgaccgcgcccacgtcgccgcgcaccatcacggtgaccagtccgccgccgatatgctccttgccgatcaaatgcacgttggctgccttgaccatcgcgtcggccgcctcaatcgcgcccaccagcccgcgggtttcaatcatgcccaatgcttcctgcatggtaaaaactcctttgccacttaaatttcatctatgttcccgcaccgagcaaaagccttacatcagcgcgcgaatcatgtccatatggggagagggaatcaccacgctggaggcgatcaggccctccagcccttcgcccgcctccgcggcccggaccgacgcttccacagcggcgacctctccggtgatgatcacataggatttgccgcccatgccgcgccccaggcgcacctcgatgaggtccacgtcggcagccttgacggagatatccgccacactgatggcgctggccagcgagaaggtttccaccacgccgaccgcttccacctgctcggcaggacacgcgcccgccatggcggcgaccacgcgctcatccacgttgggaatcaccaggctgtccaccagcgtgctccctgcgctttcaatccctgcatttacggaggaacgcaccgcggccacctcgccgctgaccaccacgatgtatttgcccgcgcacactgtctgcgcggtcaccaggtccacctgcgcggtcttgaccatctgatcgccggccagcacacccagggggatgctgagggtttccaccacgccgattgcggtcatgcgctctcacctcctgtgatctccacgccccgtgcgtccacggcggtcaccacgccgtcgatagatgcgtgtattcttgcgcccagggccttttcgggaatctcgcccaccacgtcgccgcggcgcacccgctcgccgggtttcaccgtggcctcggcgggcttgcccacatgctgacgcagcggcagcagcacccgtttgggccgcagtcccgcatccgtatacggcgccggggcatcgaatgccgccaggcccatgcgcgcgatcagccgcttgaccggcacgcgcttttgcacgatgaacgggtccacgcggatgtccgtttccggcaccggccggatgcccgcgcgccccatttcgtccttgagctgtgccatgacctccgagggtgaaaggcccatatggcaggcatagttggtgcacacaccgcagctggagcaggccagcaccgagcgggcgttgcccagcagggcgccgtttcccgtggtgatggcacgcatggccttgtgcggctccacatgcagaccaagggcgtttcgggggcacatctgggtgcactggctgcactggcagcacaccgcccgcgcgatcttgagcagccgttccgggctctgcgtgcgccgcgcgatcaacagatgcgtgcgtttgagcagcaaaagcccgcccgtcgtcttggtcaccggcgcgtcccagtcctcctcgatcttgcccatgcaggggccgcccacgatgagcgcatagccgtccttcgttcccgtgaagcccgacagcgcgatcacctcgcgcatcggggtacccacggggaccgtcacggtgaggggatgaggcacgtcgccgcccacggtcacatccttgtccaccaccgggcggccatcgaccgcgtcggcgatgttgcacagcgtggccacgttgctcaccacgcagcccacgtcagccggcagcctggcgctgggcaccacgcggcccgtaacctcatagatgatggacttctcatccccggagggatagtagctgtccatcaggtgtaaagtgatatcgtctcggtctcccagcacggccctgagcgccttcaccgcgccctcatagtgcgccttggtggcgatgacgcccttttttgcgcccgtggcctgcatggccagctccatgccgcacaccacgcggtccgcgcggcgctgcatgagcagctggtccacgcgcaggagcggctcgcattcggcgccgttggcgatgacgtactcggctttggcgcccagcttcacatgcgtgggaaaccccgcgccgcccgcgccgaccacgcctgccgcgcgcacctgttcaacgatgttcataccggtcgtaacctcccgtctgcccgcgggcggaaatcagcagatgcggaaatccccgtacagcacgcagcggcgaagccgggtgaaggaccgcgcgctggtcactccctcgccggtgggggtggcgatggtcatggtggtgtatccctcgccgtcaaaacccaggccggagaagctggaggaattcttgacaaagatggtggtgttgagcttgcgcgccgccttgctcatgttgtgcacgttggtggagtggatcatggcggagtgcttgcagccctgttcggcgcggaaggcctcctcgacggcctcgtcaatgttgctcacgcgcacgatgggaagcacgggcatgagcatctcggtcatgacgaaaggatggttgcggtccgtctcggcgatgatcagccgcggattgccggtgaagctcacgccgctgtcgcgcaggatgaccgccgcgtcatggcccacatacttgcggttgatgacgtacttgccgtccttgttgatgagtgtggtcttgagcaccttgtcgatgtccgcaccatagatgcgcaccgcgccgcagcgctccatctcgctcatgaggcggtcggcgatgttggtaaaggcgaacacctctttttcggcgatgcacagcacattgttgtcaaagctcgcgccgtcgacgatgcgccgggccgcgtcgggcaggtccgccgtatcgtccacgatgacgggcgggttgccggggccggccgcgatgaccttcttgccggtcttcatggccacgcgcaccacggcctcgccgccggtgatgctcaaaagcgggatgtccggatgggtcatgatcgcctggccggtttccagcgtgggcaccttgaccgtggtgatcagcgccgccgggccgcccgccgacacgatggcctccaccatcaggcgcatggcctcctgcgaggcgtgcttggccgccggatgggggttaaagaccacggcgttgcccgcggcgatcatgctgatggaattgttgatgacggtggaggtggggttggtggacggggtaatcgaaccgatgaccccgaagggcgcctgctcgatgagcatcatgcccttgtcgccggtttcgcagcgggtttgcaggtcctcaatgcccggcgtgcggcggctgaccagcaggttcttctgaatcttgtcctccacgtggccgtagcccgtttcctcgtgcgccagacgcgccaggtactcggcgttgtcaatgcccgccttgcgcatggccgcgatcagctcgccgcgcttttccagcgtcatatcggccagcttggcctgggcggccttggcgttctgaaccgcttcctcggcggtatcgcacagccagcggccgctttcggccggctgcggcttgggcgcgggcgcaggcgcggcggcctcggcccggatggcgccggagagactgcgcacaatctcgtccgtaatctgcctgatttgctgttccgtcaatgccatgttcgttccctcacaaatgcccggcccatcggcccggcggtcgttatatcacgggtaccagctcgacgcccctctccgaggccgcgtcgcgggccaggggggtcaggatggcgtcgggcgcatagcggatgatcttgtagccttcacgcgccgccgtgcgcacatcgtcttcagtaatgaggcggcggctttcggcgctcagatcaaggagcgtctgccgtttgggcacaggaggcggtgggggcggtgcagagggcaccgaagcacatatgcccctcttattcgacacggcaggcgcgtcttcctttcggatcacgcggcaaagctgcccgtcggagagggcgcaggcgttggcctcgtccttgtcgatatgcgcctccatcagatgccccttgccgcatcgcacgatcacgccgtccagcgtgccgggacgcgggccctccaccacaaggctgaccacgtcgccgtccttcacgccgaaggcatcagcctcatccgtggccaggtgcaaatggcgttccgccacgatgaccccgcgggggatggtcacacgcctgtcgccgtttgtcagcgcacagccgggactgccctccagatcgcccgacatgcggatagggggcttcagacccagcttcaccgcgtcggtgaaggacaactcgatctgcgtttccttgcgggcaggtcccaccacgcgcagcgccattttgcccttttcggtttcgatggtcacgcgctcgttacaggcaaattggccgggctggaccagatctcgcattttagtcagctggtatcccgtgccgaagagcttctccacatccgcctggcacagatgcacatggcggttggaggacatcaccggcacgcagcgctggcccgtcctggccagttcgcacagcaccagccgctgcaccgcggcgcgcagttccttttcgttcataacgcccctcccttcggggggtggccggggcggacgccccggcgcagtttcttacttcttcctggcggcttcggcctcggccttctttttgaagatctccttgaggctctcgttgtagggcgggcgggcgatgccgtactcggtcacgatgccggcgataagctcattgtcggcaaagtcgaaggcggggttatagaccttcacgccctcgggcgccatgcggcgcttgtaccacatctcggtcacttcctcggcgggacgctgctcgatggtgatgtcctcgccgcgggcaatcgacatgtcgatggtggaggtggggcccagcacatagaaggggatgccgtagtacttggccagaatcgccacgccggaggtgccgatcttgttgcaggcatcgccgttggcggccacgcggtcgcagccgacgaatacggcgttgacccagccgttcttcatgacctgggaagccatgttgtcgcagataacggtggtatccacgccgtcggcctgcatctcaaaggcggacaggcgcgcgccctgaaggagcgggcgggtttcatccgtatagacgcggaagttcatgccgcgctcgcggcccaggtgaatgggggccagcgcggtgccatacttggaggtggccagctggccggcgttgcagtgggtgaggatgccgtcgccgtccttgatgagcgtcaggccatactcgccgatctgccggcacatccatacgtcctcgtccttgatggccacgctctccttgtgcagcagctccttgagctcgggaacgctcttgtccttgttgtccagcaccacctgctccatgcggttgagcgcccaggagagattgacggcggtaggacgggaggagttgaggtagtccttggcggccttgaactgagtgtagaaatcctcccagttgtcggcctgaatctgcttggcggccagatacacgccaaagcccgccgccacgccgatggcaggcgcgccgcgcacctgcaaaaggtagatggcgttccagatgtccttctggtcggtcaggctgagaatctccacctcatagggcagcttggtctggtccagaatgaccagcgcgctcttttcatcgtccagcgcgacggtttcgtagctcatgatgctcttgtcagccatggcggtttcctcccttacttggccgcttcatcggcgcgcttgacggcggcgacgaaatcggcgccggtcttgaaggccgtgcggttcatgatgtagtccttgccgcagaggatattgaccttctcggcatgggcgcgcttggcttcgtcggcgatggtggttacgtccttgacgttggccatgcccacggtgcggcggatgagctcggtgccggcgtaggcggcggtgtcggacaggatggaatccagataatattccttgaagccgggtgtcttggccatgaggtcggtcacgcactcgtcaaagcacttgaggaatttctggcagaacaggtccaccgtctcctcgatggccttgagcgcccagtcgcagaattcgtcggcgcccgcggcgcggccgttgtcccaggcaaagatcaggttggcaaccacgttgccgatgtcgtagcccatggggccgtagaaggcaaattcggggtcgaacacgcgggtggaatcctgcttcacgaagatggagccggtgtgcagatcgccgtgaatgagggactgggcattgttcatgaactcgaacttgagcttggccacggccagtttgagcgcgtcatcctcatagagctcgcggcgcacgaagtcggcgatgggcgggaagacgttgttgcggtgattgcagtcgttgtacggctcggtcaggaccagatcctcggtgatctcgcacagctcggggttgatgaagctcttgaccatggccttcttttccttgtgttccatggccacgtcggtggtcttgagcaacgtgttgaccatgtaggtggagatgtcctcggcaaagcgcgggaaggtctcgtgccgcatgagggcatagcgcatcagcgcatggtcggacaggtcctccatggcacaggcgcacatcacggtgtcgtagccgtagatcttgggcaccaggccgggggcgtacttatcctgaatctgcaggatttcactttcgatgcggttgcggtcggtggaaaccttcatgtccgccgaaatgcgcagcgcctcgcccgcctgcttgacgatgatggacttgccggtcttttcttccaccacgcggaacacgtagttgaggttgccgtcaccgatttccttgacggtcagcaccgcgtccttatcgaagtggccgggatacttggtctggacatagtcgatcacgtcggcttccttcatgagaaaataggtgtcgtaacggggcatatgcaagacttcctttctctataaaaagtgcctttttggtttcgatgccttggccgccgtcagcgaaactcgatgtttcgcaaatccagcgggtcgatctcctccagcgccctcagttcttctgcggtgggcggcggggtggtttcaatggaaaaatagcggatggggaaagcggtgttctccgccacctcgtcgatggtggtgtaaggatggacgcttttgagaatcagctgtccctgatacatggtaaacacgcacaggggggtgacgatctcgctcacgttgccctgggcggttatgaaatccaccctgggcgtaaaggtacgtcggtcatgcttggtgcgccagatgatggcgcgcttggccgtggggatgagcacggcgctgcccgcgccgcccggcaaacgcaccttcggcttctcgtagggaccgatgacggaggcgttgacattgccccggtcgtcgaactgcacgccgctcaaaaacgccacgtccagcccgccgcgcatgctcaggtcaaacacctccatcagcgggaaacccgcgcaggctgtctcccacagctccccgcccgcgctggtaaactcgcgcaaagtgggtttgacgggatcgaccccaccagggatgttgaggtgcacggcattgggcgcgtgcaggcgctttgccagcaaggtggcgatcatgggcatgtgcgaggatacgccgtgaaagaccgtatcaccatcatgaataaggcgcgccatggccaccgtcatcatatcgcagggacgaatcacagccgccttcccccttccgaaaggaagcggtccagcgcttccgcgtccttgagctccaggaaagcacgaatgaacgcgtcatccggctcatagtagccatagcacgcgccgggggctgccccgcggggcacatgcaccacggctgcggtaagaaaatgcggaatgtccgccttgcacccgccgccggagaagtacccgtcgcccacgatgcgctcggcggttacgatcaccttctgagacgcacgggagagaagcacatcctcgtatttggggccttcaaagaaggcgttgccctgcgaatcggcgatctgcgcgtgcaccacggcaaaatcaggccggatggcgcgcacggcggccagcgtctccccggtgaaggggtcggtcacgtcggcaaaatagtcgttgaccttgcgcaggtcgctcaccttaaggccgcgcaccggcatgaaggggatgccgtagctggccgcgcgcagggccgaaatcacggtgtagcaggcgtgctcgttggcgcgcaccagcccggactgcacgcttctgcggtagcgctgggccaggccatactggctttcgtagctgatgaagccggcatccaccgacgcggcgcagccggccagacacagcgcgtccacgtccatcgcgcccgcggtcttgaccacgcgcaggctgcgcttcttctggcgcaccatctcaaagacggctgccatgggcgcgcggttgagggtgttgccccccagccccacacatgcgccgtccccgatgagggagacggcctgttccagagtcgtcagcttgttcataggcacctcatttggccgcgttggcggcgatgtgcacagcgtcccaaacgcccgcaaagggcggcgcgtaagccagatccaccatgcccagctcgtcggtgctcatgccggcatggatggccacggcgaagatgtccgcgcgcagcaccgcgccccgcgctcccgccacgcacgcgcccagcagccgccgcgtgcgcgcctcatagatcagcttgatggtcagcttggccgggtccggatagtaggaggggtgatcctgcgcggtgacgagcctggtgcggtagtcaacgcccaggcgtttggcgtcggtctcgctcatacctgtgcggcccatctccaggccgcagaccttgatggcggcagtgcccagcgcgcccacgaacttgtcgtgcgccccggccatattgccgcccgcgatgcgtccgcacttgttcgccaccgtgcccagcgggatgaaatagtcctcctccatcagccggtgatagaccacggcgcagtcgccagctgcgtacacattttccagcgaggtgcgcatctcccgatccaccagaatggccccgttgcgcgccatgcggatgcccgtatcgcgcagaaagcccgtcgcgggcacaatgcccacggccatcaccaccaggtcgcagggaatatcctccccgcccgcgcgcaccacacggcggtcgccctgttcggcaatcgcctccacgcggtggcccaccagcacccgcacgccgtttttctccagctcctgagcggccaattcggaaaattcgggttcaaacggggtgagcagccgctcccccgcctcgatgagcgtgacggtcttgcccaggtgcaacagcgcctcggtcatctccacgccgatgtagccgccgcccaccaccgccacgtggtgcacgtccttgaggcgggcgatttcgcgcaggagcaggccgtcctccatggtcttcagatagaacaccgaaggcagatccgctcccggcaccttgggggccacgctgtcgcaacccacggcgatcatcagcgcgtcgtagctatcctcaaattcacggccggaatcgttgtcccgcacgcgcacgcgctttgccgccgcatccaccgacagcacctcatgatgcagaaaagtatcaatccgcatttgggcgtactgctcgcgcgtgcgggcaatcagcctgccgggatcgtcattgaagccacctatataatagggaaggccgcacgcgccgtaggagaggtatccaccgcgctcgtagacggtaatctgcgcatcgggcatcacacgcctcagcttggaggcggcggacattccggccgccacgccgccaattacgattgctttcatccgcgcgcctcctccggtgttttctttatttgatgtttttcagccgttccagcaccgcgcgggtgatggcctgaagctcggcttcatcggctgcggcgctgccgcccgcgcagccgcagggcgatgcgggctggccgtatgtcttgagggcgggaggctcgtccgccacgggactgtgtcccgccaccacgtccacggtgttggtggctttggccgtgcagggcgggataccgccgctggtgatgcccatcttcttgcggatttcaatcagttcgcccacctgctcgcagctgagcacattggccttgccgatgatgttgcccgtgtacatgatgaccatggcatagtgctccgtggactccaggcggtaccacgcttccatcagcgatccgccccacgccaccgcgccgtgattggccaggagcagggcgttataatcgcggcaatagggcgcgatgctgtccgggatgccctgagagccgggtgcttcatagtgtacgcagggcacggtgcccaaattgaccaaagcctcgggatagatggccttgtccaggccgatccccgcgatggcaaaagaggtgctgataggcggatgggcgtggcatacgccgcgaacctccgggttttcattatagatgcgcagatgcatctttacttcgctggacgggccgcgctccccctgggagagcaccgtgccatccaggcgcatcttgaccatcatgtcctccgacatgaagcccttggacacgcccgtgggggtggtccagatgatgtcgtcatccaccttgcagctgatattgccatcgttggcggccacaaagttcttctgatacatcctgcggccgatctccacaatcagctttttcgcctcgtcatccgttggatagcgatggatgctttgcatcttcttcacctgcttttatttttttcaatccgcaccattccatggcgtgcggccgtttagcgtctgtttatgcctaaaccggcctcatgccgctacgcacttattatagagtgagcgtttatcaatgtcaacacttgtttcaaaaaaacttgccgtttcgtcataaacactaaacaaggtgattttatgaatttatgtataacatttatcacatatacacagtttttttgccggattgccgcaactaaacagttaaaataaacgattctaaaaaatattctaaaacaccgcttgacttttcacctgaatggctctatactgatgtcagcaaagggcgatagtttaccgtattcgcccaaaagtgaataggaggtttaccatgaaaaagatcgtagctctggttctggctctcatgctggcgctgtccatgctgaccgttgccaccgctgaaacggccaatcccgttgccggcaagaaggtagcgtatatcatgctgctgccctccgccaccatcttccagatgtggaaggattcctgcgccgacctgtgcgccgcgctggatgttgagttcgacttctacttctgcgacggtgacttcaaccgctggatggacaccatcaacacctgtgccgccgccggctatgacggactgctcgtcagccacggcaaccaggacggctcctatgtgttcctcaaggagctgaccgagaactaccccgacctcaagctggtgtgcttcgacacccagttctacaccgacggcgagtatcagaagatcgagggcgtgacccagctgttccagcaggacaagagcctggtcaccgttctgctcgacgagatgatcgccaagttcggcgagggcgtgcgtctggtcaaggtatggcgcggccccaactacaacagcccgttcgaccgccgcgaggttggctggcaggagtacgaggaagccggcaagatcgtgaccgtgggcgaaatccagcccctgcaggacagcgttgacagcgccaacagcgtgaccgccgcctatctgcagagcctcaaccgcgaggatgtggacggcgtcatcgcctactacgacctctatggccagggcgtgtacaacgcgatcttcgagaacgccaacttcaacggtgaggccggcgaggccctgcccatggcgtccgtggatatcgaccaggtggacgtgaccaacatgcagacccgccccgacatctggtacgcagccggcaccaccgactggaccctcaacggcgagatcgccatgcgcctgctcttgctggagctggccggcgagtacgacaagatctatgaccccgccaccggcgagtacggcgtggacgtggttgagatccctggcagcgccatcctggcctccgccctcaaggaagacagcaccgttgagaatctcggcgaaatcgccggcgagacctacggcaacctgagctacctgtctgtggccgactggatgcccgccgacctgctgcacaagtaagcctccgcagcaattcataacccattcgagcaatgtttcttgacaaagaagcgtcggagtatttgctccggcgcttcttccctgaaagcctcccgaccgcttgtagtgaatgagagaagagggaaatccatggacaaactaacacttggaacccgcaaggtatccatcgaatttcccggtgtaaaggcgttaaccaatgtagactttgaagtcagcaccggtgagattcacgcgctcgtaggcgccaacggagcgggcaagtccaccctgatgaaggtccttgcgggtgcgaatccggattatacaggcgaagtgtacctcaacggcaagcccgtcgagctgcgctccaccatggccgccaagaagctgggaattcagatcgtctaccaggaggtggacatggcgctggtccccacgctttcggttgccgaaaacgtcatgctcaacgatatggtcatgagcgccggcagcaatcccctcgtcaactggcccaagctgcgcacgcaggccaaggccgtgctggaccggctgaatatcaatgtaaacgtgcgtacgctggtgcaggacctgtcccttgcgcaaaagcagatggtcctgatcgccagagccatagccaacgaatgcaatttcctgatccttgacgagccgaccgctccgcttagcgacacggaaaccgccgagcttttccggctggtcaagcaccttcaggaaacggagaatatcgccattatttttatttcccaccgcatcaacgagatcatccagatctgtgaaagctacaccgtgatgcgcaacggcgaaatcgtggatacctcccccatcacgccccagaccaccacccgcgagattgtggaaaagatgctgggccgctcgtttgaggaaaacttcccgaaagagcacgtgcccatcggcgaaaaggtgttcgaggtcgaaaacctttccggcgcggacggcaaggtcaacgatgtgtccttctatgtgcgcaggggtgaaatcgtggggatcgcgggcctggtcggagccggcaaatccgagctgtgcaagaccatcttcggcgcctacgaacgcacggccggcaccgtgcgcctaaacggcgaggaactgaagatcaagaatccctctcacgcggtgaaaagccgcattgctctggtacccgaggagcggcgcaaggaaggcgtgctggtaaatgaaaatgtcagcttcaacctttccgccgcctcactgagccgcttttgcaaagcgtcgttcatcctcaaaaacaaggtggacagcaatgcgcgccagtacgtgaatgacctgggcatcgccaccccgtcgatcaagcagtacgtgaagaatctttccggcggcaaccagcagaaggtggccgtgggcaaatggatggccgcggactgcgacgtgtacatcttcgacgagccgaccaagggcgtggacgtgggcgccaagcaggacatcttccgtctgatcaacgacatcaccaagcgcggcagcagcgtgatctatgcctcgtgtgaaaactccgagctgttgtccatcacggaccgtatctacgtgctctatgatggtcacatcatggcggagctggaaaccgccaaaaccaacgaggatgagatcatgcactacgccgtgggcagcaccacaaagtacgcctgaccgcagggcaggctataacaggagggcattccgttatgcaagcaacgttgaaaccaaatccgctggcgacaaagcaaaacaagactttcctccgcttcctgctggactgggcggccgtcatcacgctggtgctgtgctttgtggtgttcaccctgctcaagggcaaccgcttcatgtccgtcaacaacatgatcaacatcctgcgcgccatgtccatcaccacggtgttcggcattgcggccacggtgaccatggcccccgacggctttgacatgtcggcctgtacgctggccagctgctcggcgtatgtgttcgtgagcatgtacctgtggtacggcctgccgctgtgggcctgtgtcgcggtgtgcatcctcgtgacactggtgatgtatcagctgaccatgttcctcattctggtctgcaaaatccccgacatgctggctacctgcgcattgatgttcgtgcatcagggcctgggccagtggtatatcggcggcggcgctgtctccaccggcatgcgcctgcccagcggcgcttcccccgtgcgcaccaagctggaggcttccttcagcgccatcggccgcgagccctggctgatcatcatcatgctggcgtgcgtgctggtggcctacatcttcctggagtacaccaagcatggccgcttcatctacgccatgggcggcaacaagcaggctgccaagctcagcggcatcaacgtcaagggctatcgctacctggccggcatgatcaccgcggtgttcatcgccatcggcggcattttggtctcctcccgcggctcttccgcgcaggtcatgtgctgcgacgattacctgatgcagtcgctggccgccgtattcgtaggccgttccgtgggcggtgcggagaagccgaacgcgctcggcacgctgattggcgccatgctggtgtccacgctggaaaacggcctgaccatctgcgccgtgccttactacgtgctgcccgccgtgaagggcgccgtgctggccctggccttggtcgcggcctacgctaccaagaaggatcagtaactcactttcaaagtcatgcgataggcatgcgagggaaacgccccggcgagattcgccggggcgtttctttgcagtttctggggctttctctacaccagcgtatccttgatcttctcgaattcctcgcggctgatgagcacctcgcggggcttgctgcctacggacttgctcacgatgccgcgcgcagccatgtcgtcgatcagacggcccgcacgggcgtagccgatcttcatgcggcgctggagcatgctgatgctggcctgtccatcattaatcaccatgtcgatggcttccagcaggcggtcatccgcgccgctttcttcgtcattgtccgccagggggccgcccgcgccgtcgtcgctctccatggcctcaattacattggggtcaaagtccacatgcgaatgctgggcgatatagctcaccacgcgctccgtctccgcgtcgctcaggaagcagccctgcacgcggatgggcgcgctggcccccgtggggaagtagaacatgtcgccccggcccagcagcttttccgcgccgttctgatccaggatggtacggctgtcgatgctggaggataccgcaaaggcgatgcgcgagggcacgttggccttgatgaggccggtgatgacgtccacggtgggacgctgcgtggccacaaccatgtggatgcctgccgcgcgcgcgagctgcgcaatgcggatgatgctctcttccacttctttcttgcaggcgagcatgaggtcggccagctcgtcaataatgatgacgatgcggggaagcttttcctcgccggggccgagcttggcgttataggcggagagctcgcgcacattcttggactgcatcttgtggtagcggtccagcatttcggccacggcccattgcagcgcgccggcggccttgtgcgggtcgctcaccacggggataagcaggtgcggcacgacgttgtagcattgcagctcgaccaccttggggtcgatcatgatcatgcgcacctcttccggcgaggagcggaacagaatggaattgatgatggcattgatgcagacggatttgccgctgcccgtctgaccggcgatgagcagatgcggcatcttggccagatcgcagatgacggcgcgtcccgcgatgtcgcgtcccagcgccacggccaggggtgacttggcggattgcatttcggggcttaagagcacctcagccagcgacacgctctgaatttccttgttgggaatttccacgccaaagaggttggtgccgggaatgggaatctcgatgcgcaccccgccgttggccgccatgtccagagcgatattgtcggcaatgctcatgatacgcttgacgttgacgccgcttgataccagccccagctcgaagcgggtgacggcgggaccatgggtcacgcgctgcacgcgcgcgggaatgccgaagctctccagcgtcttttccagccgggtggcatctgccgtgtcctgggcacgggtatccgtagtggcgtgccgctgctgcgcgttcagcaggtcgatggacggataggcatagggcgtatgctgcacgggacggggctcattggcaggcggctcaggcctgggctggccggcagggcgcttgtaggccgcattgcggtcctctgtgggctttgcctgggatggctgcggcacggtttgtgacgcctgcggagctgccgcaggctcctgcgcagcgggcggattgggctgggcctgcgcaggcgcgaccggtacgatgggggtgggcgccatctgcggcggcacttcggcatacgtcgcctcattcccgtccccccccacgctgccggcgatctccgccttgcggcggcggatttcctcgatgcggtccatggccttgcgcttggacgcggacataatcagcgtatcaggcagtggggtttccgtggtatctgctcccatttcactgggagtaaaggtcatgcgggtctgatactgcttttctttcttctcttttttgccctttccctcggccttgcgccagggaagctgccgtccctccggaatgatcaattcatcataaatttccggctgcgcgggcggctgaggatataccggcggcatgccatagggatagaccggcatccctccctggggcatgggcggcggctgcataagcatgctgccatagggcggatagaccggcgcttcctgtgcaggggctcccgtctccccccggcggcggaaagcgggcgaaagcatgcggcgatcgtcctcctgctccctaaggcgctggtcctccagctgctcctggtattcgcgctgggcgcgctgctgctgaatattctgccttcgtgcctgccagccgtcgcgcacgctttccaccatctgtatcatgtcaaaacgggaaaccagcagcacacaggccgcacagaccgcgcccagcgccaccgtgccgagcaccgtgcccagaaaggtccaggccggccagcccagcaccatgcccagcgcgccgccaaatgcaccgctggagccgcacacgttaaaggcagcgcaaatcatgttccagtatcccgacgcttccgttgtggggagcgcggcctgattgttatacttgaccaggtaggcgggaagcgtatcctgtcctacgcggctgaccagatcgatgatgcccagcacagaaaaaaacagcagcgtaaagagcaaaaatccccgcttgggcatactgcggccggaggaaaatgccaccagcacccctgcccagatcagcatcacgctcacgcccaggcaaagtccgccgcccaggccctgcatgacgcgcttcaccatggagaaaagcgtgcccttcagcccgcccaccaccgccaggagcgataccacgcccagcgcgatgagcaggatgcccgccaccgcgaacgccgccagcgtacccgattcatattgtgcggcggcttttttgctctttgccatgaatgtcctttcctccgttacttgccaagctgcacggcacgcagcacgccgtccgtatcggcgtgaagcctgagctcgtgctccccaaaatgataaatatcgctttctcccacaggcaggccgtagtcataggccatgctgtcggtaaaggtcatggtttcatcgggctcgcccaaaatggcgtgccagtcctcccgcacagcctgtccaatcagcaggccgcacagatcgccgcggcgcatctgtacaccctctaccacggacgctccatagccgctctgaatggcgtcggagatgaccagtatctcgcggaaggccgggtcttccagcacgtaatagcgcccgccgggaaactcgtccggcgttcgcagcaggcggtagcggtccaccacgtcggtcatgcggtcgcccagcgtaacaggcacatggggcagcttgccctcggtaaccgcatcctcgatggccttgcgggcttcctgctgggacagaggggcctgtaccgcgccgatctgtgcgggcacggcatcctcctccgtcaggaggaacggcgcaagctcgctgtagaaaaactggcaggcgccgctgcagccgctcatcaggcgcagctgatcggacgggtaccagaaggtaatgccgccggcatccaaggtaaaggcctctcgcggcaggggcgtgatatcgctgtattccatatagccgctcagctcctgccccaggctttcctccgcggcagcctccatccacgcgaccgccgcacccacgtcctcaaaaagcgcgtccagcgtgagccgctcgccggtggccagatcataggtcagggcggaataggcctgtccctcatgaccatccggcattttaccctgggcgttgatcacagcggaaaacacgtcctcacccagcaatttcacctggtagtccaccttcaaaccccaggggctgtcccccagcgtggccagcgtgaccagatgattggccacgccggaggaaagcacgatgtcgtcattgatctttttctgcacggcctcgtccgccatgcccgtaagctggggataggccacataattctccccgatctgcgtacgtacctcgtccacctgggtctgggccagggcaggtgcagccaacgccagcagcaacagcaggatacacagcatttttcgcatggcggtcacttccttccggcgattcttttgcatcgtatagtttacaacgaaatcaattttattgcaagtttgttacaacatttccccatgcaggacaggttttgacagagatgactggtttaatgcaaggtaggggcctctccctctgcgccgtaagacagcatgggctgcatctgcacgccggacagcgccgccgcgatggtgcgcggaatctggctgaaatccgccaccagcgaccggggcttcttcaccgggtcatcctgaccgaagggcacaaagtaaatattgcgcacgttgaggaggcggccgatattctgcgccgccgcgcccagcccgtcattggtggatacggccagcaccagaggccggtcattgcgcaggtggctcttggcccccagcaggacgggcgtatcatagataccgccggccagctttgccaggctgttacccgtggccggggcgatgagaaacacgtcggtcattttcttgggcccgataggctcggccccggccaatgtatcaatgggctcgttgccggtgatctccacgatgcgcgcgcgcaggtgctccgccgtcatgaagcgcgtatccagcattcctgcgttaaaggacagcacaggcaccacctcatatccgcgccgcaccagcgcctccatctgcttgagcacccgttcaaaggtgcaaaaggaacccgtcatggcaaatccgatgctggtctttttcatagcgaagcctcccggagcaattccatactgacctgtttgagtgcgcgcgcagcgctcctgggtgcgtagcgtgcgggcaaggcgggcaggacctcgacgttcagccccatcgccgcggctgcgtcgcgatcaaagccatagggggcgctggccagttccaaaagccacgcgcccttgggcagagcagcgagcgcctccgtccccagtacacgggcagggatggtattgagcaccatgtccacccggcccatcagggcaggcaactccgcaagggacgcggcgcgcatgccgtcgcttctggcggcaagccgctgttcctcgcggcgggcggccacccatacgtccgcgcccagcatcttgagctttgccgccagcgcgcggccaaaccgcccatagcccgtcaccagcaccgttatatccggcagcgcgtctccggtgcggcccatcgcctgtaccagcgccccctcggcggacaggtccgcattgcggtccaggaaggtcgggctgctctcatacaggaacagccggaaccgcttcgcacgtgtctccggcgcctccaggcaggctcccaggcccgcgcccgccagcagcaccgcgtccggccgcgcactttccagcacgtcttccggatgcagggtcaatcctgtgagtgtgggaacgcgcccgtcccggactgcgaaggggtagggaaagagcagggcctccgccggcgcgataccggcctctttctcatccccggaaaccaggcccaacgtggatacggcgaacccgtccccggccagcatgcgcgccatgcgcagcatgcggccatcgccgccggccaccaacagttttctcagcaaaaaaaccgcctcccgccgatgcatgatactgcatcctatgcgggaggcggaaagggggtgcgcctcagagcgcatgagagatcgaatcggaaagggtctgctcctggccgcagagggtcattttcagcggttttccctgaagcagctccaccagtgcctggcccgggcgcacgctcacgcggatcacgcggccgcggtaatggaactggaaggcatagccctgccaggcatcaggcaaaaacggcgacaggctcaggccgtcggtggtacgcatacccgcaaagccgtgcgctatggccagccagctgcctgccatgctggtgatgtgcaggccgtcgtcggtatcgttgttgatgttgtccaggtcgaggcgggcggtgcgctggtacatctccacggccttctggcgatatcccagctgagccgccagaatgctgtgtacacagggcgacaggctgctctcatgcacggtcatgggctcatagaaatcaaagttgcggcgaatggtctccacgtcgtagagatgattgaggaagtacaatccctgcagcacatccgcctgtttgataaagcagctgcgcaggatatggtcccacgaccagtgctggttgatgggccgctccccggcgggaatgtccgaggcgggcatcagttccttgtccaggaaggtgtcatgctgcacaaaaatgcccagttccgcatcctccggatagtacatcttttccaccacgtcaaccatgtgcgcaagctcgtcctctgtgatggccagctcccggcggcgctcctgcgacgcacggcgcgcctgggtgacgaacagcccaatgctccaggccgcgatgcggttggtgtaccagttgttgttgacgttgttctcatattcattggggccagtgacgccatgaatcatgtatttgccatgtcgattggaaaaatgcacgcggtcggtgtagaaccgggcaacgccgcacagcacgtccaatccctcgcgcagcatgtagtccatgtcgccggtataggtggcatagttgaagatggcatgggcgatggcgccgtttcgatggatctcctcaaaggtgatctcccattcgttgtggcactccacgccggtaaaggtcaccatgggatacagcgcgcccttcaggccctgctgccgcgcgttgtggtaggcgccgtccagctgaagccagcggtagagcagcagctgcttggccacgtcctgaccggcgatggccatatagaccggcaggcagtatgcctcggtatcccagtaggtggcgccgccgtatttttcgccggtgaagcccttgggtccgatgttgaggcgcgcatcatcgcccgaataggtgctgagcagctggaagaggttgaagcggatgccctgctgggccgcgtcgtcgccctgaatggtcacgtcgcagcccgcccagcggtcgcgccaggccgcggtgtgcgcatcgcgcagcgcgtcataccccacctcgcgagcgcgcgcggcggccttgagcgacagggtgctcagcaccttttcgtcatagtcgcggctggtgaagcacagggcgtacttttccataacgacgtcctcacccgccgccacgtccccctcgtagcgggtttccacatacccgctgtccagcctgcgcccggccatctccagcccgtccgcccagcagctcatggcggcgctgacggcaaagcgcggcgtgccgaagggattctccttcgttttggtcaaaagggccagcgcatcctcggtttcttcttcctccagcatatcccagaaggtttcttcataattgctgtccaggttgcgcacgttggcatccagatacgggcgcatcaccacgtgtgcgtcataatccggcgtgaggtggtagcgcacggccagcagttccttctgcgccagcgatacgaagcgctccgcctccacctgcacgctgccccctgccgtgcgcacggtgaagcggcgcaaaaacaggccgttttgcatatccagttcccggtaaaacacctctacctgcgcagtgttcaaatccagcgtctcgccatccacctccacatggatgccgtttaggcgcacggcgttgatcaccttgccgaaatacagcggatatccgtttttccaccagcccacccgcgtcttgtcgggaaaccacacgccgccgatgtaggtgcctagatgggtgtcgcctgtgtagtcttcctcaaagtttccgcgcatgcccatatagccgtttcccgtggaggtgaggctttcggacaggcgcatgcgctccttgtcgagtcccgtttccacaaccttccagggatgaatctcaaagctcatcacagcgttctcctttcccttgtgcaatcgtttgtacgttttttctatcgtactgtatgggaagcggattgtcaaggggcagtttgcggcgcgcccacagcaacgggccaaataccagcaccagacaggccagcccggcgggggcgtaaaggccatccacaatgccttcaaagcccaccagcgataccgccagcggcggtcccagggtcaatgcggcacgcagggatcggccgcacccctgcgccgccccgtccagtgcgcacagcaccgccgccagcgacgtaaacaccgccagaaacagcagtcccgcgctgatgagaaagccggtccgtccaaactgcgccagcagccgcacgatggggaaagcctcgcccagcaggcccggctgccgctggtatacgctgtcgctgagcataagcagcgcggccaacgtcacgcccagtcccgagcacagaaacgccgtccggcgcgccgttccctgtgcgcagcggcatactaccccaatggccagtgcaaggttcatggacgcgtaagcaacggcgcgccccgctgcccggaaaagggattccggctcgcgtgaaagcagtgcgacagaggccgcgcttccgtccatgcgcacggccagcagcgcggccaccagcgccgccatcagcagtccgctgatccagcccaacgccctcaggccgcgccgcccgaccatccatgctgtcaacagtgtgcccaccgcaccgatgggatatgcccattcgcttgcccacagcagcatggccagccagccggaagccgaaatcatggcgccgcccgtcactgccagcatcatggcagcgcacaggcgcgcgcctatgcgcacccacggaggcatgccctcatacaggtcccaccagcgatccgtgccgcgccgccgcgcaacgtccatacacagggcgcacagcagcgccagtgtcatggccgacagcggaatcagccaccgggcgtgcacaccgtagcgtgtaaaaaaggcgaccacttcccgcccggacgcaaatccggcccccacgatcgcgcccaggcacgccgccattcccgcggcgccgccgtttttcgccatgcaagcatccctccccgcatatggcagggtatgcataaagcgggccggggcatgacgcgccgctatatggcacgggacccgcgagcgatcttcgcgagcccctttcttgcctcatggcagcttttcttacttttccatcccctgacagtcaagcgcctgtgccagggcatagcgctggatggcatgggccacgccgtcctcgtcattgctgagggtacggtatcgggctgccgcgcgcgcccgctcgctcgcgtttgccatggccacgctcacccccgcatacgaaagcatgctcacatcgttgtcgtagtcgcccagggccatcacgctctccggtccgatgcccagcctttgcgccagcgcggccaccgccatgcccttgttcactcccgcgggcatcagttccagattcatgctccaggagctggttacatccaatccgggcagggcagacagcgcctgccggacgcgctccagcttctcctcatcccgagccatgcacaggagcttattcaccccctgcgcgcgcagggcgtcaagccccgccatgccatagagatattgaggagcgaagcggccgcaggtatacgtgccccaaaaatcgtcatccacctgaaaatcgcccttgaagatagccaggcgattctgggcaaagcatccaaagggaaagcgcgcgcggcgcagaatcgccactgccgcttccagcgtggcgttctcaagaggatggttgaaaaactcgccctccatacatcgtttcaggcaataggctccattgagcgacaggatggcacagtcgggcaggccggcttcgtcaaggaacattgccacatcgccgggcaggcggccgctgcagatggccaggtgaatcccggctgcctgcgcctttcgcaacgccgccaggtttcccggtgtgaggcgctgacgcgaatccagcagtgtgccgtccatgtccatggcaatcagagaaacgggcttgtcatgcatgtgcttcttctcccatcaaaacgagggggctgcggtaaaggtacgcccatttaagtaggccagcggcccggaggtttgcagcgtgagcgacacggcgcatagcataagccgacgggccttcatcgcgcggttgaaatcccggtcgccatactggtcgtcgcccagaagcggatggccgatgaaagccatatgcgcacggatctgatgagtgcggcccgtgtgcagcctgacgcgcaggcgggcgcagtcgccccgctccagtacgtcgtattcggttatgatgcgcttggccccctccgcctcgcgggcgagcacccgcacgcgcgcgtggagcgcgtccttgacaagccaggcctccagcaccgcatggtgcggactgggcgtgccgcgtacaaggcactcatactccttgcgcacctcgccccgacggaacgcatcctgtgcggcctgctgcgcctccggcgtgcgagccagcatcagcaatccctccgtggggttatccaggcggtgacaaagtagcggctcggcagttccggggccgagctgttcgcacaggagttggggaaacgtcttgccgcccctgcggtccggctcgcagctgacgcccgcgggcttgaccgctaccagcacattttcatcctgatagacaacaggcacggttttgacccgtgcctcgtcggtatagatgcacacctgcgtaccggggctggccatggcggagaggtccacccgatggccatcgaccttcacatctcgtttttgaaaagcgcggcgcaacgcataagccggaacctgcggaagcatccggcaggcgcagggaaacagccttgttccctgcgcgttttccggcacggtaaaatcatagcgtttcatcttctcatcagtgcgaaagcgccgtcttcaggcccatccagtgcggcgtgcacagatagaggcgttccagcgcgtccttcatggcccgcgtcggcagaaccgccaacatcgaggccatcacattctccatttccttcagtcccacgccctgcttagccagcatgcgcagatcctcggcagcctcgcccagctcgtattcggggcgaagagcaccgttgagcgcaccacacagggcctcgttgagcggctgctcctccgggaggatgccgttcatgcccccggcaatcatctcctgggacagttccagcgtaaagatgccgccatccgcgcgctcgccgcccaccaggcggtaagggtcggccaggcccggatgcaggaggatcaaatcgccattggcgtcggtgacgtattcgaaagaagcctgcagatagcgccgggcgatctgcatggcaagggggccgtcctcacgcatcacgtcgtgcatgaagaagccgatcggctgtgccgagtgcaacagccccgcgatatagagcaggccatggatggtcgcatcatagcgaagcaggcgctcgcgcgctccttgcgcttcttccgcagcgatagcgcgcgccagtggatcatgcaacgcctgtggcagaagcagcgtccagtcatcgccctcggcatgaaagctgcaccacaggcggctgaccagcgcttccgccgcgcccagatcatcccagtcgcccaaaagcagctcgccgtcgttgatgagcaggcgctccaccagctgcatctcgcccgcgctgatatagagcgcctccttgggcagacgctccatcacggcggcacgcagcccctccagcgtcgccagcgtatggcggctcttgccgcccacatcgtcaaacgagccggccagcagggcctgcgcatccgcctcggtggcctccggcgcaaacaaccccaccccaggatgggcaaaaaggcggcgctcgcatgcctcaaactgtttttcgcgcatcatgctcatggtcatctcgcaccaatccgcatgaagggtcacttctctgagcacgcggcgaccccctttcccctctgctcaggtgtatgatttatttcagatggacaacccagcccatgggatcttccgtcttgccgaactggatgcccgtgagcacgtcgtacagctgctgggtgatatggccgatgccgccgtctccgatgccgatctcctcgccctggaagcggatcttgttcacgggagaaaccaccgcggcggtgccggtgccaaacgcctccgtcacacggccggccttgatgtcggcgatcacgtcatggatgtccatccgggcttcttcggtttcatagcccaggtgcttgcccagcttgagcacgctgtcgcgcgtgatgccgggaaggatgctgccgttgaggacgggcgtgacgatcctgcggtcctcatagacgaacatcatgttcatcgcgcccacttcctcaatgtagcgctgatgcacgccatccagccacagcacctgcgcatagccgatgtgcttggcgttcatgccggccagaatgctggccgcgtagttgccgccggtcttggcaaagccgatgccgccgcgcacggcgcgcacataggaatcctccacatagatgcccaccggagccaggcccgaagcgtagtaagcgccggaaggcgacaaaatgacatagtacagatacgtgctggaggtggatacgcccagatgattgtcggtagcgatcatcgtggggcggatgtagagggaggtgccctcctgatggggggtccattccttgtccacgtccagaagcgccagcagcgtttcaaggccgtcctccaccggaagaggcgccatgcccatgcgctcagcgctgcgggcgaagcgttcaaaattggcgcgggggcggaagaggttgaagccgccctgcggcgtgcggtagcacttgaggccctcaaagatctcctgcccatagtgcagcacctggcaggcagggtccagcgaaaggttgccgtaaggcacgatgcgggcgtcgtgccagcccttgccgtcggtgtagttgatcataagcatatggtcggtgaagatgtggccaaagcccagcttgctctcatcggccggcttgtctttcagattccgggacagattcatttgtacgttcataccgcttcttcctccacatcttcctgcattcccaaggaaagcaagatcatttcagcgcccagacgctaacccttattataacccctgtgcggcggctgtcaaggttttggccgatgcaattcgtgggagaggcggggcccctcccccacgccaaccaaaaaggaccgctgacgcagccgtcagcggtccatgcccaaagccgcggtatcagcccagggacttggtttcggtgatctcgcacaggatggtggagccgccctcctcgatctccagcgcagccagaacctcggcatcggtcacgacggtgaaacgcatccgcgcgccggacacggcgtagagctcatcctcctcgccgccggcgggcgtggcggcatacacggccaggccttcgccgttggtcagcagattctgacggctctggttctcggccaggcccatcttgaggtaatacttgccgtccagctccgcgcagccatagatgaaatagcctgcgttggcgctgccgtcagggttggtggtgcacaccaggtagaatccggagaaggagttgatggcattcatcagctcatcgccggtgagggcattgtctccatagaaatcggtcaccgacgcgctggtaaaggcatccacctcagccagggcaggggcgcaggccagcagggccgccattacgagcatcacaaggcgcagcgtcatctttttcatgggaaccgcacatcctttctgttttggaccgggctttggcaaacccgtcgtttttctattataccatacctgcttcctgccggacaagcctcaatccccgcatacgacatgcacggtgctgccgcccgcgggtgcggcgcgtacctcaattttcctttctatgcaatccttgagcgcggccacgtgcgaaatcacgccgaccagccgctgcccgccggccagctcctggagcacatgaagcgcgcggagcaggctttcctcatccagcgtgccgaagccttcgtcgatgaacagcgtatccagccgcacgccaccgcgccgcgcctgcaccacgtcggcaaagcccagcgccatggccagcgacgccagaaacgattctccgccggagagcgtgcccacgtcgcgcaccttgccggtgtggcggtccagcacgtccagcgccagacccgccttgccgcccagcccttcctcctgcttctggcacaggctgaaccgtccttccgacatgcgcgacagccgtgcattggccgcgataattacgcggcgaaaataatattgcagcaggtagttttccaacgggatcttcctggctccgcgcacattgcccgatgctgtgcggtacaggtcgtccagcacgccgaattcctccagcttctcccccgcctcccgcactgctttctccagctgtggcagcagccggctgttatgcgaaaggcgcgcatccgcctccttctcctgcctaagcagcgcctcggcacgggcgctgagggcctccgttcgggccttgagcgcctctccgtccacaggctgcttgccctcccacatcgcggccaggctggccaatgccgcctccgcggccgaaagcgcgtttccatactgcgtgaggcgggctgccatggcgttttcctcccgttcctccaccagcgcggcacggtaggcggcctcgccgtcgaagccttcgtcgccccgcgcattttgaaacgccgccgccgcggtctgagctgcctcctgctgcgccgcccgctcgctccggctgccgctgagcacggcacgggcggcctcaagggcgctgcgggccgcctgctgcccgcgctgcgcctcctcaatgctctggcgcagctcgtcgatcaggcggctgaagcgcgcgtgcttttcccggcattccgcctccagcgcgtcatcgggcgccctgccgccgatcacaccggtcagccgctcgcgcaggtgctccagatcgcttcgcgccgcggcgcaatcctctccggcccggccggcgacgcggtcggtttcgtctcgccgggcagcggcggcgtccacctgcgccttatcaggcgcggcatccagatgcttcgcgcgggcaggatgctcgcgggagccgcacacggggcacggctgaccattttggagcaggtcggccagcacgccggcctgatccgccagataagcggcggacacctccgcataacgggccgccgcggcctcccgtgcctccagcgcacgggccagcgcagcggcgcgcttttccatcgtttcggctgcctttcgatgcgcggcaaacaggggaagcacctcggaaaggcggtcccgcttgcgccgcagttcctccatgcgttcctgccagatctgtacctgcgcggcgcgctcccctgctttccgctctgcggcctcggcctgcgtggcggcagcctcctgctcccgaatccgcccatccagtgcaaccagccgcgcctgttcccgctgggcagcctcttccagccggcgcacggcgcgggcgcggcgcgcccggtcaagcgtctccttcagcgcgtccatttccggcttctgcgagcgcagggcaagcgtttcctcgcgcttctctgccaggctctttacgccccgattgtgcgcctgcgcattggccagagcggcctctgcctcacgcagatcgccctgcgcctgctcgcgcatccggcacgccacttgcagcgcttcccggtcggcggcctcctgcgtgcgcagggcgtccagcatccgggagccgtaaacgctggcggaggctggctccccccattccggcgggctgtccgcggcggcctgtgcggcgagcgcggcataggcggcctgcgccttatccaatccggcctgcgcttgagcgcgacggtcgcgcagaacctgcgtaatatcttcataaagctgggtatcaaagatgcggcggaagatcagcgcgcgtttctggctgtccgcacggagaatggagagaaaatccccctgggcgatcatggccacctgcgcaaactgcgccgcgtccagccccagcaattcctccaccgccgcgttgaccgcgtcgatgcgggcataaacggtcccatcctcgcagacgagctccgcctcggccgggcgcggcgttttgcgtccgggcttgagatattcggggcttcgccgcacggtccactgccggccgccactttcaaaggtaaatcggacccaggtttcgtccgccgggcttgcgaaatcgctgcggaagctcttggcgctgcggcgcctggttccgccggaggccactccgtagagcgcaaaggaaatggcgtcaaacagcgtggtcttgccagcgcccgtatccccggtaatcaaaaacaggccgctttcacccagcagggtaaaatccaccgtctccagccccgcataggggccaaaggcgctcatttcaagcctgaccggcctcatgccgtttcgcctccgcttcctcaatcacttgccgcatcacgcggagccgccgctcatcgggcggcgtgccgttattctgcatctggtagaaggccgtgaaatgctccagcggcgtgtgcctctccgccgcttccacctctgcttccgcctgcgcgaggccgtcgtttgtgcggctattgcgcacccgcatgccaatcaggttgggataggtgatgcgcagcgcccccaccgggtccgccagcgcctcctcgtcggtcagctcggcatagacgtagtcctcgctgaagcattccggctcagtcaattccttgagcgcaccccgaaccgtgcgcagatctcgcaggggcgcaaagggatgctcctccacgccgcgcagtccctccggccccaggtccaccaccagcgcggccttacgctgccgctcctccgacagtgagtacttcagcggcgacccgcagtaacgcacccgcccgccgcacagcttttgcggggaatgcaaatggcccagcgccacatagtcaaatccgtcaaagagcgaggcgctcacctgatccgtcccgcccagcgagaggatttccgaatcgcaggtcgcggcgccggtgacatactgatgtgcaaccagcacatgcctcatgtccggttcccgcgccacggtggacagcgccgcccgtaccgcgtcctcaaaggtgcgaacgttctcgaaatatggccgtacggcggagggacgcaaaaacggcatcagccacacgcgcacctccccgtacgcatcgcgcagggtatggccatgcagcgccccgtcaaaggccggagagagaaacactccgcaccggcccagcagctcatggcaataagccacctgttcgggcgcgtcgtgattcccgctgacggcaaagacgggctttcccaggccacggagcgccaccaggaaatcgctcacgacgcggatggcctccgccgggggctggggcttgtcgtagagatcgcccgcaagcagcactgcgtcgcattcttcagccagtttcaccgcctggcccagcacggtccgttggtcctccagcagactgaaaccattgagcctgcgcccgatatgcaaatcggacagatgcaaaaaacgcatgaggcccctcccttccgcccaggcccaaaggccggcagggctatggtacctcttttttttcgaaaagacaatacgcgcgtatcttcccttttcagcgcaaatgttgtagaatagatcagaaaagcagcttttccaaagaggagcggatggccgtgatcgagcttgtcatcaatcccgtggccggtaaggggcgcgcgttgcgcatcggcgaggaagcggccgcgctgctcaaaagccacggcat

SEQ ID NO: 2193 - DNA, 5664 bp, Unknown
  16S sequences of unknown bacteria
ccgttcatcattcccgttccaacaacttacctatgagacccctccattggctttcgctcattgagttcattgtccaatgtttgacaaacctacatgtttttaaaacagtcaattttttccagagaaagcatcaaaaatacaccgtgcaggaaaaatctaaaagcattatgatgctgacagaaaaaaagggaggaatgttcatgccgggcgctaccaattggaaaaatctttttttggaggaatatcagcagcttcgtgaggaaggctatcccgtaggagacgctcctgcggagcaatcccgctaccttcccattgccggtcattctcaggagacccattcggaggacgacgccttttggaagtcggcctatgaaactctctgggcggttcgtaaaaaaggccttcggacggattatccctatgaagagccagatgaggctcaccaaatttttgcgtttgcgtcatccgtccccgccgtcctatttcaggaaaaaagttacgacgaccggctgtccggcgcgtggtatggccgctgtgctgcggtcgtactggggaagcccctggaaatgggcttcgatgaccaagcaatcagaaaatatctggaaagcgtaaatgcctatccgttaaacgactgggtaccggaatattctcctgttctcgatcttcgccttcgggaggactgcattccctccacccgcggccatgtgacctttgtgcagccggatgatgatattcactataccatcctttctttgcttctggcggaaaaacatgggctggactttacactgggggatttggccagccgtcttcttgatcaggtcccctaccattggctttggtgttcttcccgtcaggcttattatcatctggttcgtctgagtgaaacggcggctctgcccgccctgctgccggaactccgcctgatgcagaatccgttccgtgagtgcatcgacggtcagatcagcgccgacttctggggctatatcagtcccggtgatcctcgccgcgccgccattcttgcccggaatgccaaccggctgacgctgaccaaaaacggcttgtacggagccatgttcgttgccgcctgcatcagtgctgctttctgtgaaaacgtcaccgtaagccaaattctggatgcggggctttccgtcattcccgcccgttcccgtttggccgaagccgtttccttcgttcgccttcactatgctcagtatgacgactggcaggcgacctgccgggcgatctacgaccgctatggtcatctgcccttcggcagcacgctgaacaacctcagctttgtggttctttcgctgcttcatggaaaactggactatacgcgcacaatcactaccgccgttctttgcggcacggacacggactgcaacgctggcacggccggaagcattgttggagctgccataggcctctccgccgttgattcccgctggatggagcctcttcacgatactgttcgcaccgtggtggcggatttcggctgcggaaccatttcggagcttgttgacagaacgcgtcgtgtcttttccaaaacccggaacgatcctgttcgctccctttaaggctccttcgagcttctggctcccgccattcttttcaaagcatggcgggagctgtttacttcatctttgcctccaccatcccgtctcacatccgcaggaacaatccctctgaatcggcggcggatacagcggcagctccgggcatcgcggctccgggcggcgcatcccgcagacctccggccgcagctgataccactccaactgtacctccaaccgggcgcaaaacatcccgcaatccccggagcactctgcctccaaaagccgcacataggggatcattaccagctgataccgccagcattccgacggcggacagcataaccgcagcgccgtttccaccttcacaacggcggacgcgctgtacaaacgctcgcaagcgtccatcacctgacagcataccgggatcctgacgcacacatgcattctacggtcgccgcagggctgcttaacaggttcccaccacggctgcgcgccgctttgctgcaccatcagcagacggcacggcccctcggcgcagcaaggcatttcttccagacgaagttccgtagaaagacatgggagccggcaacaatcccacgcggcgatcttcggcagcaacacgctttccattttatcccggcagggtttcggcggcgggcagggcggcggcggacgatatccgggcggccttggcggcggaaagggtctggagggcgtacagggcataaacattcctccttatggcaaaaatgacccggcgggttttccccgtcaggtcatcctatgtttatttttcgagagggtgctttccgtcccagtccacccgccatacggtggccgtctgattttccagttctgctaggatccccacctgcgcttcctgcgtcaccgctgttttcacctgaaacagcttcaacgtttccgtcacctgtgctgccggagtatccggccgttcctgactgctggtggagatcaccgcccattgtggccgaacggccgccaccagtgctttcccggttgcgtcgtcgcggccatggtgccctaccttcagcaccgttgcccgtgggatcacgcctgcgttcagcagttcttcttcctccgtttgggtcatgtcgcccgccagcagaaaattaccctcgggcgtttccacattcaggaccagcgagttgttgttctcatcctccgtatccagcgtcagcggtcccagaatgtccatcacgcattctcccgcctgaatcttctctcccgcgccgagccatgtaaaagaaacgttccgcttttcagcggcgctgtatgccggatgatcctcgtcgcttttctcgctgtgcagctttccggcataaactcgttctacgtcgatctcacttttcagcagcttctttaacccgcccacgtgatctttatccgtatgggtaatgataacgcccgccagcctgtccacgcccagcatccgcagcgcttcctccatctgatcgtagctttccttgctgcccgtgtccaccagatagtcctgcccattgagccgcagcaggatcgcatccgccttccccacgttcaaaaaataagcctgaatctgatcctctgcatttcctgccggacacgctatccagaacagtagtgcgatcatcagacaaacagcccaccggcctgttcgtttcattttgcatccctccctttttattatatccgcgagggatgctttttgaaaagagatgccgcgtccatttttacaagttcttctcttcccattcctgcgcgtctgcagaagtactttcttcctgcgaatacggtgtctcataccccaacgcccgctggctgtcggccacgcccgccgtggtggggtctacgatcagccccagcagggacagcacctgcaaaaccgccgtcaccagctgcagcaccgcgtcctgcgtcaccaccggggcaatgtcgaagtaccccagccactggtataccgtgctgacgatgaagctgaggaacgtcgccagccataccttgtttttcagccgaaccgtccagttgatcttcatgtttcctttcctccttttctgccctgtcaggcaataaacttgttttcctcgcagcattcccggtagatgtcccgaatgtaccgatagtcctcctcgaaaacgccgttggtttcattggtgcgcgtcaatagcatctcgtatttttcgttcaggtcgatgatgtgctcaaactcgcttttcgtgtgctgctttttgttgcggcagctgttggcgaagtccagcacctcccagcggatgcggtccatttcgttgcggtcgatcttgccgtccatctcagatagctgctgacgcagatcgctggtcagggcgttgccgatcttccgaagcagccataccatgggcgagacctccatgggcttcaccttgatgcacgaggccagcagcgggagcagccagccccagtgtttctccagccagtccaaaagcgcttccatcggactacccctccagataccggctcatcatccacgcccggcggcgcacgccgtcggtgcagatggccgtgaccagcgcccactcgcccttctgccgctccacaaggacggtctcgccgttttgcaccttccagtatagattttccgtcttgcaggcatgtttccgaagcttgaccgggttcccgtcgggcgtgcgcactaccgccgaaaaggcgctctttgcgtctcccagcaccggctctgccgcgccagaaacttcgccctccgttccgatctccgcgcccagcgtgacccccggcttgacttccgcgccgtagtcgatctcctgcgctaagcccacgtgcgtccatccgttttgcagcgtggagccgcacacccggcccatgctctgggagctgtgcaccacgtcgcattcccggcgctggccgtttttgtccgtgtcggtcagggcgttctcccccacgtacatgcccacatgggagaagtccccgaagccgtccccctgataccgggccggaaggccgctttcgtcgtcctcatggatgaacaaaagcgcccccggcaccagcttcccctcggctcgtgcgttctcaagggtccccagccatgccgcacttcgcgccatgtggttgctgccccggtagtccatctggccgcccacgttccgcacggcctgttcgatcagggcctgacagtccatctcctgatagctgtggtagctctgggccagcgccaccgcagcagcagcggccatttttcctgttggtctcattggttcccttcctctctgaaaaaagagggacggatgaacttcatccgtcccctttttcggcctacgcccacgccttacggcgggtcgtgggcttcgccgctgcgctaccgcttcgcggtgtgctcacggctcggtgccttcggctcccttcctttcggcctacgcccacgccttacagcgggtcgtgggcttcgcttcgggccgtcgcagaccccgtttctcccttactccccgtccgccgtgccgccgtactcggtcggcaccagctccggcaggccgctgtcgatcagcacctccgcaacgcccgccttcagggccttcgggacattggcaaacgtggtcttcccaaggatcaccctctgcgcaaagaacatagccatcatgatacaccattcctttccaaagatgatttttattgcgaacagctttgcagccgttatcgcctttgtcggcccgttccacgccttcggcgcgttacgggcttcgcgtctgcgggtgcgcttcgcgccgtcctcaacgctcggtgctttgcaccctccacatttacttttcatctgcgtacaccaccgtcgccatttcggctatacagtcttcgatgaaatcgtttcggtcgctgacagcctgaatctgggctttcagcatggggatgtcctctttcagggtctgggcctcctgctgcgccaccgcaagggggctgtccagcttgtcgccgccacggtaaaaatgctccccgtcgtaggtgtcgccgacagccacgggcaagtccccgcagggaaccgccccctcaaattccgccgcgctgggcggatacagtaccatcacgttcgtcaccacgccgttttccaccagtgcgtaaaacgtctcgttca

SEQ ID NO: 2194 - DNA, 10464 bp, Unknown
  16S sequences of unknown bacteria
ccgtccacatcacctgcgcgcgggcattgtagtcgtccggatgttccactgcaaccttgccgtatttgaaaatgttgcgcatcaatccttcgcacatttcatccgtcaagctaacgtccggcgtgttggtaaaataccgttcgatcaaatgcgtgaaaatgtccgacacgccacaagccgtctggtaggcaggcaatgtcatcgtcaattccggattcaaaatcgccaatacaggacgcaacgcatccgaacctgtcgagaatttatgtcctttgtacgtaataaccgtgccgttagagccttccgaccctgccgccgcaatggtcaggatgctcgctaccggcagcgcttttgtcactataccatcaccggcataatacgtatcccatacgtctccttcgttgactacaccaatggcaatacacttggccgtatcgataacgctgccgccacccacggccaaaacaaaatcaacgccttcttttttgctaagttccatcccttccagcgccaattcataacgcgggttgggctttacgccgcccaattccacaaattcgatgccggctccttttaaagactcgcgtacacggcccagcaatccggatttttccgcgctctggcccccgtacaccaccaatacctttttaggcgcataggcagtcaaataggtaccaacgttgttttcttcccctttgccaaatacatatttggtaggagaatagtagcaaaaattgttcataggatacacctccaaatagattaaacgctctgcgtttacatacaacatttcacacataaaaaccaatataaaaatgggaataaaaaaacaaaatgattcttaaagaaacttttatataccttatcaatataatatcatattcatttttttagtacaattcaaaaattctttttctatgcatccaatattactgtaaagcagacaaaccatatcaaaagttagaaagcagatcactatgcacgcattcatttttacccaataaaaaagagccgaaaatatgtttattacaatctgtattaaaacaaaagcggttcatctttagaaagacaaaccgcttcttggttttttacaatactttgttgaaaaagtcgatggcacgctgttcttttggatgatcaatgacatcgcgcggcgctccttgctctacaatatagccgccatccataaagatcgcccggtccgccacctctctggcaaacccgatctcatgcgatacgatgaccattgtcattccctcagccgccagctgcttcataacctgcaatacttcgccaaccatttcagggtccaatgcggaggtcggctcatcaaacagcatgatgtcaggattcatgcaaagcgccctggcaatggccacacgctgcttttgtccgccggaaagctgggaaggatacgcctgtgctttgtccgaaagccccaccttttccaacatctgcatggcctgtgctttggctgcatttttatccgcctttttcagctccaccggcgccagcgtcaaattatccaatacattgagattgttaaataaattaaaatgctggaacaccatcccaatgttttcccttaccttgttcagatccacatccttggcgtccatatggtggccgtctaccaccacttggccatctgtaatatcctccaaacggtttagacagcgcagaaatgtagattttccgctgccagaaggccctaaaatgaccaccacttcaccctcatagatatcaacagagatatccttgagcacttccaatttatcaaaattctttttgaggtgagatacatggatcttcacattgtctttgttaacggccacggttcaatctcctctcaaccagctttgccaccctggataaaatggtgatgataacaagatacatcacacctacaataaaccatacctgtgctgatttatatgtgattgccactacattttttgcagtatttaccagctccggaaatccaatgacggacaaaatggaggtatctttcaacgtaatgataaattggttgattatgcttggaatcatcgtgcggattgcctgcggcaataccacgcgccgcatggcgcgccaatagggcatacccaagctgcgtgctgcttccatctgtcccttgtccacagactggataccgccgcggatgatttctgccatataagcgccgcaattgagcgccaaacaaatggtacctgcttgcagaggagacagagtaaaccctgaattaaatagatcattaatcaccatcggtacgccaaaatatacaaaaaatgccaaaacgatcataggcacaccgcgaatgatatctacaaaaacagctgcgatgatattgcacacacggctctttaatacactcatcatgccaaaaattaagcccaggatacaggcaaaaaacaagccgcataatgccaacaacagggtttggcccattgcagtcaacagcaaatcgccataaaccgaaatgatctgtcccatccagtaaactccttctaattacagtggggcatcataatgacgccccactgattgttttgctatacgttttcaatcagccgagatatttgttgatgatctcgtcgtatttgccgttctctttgatgttcttcaagccagcgttgaacatatccaacagctctttgctgttatcagagaaaatagcaaagccgtaatcggacccttcattgtccgtaccttctacaatcttaagctccaaaccctgtttgatagagtcgatcataaccggcttatcttcaaagcaagcgtccatctgtccgcccgttacagcctgatacatcgtcggggaatcttcaaaataggtggttgtaaagccgtatttgtccttgatgctttccgcataggtcgcacccatcgtaccggtctttaccgctacctttttgcctttcatatcctcaaaagaagagatggaagaatcctttgccactaccatgcactgcggcccagtatagtatgcatcggagaatgtccaaccgctgtttttacgctcgtccgtaatggaagcgcctgcaatcatcgcatccgcctggccggattggcaagcggcgatggaagcatcccatcccatgctcctcaattcatagtcaaacccctgatcttctgcaatggccgccaaaatgtccacgtcaatgccgaccagattcccattctcatccttgtactcaaacggacggaatacggtatccgtagcaatgatccattttttgccgctattgtcggcgttttgtccgtctccctgggcatcctgcccgccgcagccagccaatacgccggtcagcaccgccaggctcatgatcatcaataagccttttttcatcctcttcatttctcttcctccctctttatttggaaatattttttatttttatgcaaatgttatttatatctatacagaaaaaatgaatgctagtatatttatattaacacaaatttgcgcttgttacaatataccatccgacatccatctcgcttcatagataatttttattagaaaaaaaggcgctatatcagcgcctttttctctttttcgtcattttgccagttcataaatctgcttgatttcatccggccccagcggcacaaatccgccacaatggaaatctgccagctccggaatatcctcttcttttacgcccaattccgccaacgtagtgggcaggccaatgttgtgcatatactccttgacgcggcggatgccttccagagcgacctcttccggatggaacacatcgttgtccacccccatcaccttggttgcaaagcgcacaaagcgcggcacatcatgcttataaacaaacttcatccaagccgggtaaatggtggcaaggcctgcgccgtgcgcactgtcatacttagcgccgatgcggtgctgaatcatatggctggcccaatcctgatcacggtcacacccgcaaatgtcattgtgagccagcgtacccgtccacatcacctgcgcgcgggcattgtagtcgtccggatgttccactgcaactttgccgtatttgaggatattgcgcatcaatccttcgcacagttcatcggtcaagtttacttctttggtattggtaaaataccgttcgatgatatgcgcaaaaatatccgatacgccgcaagccgtctgataagccggcagcgtcattgtcaattccgggttcatgatggaaagcaccggacggatcaattcacagcccagatcgcccttaatgcccttataggtgataacagagctgttagagccttccgaccctgctgctgcgatggtcagaatgcaggaaacaggcatcgctttttttacttctttgttgccaacataaaaatcttcccaagcatcgccgtcgtcgtatacgcctacagcaatgcacttggcagtatccgccacgctaccgccgcccacagccagcagcatgtccacattctcttttttcacgatatccatgccttccaacgccagctcataacgcggattgggctgtacaccgccaagctctacatacgcaacatccgcttttttcagcgattcgcgcacacggcccagcaatccggatttttccgcgctctggccgccgtacacgatcaaaacctttttcgagccaagctctttcatgtactgacctacgttgttttcttcccctttgccaaaaataaatttcgtcggggaacaatacgcaaagttattcatgataaaaacctcccttaataaaagcaatttaaatatttatataaaataccaatgctcaacgcataagaaaacttttttagtatttattatactaacatatttgtttgtataatacaagaagctctctttcccatattggaaaagagagctttttttatacacgcacgggcaacaccaaataaaggtattgatccccttccaacggctttaccacgcagggagacagtccgctgataaaatccaataggatctcctcatccttgatgacgcgcaacacatccaatagatacttggcgttgaacgcaatggtcagcggctttccttccaagtagatgggcaacttttccactgcattgcccatttcgccgttggctgtgatggtcatcgtatcctcatccagctgcaaacgaatgaggttatggtttcggctatccctggccaccagcgaagcgcgctctacagattccaaaaactgctgggcctggatacgcacccgcgtttgatgatcgccaggcagtatctgtcggtagttgatatattctccttccagcaaacgggttatgattttggtatggcccatttccaccatggcctgcgtatcaccgatggaaatactggccggcgcatcgctgtcctcaaacagcttggcaatctcagacagagaacgaccaggcactacaaaattcactggtgtggttgcctgtaacagcggttccttacaaagagccagtcggtatccgtccaatgccaccagcgttacacggtcgctttcaatttccagcaattctcccgttaaaatgggcttggtttcatccatagccacagcaaaggccgtgcgctggatcatgtttttcagcgcgctttgctttaattccagcggccgtgcccccgtcatcggcggcatttccggatactctctggcatccatcccctgaagattgtatttggcctggccgcattcaatggttactttcaacccctctgtggatatagaaaccgtatccggcggcatcttgcgaatcaattcggcaaacatgcggccaggcaacaccagcgcgccttcctcctggatgttggcaggcaatgagcattcgatgctcagcgccaaatcgctgcaagtaaggcttacagcgttgtcttttgccataaacaatactccttccagcgccggcatgggcgatttggagggcatagctctttgcacggtagacattgcactattcagttcttggcatgggcattgtaggatcatcggaaaaaacccccgtttcgttttgtatttgttttgtactctatgtagtcgtcatcgtcatcataaggactatggatttgtggaaaagccccataatgaacgtagaaatcgacattttttgtcctcattgcctgcgggaaatctctggaaatcctatggcaaagtatacgtgattccacagccttgttttttatccataggctctatggaaaaccatcatgaaaaactaaggtataaactgaggaaaaggctgtggttttcctttaagactcgtgaatctgcgcaatgagatcctctaccatttctttggtttctgcgttgcttttgatctcttgcgccaccttttccacatcatgcattacagtagaataatgccggccgccaaacagttcgccgatctttgggaaagaatggtccgtcaaggtacgcaccaaatacatcgcaaactgacgaggcaccgcaatatccctgctgcggcgtttgcctacgatatcatcataggtaatatcaaattgattgcatacgatctgtatgatgttgcgcggcgttaaggcgcgcttgcgttgtgaagcggtataatctttcagcgcggcctcggctaaggccagcgtaatgggctggcccatcaagctggcataggcggttacgcggttaaagcggccgtcgagctgacggaaattcaggccatcttccgaagcgatatattccagcgctcctttttcgatttgcaatagatgctccaattcagcgcgcttgcgcaaaaaggcgatcctggtttcgtaatcgggcagcgcaatgtccaccgttagcccccaggcaaagcgggaacgtacgcgctcttcaaattccacgatttcatgtggcggcttatccgaagaaagtacgatttgcttgcctgcattgtaaaggtcgttaaaggtatggaaaaattcctccaaacagcgccccttgccggccaaaaactggacgtcgtccagcaaaagcacatccacgccgcggtattgcttacggaaatcatcgataggatccttgcgcatcaatacgctgatcagtgcattggagaactgttcgctggtcacatacatgacgttggcggaaggattggtctccaaaatcgcgttgccgatggcgtgcatcaaatgcgttttgccgaggctggtgcctccatggataaacagtggattgtatttttggccgggcgcaatggaagcccctacagccgccgcatgcgcaaattggttgcccgtacccaccacaaaggtatcaaaggtataagctggatttaaggcatggcgtttttgctcaatcgaatgaaaagagggtgtttggggctgtccccattcgctttctagcaaaatatccacctgaaaatcactgtgattggtcttttcccttaccttatgcacgatcatttcatagcaacggtgcatcaggttttccctgatgttggaagccggggctacgaggatcaggcggttgttttccatcgccactgcgtgcagcggctccacccaggtatgaaaagaaaaatcgctgagatcctcttttagatcaaaacaaacctgatgccaaagcaaggtaaaatcttccaataatagcccctccttcatcaaagccggacaatccgtatcttgtccatatatattccatagaattatccacaatctaaaattttttcctgtggatttaaggaaaaaactgtggataatagtgtttcaaaattcaatttaaacgatttaattgtggataaaataaggaaaaagaggataaatctcctctttttcacgccttgttcaggccgcatcagcattatatcaccgggtacacggagaaacaagcaaaaggggtgaaaaaaatggttttttacctgtggaagattttcaatccgatttcatacgctgtttttttagaaatgcccatttgtagcgcggcctgttctgctgcctgcttatggcgcagcccttcctccttatactgttgcatcaaatccatgatgcgctgcgtatccggagccttgctttcttgcttttgtgcaacagggatcatgagcacaaattcccctttgggaggatgggcctgataatgcagcagcaaatgctgtgcggtatccgttacaaactcttcatagacctttgtcaattccctgccaatacaaaccagtgggttctcacaatataaagaaagatcctccaacgttttcaacatcttatgagggctttcatacagcactacggtttgtgttctctcatggatgcgagctaagatctgttttctttcctttccctttaccggcagaaacccataaaagctaaagccgccctgggttaagcccgtagcgctaagcgctgtgataacggcgctggggccgggaatgggcacgatggtatatttgtttttgccaagcgcttgcacgagcctggcgccagggtcggaaatacagggtgtcccggcgtcggaaacgagtgcaatgtccttcccttcttccaaaagacgggcaatctcttctatgcgcttttgctcgttgtgctcgtgcaggcttaataagggcttttgaatttccaacgcacgaagcagctgcagggtatgcctggtatcctctgcggcaatgaggtctacctgcttgaatatgcgtaccgcgcgataggtgatatcttccaggttcccgatgggcgttgccacgatatacagtgtagagggcattataataaacctccttgataaatcctttccatggtcagagaggcttggcccttggcatccgtcaaaaacaacgggctttctacttttaggccgcttttcccgcccttgatgcattctataagcacaagattggcatttttttctggatttccatgcacaaaacgcagacgttttggctccaaatggctatgatgtagagtatccagcagctccatcagccggatggtttggtggatgcagaaaaaatgtcccatgcttgtcagcgccatttgcgcagattggcagatctctgaaaaatctgcgcaaatctcaaaccgtgccaaggcatgcggcgtatctacactgcattcaccatgccccagctttccatagggcggattgcataccaccacgtcgtatatccccaaggcgtgcagcgtctgcggcttggtgtaatcaccggttacaatatcgatagaggaggccagctcgttgtaggcaacgctgcgctgcgccatatccgccatgttgggctgtatttcgatgcctgtaatgtgctttggatgaaacaaagcggtcatcagcaaagacagaatgccggtacctgtgccgaggtccaaaacacggtgctgtttttttgctctggcaaaatgggccagcagcacggcgtccgtgccaaaacgaaacgcatccggatgctgtaaaataaacaggccgtaggggtgaagctcatccagccgttccccaggatgaatcaatgtcgtcatacacaaaaatcctctttggaaaaactatggggcagcagctgatcaaggaaatggattttggcatccgttagatgacttgaagcacacacaatcgtaagatgcggggcaaactcaccgagcgcttgtcggcatatgccgcaaggataggtaatctcttcgctatccgaagtcagcgcaagcagagaaaatgtacgttttccctctgaaacagccttaaagagtgctacacgctctgcgcagattgtgacaccatacgatgcattttctatattgcatccggtatacacagagccgtcctcacaaaccagacaggcgcccacgcgaaaatgagaataaggcgtataggcattgtgcatagcggcctgcgcttgttttaaatacaaaagcatttgggtttccattgcgcttcctccccgtgtgtctatcatatcctatttataaaacctacacaaacaaaaaaagagccttcgcggctctttttttatataggacttagccttcttgaatcgcacctaccgggcaagcgcctgcacatgcaccgcaggacagacattcgtcaggattgatttcataaatcgggccttctttgatcgcgcccacgggacattcgccagcgcaggttccacaagccacacaagaatcagtgatcttatatgccatttggaaacacctcctcattaaaatcttaccttattgtaccacgctttttgttctttgcaagtaggaacgtcaatgtttgtcgttttgtgtttgttttttttgtttcttttccccgtcctgcggtttcttttcttgtttttttggcttgttctcttgctttttgggcgggcgggtgcgctcaaagctaatctctttgagcttgtattctcgtatttcaaaggtatcgtccggcttttgaatcttcaccttcaccaaaagggatatcggattgctttccatcgcaacgccgatgccgtccggcgtttttacgttgctgccgttgcggggcagctttttgcgcatttcttcgtaatacggctgctcataattcaagcaacacatcagccgaccgcata

SEQ ID NO: 2195 - DNA, 10212 bp, Unknown
  16S sequences of unknown bacteria
gagatagcgatgacccatcgcatccaaagcacatcgggtacagcggtggtgctggccaagatattatcaaaagccgtaggcgccagcgtgaggccgatgacgacgatcatagggccggtaacaacgggcgggaaaaagctcgtgacacgctctacaccaaacagcttgaccaacagcgccagcaccaggtacagggcaccagccacgatgatgccgcccgttacataagggaaggccgcctgataggctgaaagggaggtgtagttggccgccccagcgtccacgccgccgtacatacaggccgtgatttgaatgacgccaataaaagcaaagctggagccgacaaacacaggtacctttcccttggtgcataggtgaaaaatcagcgtgccaagccccgcggtaaacagcgcgacgttgggatccaacccggttaggatgggaaccagtactgtagagccaaacatagcaaacagatgctggatgcccagtaacaggtttttgccaacacccatgttggcgggggactgttgctgcataaacataccctccttgatgagatagtttgatagaaccccataaaaaaagccttgtatgggaacaagggacaatcttaccaaaccgaacaaaggcggtacggtattgtcttatcaaagtatagcatagggcagtgacattctcaacgaaaaaaacatacaaatgacgaatttatgacaaatttatcagcccgtttcacaggaagattcttgcagaaaaagaagcctgtatgctatactaaaacaaatacgtatataggatctcttcgagggtatttagacattggatattggaaaagggctgaatacggaagggatttttcttatttacaggcaaaggttggccgcatacagcagggaaggattgtagaggatgcagtttgagcaaacggccctttcaagggagatgcaaagggcaatacaggacatgggatttaccgaaatgacggaggtgcaggaaaagaccattcccaaaatgatggagggaaaggatgtcattgccaaggcgcctacggggactggaaagacctgcgcatttggcgtgccgatcattgagaggattgatggagagagcgatgcgctccaatgtttgatcttggcacccaccagagaactgacgagccagattacagaggatatgcgggcaatggcaaagtataaagaggggctccgcattgtcagcgtgtacggcgggcaatccatgcagcgccagatagagcacttgaaaaagaagccgcagatcattgtggccacgccgggacggctgctggatcatataaagcgaaagacagtaaagctgcatgctttgaaaacagtggttttggatgaagcggacgaaatgctggatatgggctttatcaaggacgttaccaatattttggatcgctgccccaagaaaaaacaggtcgtgatgttttcggccacaatttccagagaggttatggatatttcctggctatatcaaagggatgttgtggagattaccgtgcttcccaaagaaaagaatgagccaaagatcgcacagtatagcttgcatgccgagggagaagaaaaggtgctgatgctggcacggctgttacaacaggcggattggcatcgggtgatgattttctgcaatacaaaatatatgacggaccggttgacaaagcggctgtgtgcgcgggagatcaaggcggagtgcctgcatggggatattaagcaaagcgtacgcaataaggtgatgaaggattttagagaggggaaattcccagttttggtggctacggatgtagcggcgcgcgggatcgatgtggacgacattgatgctgtgattaattttgatatgccggcggacaatgcttcttatctacatcgaataggaagaacgggacgggccggtaaggaaggtattgcttattctctggtttccataacggagacggatcggctggaatccatcatgcgatggacaaagcatgaaattattgcgctgcgtatggatgagcaagggaatttaacgcaggcgtccaaacaagcaccgaagaaaacggtagcgcccattagaaggcggagaagacgacgttaaaaattgcgcttgacgggataggcaggaatttgctatacttacctttgcaagccgaagtggtggaattggcagacgcgctggactcaaaatccagttctggcaacagagtgtgggttcaagtcccaccttcggcaccatatcgcggcgagcccttggattcgccgcgattttgctttataaatcacgactttaccgaacggtgccgtttctcctcgaaaagggtctctatcctgccggttatttgcttatatacacgctcacggccgctttggcatgctaccaaagtactgttgggcgtctttttttgccaatgatttgcaaactgagcctggatgcaattcgcatccgggcttttctttgcccagatcgaaaaagagcattgcaggcttttgccaacttaacctttgccattgcgtattatgatcacttatgacgattttttctgcaaaacaatgatgtatgcgaggccttgcttattttccttttgttacagagggcaaaatttattctattgaatgcctgactgcaagcctttgaattttatgcgcgcatgttattgagtttggatttgctgatcgctatatttaacaccatgaatgcggtataataaaacaaagagacaaggtgggtgagagactgtgcagagatcgatgtttgaggaccaggggcatgatccgttggccagtcgtttgcggccggatacgctggagggctatgtaggccagacgcatctactgggggaaggaaaagtattgcggcaattgatcgagcaagatcagatctgttcgatgatcttttggggcccgcccggtgtaggcaaaacgacattggcgcgcatcatcgcggaaaggacgaaggctcgttttgtagactttagcgcggtgaccagcggcatcaaggagattaaaaaggtgatggcggaggcggatcacagcagaatgctgggggaaaagaccgttttgtttgttgacgaaatccaccgttttaacaaggcgcagcaagatgcgtttttgccatttgtggaaaaagggagcatcatcttgattggcgcaacgacggaaaacccctcttttgaggtaaattcggcgttgctgagccgatgcaaagtgtttgttttgaagccgttgtctgtccaagaattgcaaacgctgctgcaccatgccttaacggatgaaaaggggtttggcgcgcagcgcgtagaaatgaaagaggaatggctggagatgattgcagcgtttgccaacggcgatgccagagtggcgctgaatacactggagatggtagtgctcaacggaagaaaagagggggataccgttcaggtttctcaagagatggtagagcagtgcataggccaaaaatccttgctgtatgataaaaacggggaggagcactataatctcatttctgcgctgcataaatccatgcgaaatagcgatgcggatgcggcggtgtattggctggcgcgtatgctggaggcaggagaggatccgttgtatgtggccagacgcctggtacgatttgcagatgaggatgtggggatggcggacagccgcgccatagagattgctgtggcggcttaccaggcatgccatttcatcggtatgccggaatgcacggtcaatctgacgcatgcggtggtctatttatccatggcgccaaaaagcaatgcgctatatatggcctatgaatttgccaaaaaagacgccgcgagaatgctggcggagccggtgccgcttcatctgcgcaatgcgccaaccaagctaatgcaggagttgaattatggaaagggataccagtatgcacatgatacatccgataagctgaccaatatgcaatgcttgccggaaacgctaaaggataggagatactaccgcccaacggaacaaggatcagaggcaagggtgaagcagaggatgcagcagattatacaatggcatcgtcagcatgatacgaaggcataaggaaaacagagcggaaaaagcttctatggggcgctcatagaggctttttacatagaagtgagaaaaggaaaatggcgtttttgagacattcttggcaaaaggctggggacaaacaagggggcgcctttttgatttttactatggggtatgataaaatcatctacaaaacaaaggaggcggagccatgccaacactgattgcaatcgacggaaacagccttctgtttcgtgctttccatgccttgccgattctaacggatgcaaaggggcggtataccaatgcggtatatggattcatgggcatgctcatccgtttgatccaagaggaaaaaccggattatttggcggtggcgtttgatctaaaggcgccgacgttccgccatttgcaatataagggctataaagcgggaagaaaagagacgccggaagagctgatcccgcagtttgatcttttgaaagagacgcttggtgagctgggcattgcggtattgtcctgtgaaggatacgaagcggacgatatattgggcgcgatgggagagttggccaagcaaaaccactgccaggcgctgctggtaacgggcgataaggacgctttgcagctggtaggggggccggtgaaggtcttatacacaaagcgcgggatttcggataccgatttgatggatgccgaggcggtaaagcaaaagatgggggtttatccggagctcgtggcagatctcaagggattgatgggcgacagctcggacaatatcccgggcgtaccgggcgtgggccccaaaacagcggccaagctgctggataaatttggaacgctggaggaggtactggcacatgcagacgaagccggcggcccaaaattgagacagtcgcttgctacctatgccgagcaagccagacaaagcaaatttttggcgaccattgaccccaaggtgccctgtgattttcagctaaagaagattgcgtttgggggcatccatgagtccgaatgggggccggtattggctgatcttgggttttcaacgttggcaaagcggctgggaatttcctctgctagcagcaaagaagagacgccggctgcggcaatgccggatgtaaccatccaaaggctggaaagcttagcggattggcgcaaggctgtgagcgcctgcccgcagaccgtagctctctatgaggacaaagagggactgcacatggcggtttccgaaacagaagaggtatacgttgcgttttcgcagacgctgctgggcgatggagtagacccttatgcggccttggagatgctagcccccatgatggcggatgccagcgttgaaaaaattttgtatgatgcaaaaagctgggcgcataccatgcgccaatgggaggtagagatacggggtcggtgtcaggatgtgatgctggccgcctatgtagaaaacccggcacagggccaaaaggatgtgcagaccttatgccaaacacacgggcttttggcaccggatcaagcggccaacgcctgtaccatgcttcaactttaccgcaacatggaggcgggcttgcagcaatggcgagggtttgaagtgtatcaaacgctggaactgccgctgtggcgtgtgttgtttgacatggaatgcaccggctttcgactggatctggcgcagctgcacgatttggcgcagcagtatgccaccaggatcaaagagctggaaaaggaaatttatgacttggcgggagagcagtttaacataaactctaccaaacagctgggcgatgtgttgtttgataagctgcgtctgccggcctggaaaaaaacaaagacggggtattcgacggatgtggaagtgctggaacaattgaaagagcagcatcccatcatcgcttgcattttagaatatagaaaagcgacaaaattaaaaagcacatacctggatggattacaggccgtatcagaccaaagcaacggcagagtccatacgagattccatcaaaacattacgctgacgggacgcatttcttcttctgagccaaatctgcaaaatatcccggtgcgcactgaggaaggaagggagattcgccgtgcgtttatcccttcggatgaggatcgctgtttggtggttgcggattattcgcagatcgaactgcgtatcttagcacacatggccaaagaggacacgatgatcgataccttccggcatggcggagatattcataccgctacggcagcaaaggtgtacggtgtggaccaggagagcgtaacaaaagacatgcggtcttccgccaaagcagtgaattttggcattgtctatggcatttcagatttcggtctatcaagaaatcttaacattccacgcaagcaagcagccacattgatacagagctattttgagacgtaccccaaaatcagaggatatatggatcaatgcgtggcggatgggcgtgcgcacggatttgtggaaaccatgtatggacgccgtagatatacaccagaattggcaagcaaaaattataacgtgcgctcctttggagaaagggcggcgatgaatgcaccgatccagggtacggcggcggacattataaaggccgcgatgatccatgtgcacgagacattgaaaaaggaatgcccgcaggccaaactgatcttgcaggtgcacgatgagcttatcgtagatgtaccaagagaccaggcagaaaaggtgaagaaaatcttgacggattgtatgcaaaatgtgctgccgttggatgtgccgctgatcgcggaggcggattccggcaagaattggctggaggcaaaatgacaaagcagaacgaacggtttgttattggcattaccggcaacattggcgcggggaaaagcacagtgaccagggcccttgcaaaagcaggcgcctgcgttctggacgccgatgcaatgacaagagagctgcaggcgccgggaagcgaagcggtgcgggccattgcagaggaattcggggcacaaatggcgccttcgggcattttggatcgtaaggcattgggtgcgttggtgtttggcgatgaagcggcgcgggcgcggctgaatgcactgatgtggccacggctcattgagcagacaaagtgccttttgcgccgtaaaaggggcgtgtgtatcatagatgcggcactgttgattgagtctgggctgcatacggtatgtgatgaagtatggttaattactgcaccggaagagatacggtgcgcacgcatcatgaaaagagatggtttatcagagcaacaggcatggcaaagaatcaagagccagatgccggaaactcaaaaaaaagagtacgccgactgcctgttggatagcatggtaggagagcgatgcttaattgaaaaagcaagggcgttgtacgaccatgctgtggggggactatatggcaaacagtaaaacaacggcttatccggccagaagggcaagacaggcaggccgtagaaaaaaacagcgaaacctttggcagctatggatcgtattgggccttgccatcatcatattggcgctgttggcattggtaggatatccgtatgccaaaaagctggcgtatccattgaaatatgaagcgtacatcacagaatacgcagaggcaaacggattggatccgtatcttgtatgcggtgtgatccatacggaaagccattttgatatagaggccgaatcccgcgtaggggcggtagggcttatgcagatcatgccggataccggagagtggattgccaaaaagatgtcgatgaaggattacagcgaagcaaaactaaaagatccggagaccaatatccgtatggggtgctggtatctaaaatatctcatggataggtttgatggggatatgacgctggttttggcgggctacaatgccggcccaaaccgagtgacccagtggctggaagatgaaaaatacagccaggacggaaagctgacagacattccttatcgggaaacagaggaatacgtaaagaaggtagaaaatgcgaaagagatgtatagatcctattatacgctggagtcataggctgatctgtgtatcgctaggctgcctgctcattttggcgggctgtggcggacaggaggcggcctctcccagcccaacgcccagcgcaagccaatcggaggcggcgcctgtttcgggtggaagcatgacgatcgtgatgcccaacaacgctacgttaaaaccgctggaaacgacgcagcgggaattggtagatctgttttccttgatttatgatagcccgctgcaatatgatgatgcgttgaggcttcagcccaatgtggtggaacgatggagtatgtcggaggatggccttacctggacgtttgtattgcgtaaggacgtgacatatcacaatgggcaaaccgtaaaagccaaggacattgtagcctgcatcaatgagctgaagaagattgaggaagatgaaaacagagattccatctatgcggtgaatatggatttgatcgcgtcggctgcagctgtggatgagacgacttttaccattacagcaacgcaaaagacaaaccgtgtattggcggcgctggtatttcctattataccggatacgaccatcggcacctctttgcccacgggttgtggcccctataaggtagtatccaacgattctggcaaggtgttggaactggaggccaatgattcttggtggaaacgcacaccatacctgtctaaaatcacggtgaagggcattcaggatcccgatacggcgctgaccagtatggatgtgaacctggtagatctggtgcacacggattcgctgacagcttctggctataagcaaccgggcagccgtgatgtgtatgaggtgatgacgcaggaatacgaatgcatcattccaaatctacaaaatgcaaagatgcaggatgtacagatgcgccaggccatcattgctgctttggatagaaaaacaatcatcaccgagacatatctgtggcatgcggttacggtggatgcgcctgtgccaccggattcgtattattacgaccagacgcagcagcagcacgaatataatcccggaaaagcgacgacgcttcttggcgagctggggtaccgggacagcgatggcgatggttttttggataagaatggggaaaagctgacgatgaatatcatcgtcaacgaaaacacattgagcagtgcgcgtgccgatgcagcaaaggtggcggcacagcagctgcaaaagattgggattgacgctacggttacggtgatgacctggtcagattatcaaattgctctgcaaaatggtaattttgatctggcttttgctggtttttccattcctaaggatggcgatgtaagctttttgctacacagcacccgcggaacatacaattatggaagatatacctctgcgacgatggattcgtatttagacgaacttgcggccgctaccacggaagaggaggtaaaagcagcctcttccaaagtacagcatctatggagcgacgagcttcccgttatcagtttgtactttaagacaaattccgttgtatgctcggcaaagatcaaaggcatcccgactatgcgggatatggatattttcaaggatattgaccaatggtatattttgcagcagggagatgagaacaaagccaatgcgccggaataatccagcgagtttggcaagaagaggttgacttttacgtattttcctctataataaatgggtgacaatttctattgttacccatgagcgagagtgctggaataggcagacaggcacgtttgaggggcgtgtgtcgaaaggcgtacgggttcaagtcccgcctctcgcaccacaaaaccaccgaaaaatcggtggtttttattttttatgacatcacttatgacatcaatattccttttttgcgaagaaatcagttatctactacactgttcctccttatctgcaaaaagtcacgctatgccttcactgtttgcttgtcaacgcgctcgtcacgcattagcttgcaccaacttttgcgggctgttataaaaaaatatatattgtcaatgataagcagcgtggcatttcacccaatatcgcgcaaattaccatggtgggttgcgatatttttgttgccagaaagaaaatatcaatgccggcagcctatggtatgaaactgccgagaaatcagcggtttttttattttatgatatctatcataatat

SEQ ID NO: 2196 - DNA, 1980 bp, Unknown
  16S sequences of unknown bacteria
gggccaatttttcgtcaaaagcctcacagcttcgcgatatcctcgggggatatggcttttatgatgcagtgctttgtaaacttggggtccggctcccggtccgtcagaatgcacgcctgggagaggggcgcgaagctgacggaggagaccttgtcaaatttagaatgatcggccagaatatatgtcacatagctgtgctgggcgacggctcgcttgacattcgcctcgtcaaggtccggcgtcgtgaacccgctggtcaggccgatgccgttgacgccgaggaagcacttcgtaaaatggaactgcgcaatggcccgcagactctccgacccgacgacggcctccgtcgacgtcttgatctgcccgccaatgagaaagaccttgaacccccgccgcgccagccgctgggcatgggaaaacccgttcgtgacgatctggatgctgggctctgtgatgtagtcgatcatcattcccgtcgtcgtcccggcgtccaggaagagaaagtcatccttgcggatggcctgggcggcgtattggccgatgcgccgcttttcctcgacgtagagcttggccttcgtctcgatggggtgctcgacataggaaaaatccaggtgcagcgccgtcgcgccgccgtggaccttcgagagcttgcccaggtttcccagggcgttcaggtcccgccggatggtcgattccgaagcccccagctgcccggtcagctccgcgacggtgacgctgccgtgcgcctgcaagtattccaaaatgtactgatagcgttcctctgttagcatactatgcctcgctttcgggcgtctgcggcatggtcttgagatatgccagcagcgcctgctttgtgttttctgccttgccgtcgatgacggcgtcaagtaagcccgccagcgccgcgccgaccggtttacccggggcgatgcccgcctgcagcaggtcattcccgttcaccgccaggtcccgcagcgagaagcaggcgtcctcccgcaaaatttcctccgccagcgcctggacctcgtccagatcggacagatcgacggactcgattttcgccccgcggcggtccgcccgctgcagggccagcagctggaagaggatcggcggtgtcatccgccgcagcgcccgcttgacagcccgggcctccgggttaatctgcgtgtcgtgccacttgacgagctgtgtcacgcgggtacacgtcgcgctgtccagccgcagccggtgcgtgatctcctccgccatcgccgccccctgggctgcgtggccgtaaaaatggccgatgccgtcttcgtctttcgtaaagcaggcaggctttgcaatgtcatgcagcagcgccgccagccgcagtggggcctcctgcggaacgcccgccacagtccttactgtgtgggtgtagagatcaaagctgtggtgagggttgcactggtcaaagccgacctgcgcctccagctccgggagaaagaccgccagcacctggggaaactccagcagcacccgtcccgcggcccggccgcacagcagcttgcaaagctcggacgcgatgcgctccttgctgacccgggccagcagcccccgctggcaaaacgccgcccgggccgtcgccgggtcgatgcaaaagcccagcacagcggaaaagcgcagcgcccgcaaaatgcgcagcgcgtcctccgtcatccgccgcatcgggtcgccgacgcagcggatgacgccccgggccaggtcctgctgcccgccaaaggggtccagcagcccctcgcccggcgtgtaggccatggcgttgacggtaaagtctcgccgggccaggtcctcaatgatatcccgggtgaaccggacggcgtcggggtggcggcagtcagagtaggtcccctccagccggtaggtcgtgacctccagcgcaagaccgccctgcagaaccgtcaccgttccgtgctgcagccccgtggcgatgacccggtcaaagcacgcggcgacctc

SEQ ID NO: 2197 - DNA, 7273 bp, Unknown
  16S sequences of unknown bacteria
gcctttcataacgagcaatcctttttcataatctacggtgaaaaaacggatctcattggactcgtggttcagtacgacgagcgtcttttcgcccgggaagatgtcaatatccttcgggtattctccgctgatcggaagacagcaaatacgggtcagcataccggtctcctggtcaacacgaaagacagcgacggtgttttcgccggcggtggaagcatagagatacctgccgcttggagcgagcttcatgccgcagcaggcgctgccgagtgtctccggatcacgcagagtagaaatctcctgaattttttcgaattccggtgcctttccggtgccgtcgtacttgtagacgacgatttcgttggtgagctcacagttgacgtaggcaaaatgtccgtcatggctgaaggtgaggagccgtgggccggagtcgagcttgcagcgcagaatatcgaagagatgaatccggccgctccgctcattgatctgatagattttgacctggtcaatgccgttatcgacggcgcacagatatttgtcgtccggagtcgggatgacgcagctcacatgcggacggaagttccgctctgcgacactgccgagtcccttgtggaagacaccgtccatgattgagccgagtcgtccgtcacggtgcgtatggacgaccgttacctttccgtcgtgataaccgcctacgaagagaaatttaccgcttttgtccgtagagaggtaacagccgcgcatgccatcgataccgactttattgatcggctctaagcttccgtccggactgattgcgagcacttccacaccctcatctgcgatggagtagaggtatttgccgttgtaggactttgtcatatgagaagcattgtttaccggaatcacttcccgctcggtcataattcccgcttcgatatctatatcataaacatgtatgccgatgctgctgccatgcgtgtaggtgccgacgtatgcaacatatttttcctgtccatccatatctaaacctcctgttttctctgtgtaatatctgttccgacattctgaacgcagataagcatccatgttttgcggaactattaatgtcagtgtaacacagaacaaaatttttgttaagtgggcagaaggaattaatcccttccgtaaatctttttcaccgtttctattttggagctaaggttgagcagaagatggtcggccagcgtaagcgcggccatagcttccacgacgatggctgcccgtgtgacgatcaccgggtcatgccgcccgtggatgacctcagtgacgcagtgtccgtcgcgggtcagcatactctgcggctgtccgatcgacggagtcggcttgaaggaggcgcggatgcggatcggggagccgtcactgattccgcctaagatccccccgctgtggttggtcgacttatatggaatgccgtctgcattttccagataaaaatcattgttttcacttccacggctctttgagacctcagtgccgtcaccgatttccacagcctttactgcgccgattgacatgattgcttttgcaagagcagcgtcgagcttttcgaatgccgggtcacctaagcctgccgggacatgctcggcgatgcattcaattgtgcctccgctggaatcctgtgattgcagacattcctcgagccatgctctggcgcgttcttcggctctggcatccggcatgcgcaggtcgctctcccagatgcgggtgtagtccatgtgcttccggtcgatgcagaccgggccgattgcgctgacgtaggtcgtaaacgtcacaccgagttcagagagcagcctgatcgcgatcgctccggcagccacgcgcccgattgtctcccgcccggacgagcgtccgcctccgcgatagtcccggaaaccgtatttctgatcaaatgtataatcggcgtgtcccggccgatacagctctgaaatcgagccatagtccctggaacgctgatcggtattgcgtacgagcagagagatcggggtaccggttgtgcggccctcaaaggtgccggagaggatctcgacggagtcggcctccgcacgcttggtcgtataccggttctgtccgggcttgcgcagatccagatacggctgtatatcatcttccgtcagcggaatcccggccgggcagccgtccacgacgactccgatgccctttccgtgggattccccccacgtggtaattctgaaaatagtgccaaaagatgagcctgccataaaaagaatgctcctttcgtaaggttttaattatcttatcataatacaactgaggatttgttggcaagagataatctttcgataaaacgacaaagatatatcagaggcgagtaacaaaccgcatcgcatttgcatattttgttccgagaggaacattgtaggagaggtggctgtcatgggacatctgaagtgccacgggctggtgcatacgattgaggaaggggattctctctataaaatagggaagcgatacggtgtgcgcgtgtcggagcttttatttgcgaatccatatcttgatctgtacaatctgcagatcggagatgaaatctgtgtacctgtgtcagattcggctgttttcttaaaaaaatctaaaacagatgatccagattgacaaacgaagagggcaaatctataatggatgcgttaagaattaaatgaaaaagagggcgacatatgaattttctggacaaaatggaacggaagtacggaagatatgcattgaagaatcttccgatgtttattatcgcgacgtacgtggccggctatgtgctggagcttctgacgccggaaatgctcggatatctgaccctggagccatattacattctgcacggacaggtatggcgactggtgacgtggattctgattccgccgtcaagtctcgatatttttacgatcatcatgctgtttttctatttctcgatcggacagacactcgagcggacgtggggcagcttcaagtttgatgtctatattttttcgggactgatctttactgtgatcggcgcatttcttctgtatggtatgaccggctacatcgggatcggaatgctgtttacgacatactatattaatatgtcgattttccttgcatttgcgctgacgtatccggatatgcaggtgatgctgtattttattatcccgatcaagatgaaatggatgggcgcgctttacggtgtcatgatcctcgtatcactggtgcagggcaatttggcgagccgggtagcgattatcgcgtccctgttcaactttatcgtatttttcctgatttcagggcggttcagccggttcacgccgcatcagattcaccgcagacaagagttcaaacgtaacgtgaaaaaggtgcagccaaagaacggaccgaagcataaatgtgcgatctgcggccggacggagctggacggggacaacttggagtttcgcttctgctcgaagtgtgacggcaattatgaatattgtcaggatcatctgttcacacatgagcacagaaggagcaagtgataaagtagggatgaaacgatgaataagaaaaaatcaatttttatctggaacagaaaacaggctgcggctgccattgtggcgaccgcagctatcctcattttaaccgcgtttaccgcatacggaagcggaatggatactttgggaattacacttggcgtgctgcttggaattgcggcgggggcatttgtattactgaatatccgctttggaaagattttatcagcgatgctgtacctgctgctgccgctggcagttgtatgcgcactggaaaattacacgcatgtgattacggacctggcatcgctaatccttgtgttgaatctgttgtttttttatgtgctgtacggactgctgacggcgctgaccggcagtgtacgcatgggctttcggcttgcaacgcttgttccgatgctctttggactgacgaactattttgttgtcagctttcgcggctcaccgatcgtaccgtgggatctcttatcatttggcacggcggcctccgtcgcggacaattatgaatttgtcctgagctggaaagcgttctacagcgtactggcatttatctggatgatcctgctctcgtctaagtcaacagtaaagctcggacggaaaaagctgcgcgtgatttcaattgcggcatatgcagcgttgatgtttctgtatgtcggtgagattcagaacagtgcggtgcagagctttttcggaatggatacgaccctgtttactttaaatgtgctgtaccgaaataacggaatcgcagcggcttttcttggaaatctgagattcctgaacattgagcagccgtccgggtattcggtggacaaggtggaagcgctgatgaagcaggtcgaggcggatgaacagggcgaggaagatgcaaagaatgagccggagactgatgcgcagggcgagacagtacaggcaacgcaggccgaaacgaacgcgaccgcagagacagaagcacctgcgtcttctgggcagtacccgaacatcgtcgtcatcatgaatgaggcgttttcggatctctccgtgtggggggattttgtaacaagtgaggaggtcatgccgttttttaagagtctgcagcaggaggcggtcggcggcgagctatacgtttctgtcaagggcggcaatacggcgaatacggagtttgaattcctgaccggcgatacgatgggatttttgccaaagggcagcatcccctatcagcagtacatcaacgatgagacaccgtcacttgccagctatttaaagactctcggctacagtacaacggcgattcatccgtacaatcgtaccggctgggatcgggatacggtctatgaaaaatttggattcgatgaatttctggacaaggattccttctccagcccttaccggctgagaggctacatcagcgacaagtcagcctttgataaaatcagggaacagttttcaatcaagggcaatgatgagcggaaattcattttcgaggtcaccatgcaaaaccacggcggctacagccgggagacgccggatttcaacatttacctgacacttccggaggtgaccggcaagacgacgagcgttgtggcgaccgaaaaatacctgacactgatcaatcagaccgaccgggctttggaggaactgatcgattatttcaaagagcaggacgagccggtcattgtcgtgatgttcggcgatcaccagccgtctgattatatcacaaatgtgattcagcgcatctgtggtgcgacgacctctgattctcttgcagatctggagcaggggtaccgcgtgccgtttgtgatgtggagcaattacgggctggagcacaagtattatgacggaatcagcgtcaactatcttagcagcattctgatggaaaacgcaggcattccgctgaccggctatcagacctttttgaaaaagctgatggagacgcttccggtgatcaatgcgaatgtttaccgggatgccgacggtaatttctacaattatgaggaagatgcctattccggggagctaaaggattatcagatgcttcagtacaaccatcttgttgataaaaaacaccgggatgacgcgttcttcggaagttgagtattgacaaaaaagcaggaaatgttttatagttagaaaagctttggtatacgaagaagtatgcccccagaggacaggtacaggtgccggctgggggcgttctttatataaacagcagaggagactgatttatgaaaaaaccgtttgtaacaaaagaaaagctggaagaaatcgtaaaagaatacccaaccccgtttcatctttatgacgagaagggaattcgtgataatgtaaaggaactgtatgatgcattttcctggaacaaaggctacaaagaatactttgccgtaaaggcgacgccaaacccgtttctgatcaatattctgcatgagtatggctgcggctgcgactgctcctctatgacagagctgatgctctcggaagcactcggtatagtgggagaggacgtgatgttttcatcaaatgatacaccggaggaagagttccgcaaggcggctgagatgggcggtatcatcaatctggacgatatcacgcatattgaaaaggtagagaaggcggtcggatatctgccgaagacgatgtcctgccggtacaatccgggcggagtgttcaagatcagcaatggcatcatggacaacccgggtgatgcgaagtatggcatgacgacagagcagatcgaagaagcattcaaaattatgaaagcaaagggtgtggaggagtttggtatccatgcattccttgcgagcaacactgttacaaatgattattacccgatgctggcgaaggtgctgtttgagctggcggtaaagctgcataagtctaccggtgcgaagatcagattcatcaatctttccggtggaattggtatcccgtatcgcccggatcaggagaagaacaatatcaaggtcatcgcagagggcgtgcgcaaggtatatgaggaagtgctggttccggaaggcatgggcgatgttgcgctgtataccgagctcggaagatatatgctcggaccgtatggttgcctcgtgacgactgcgatcaatgaaaagcatacgcataaggagtatatcggtgtcgatgcatgtgcggtcaacctgatgcgcccggcgatgtacggtgcatatcaccatattactgtaatgggcaaggaggatgcgccgtgtgatcacgtttatgatgtgacgggttctctgtgcgagaacaatgacaaatttgcgatcgaccgaaaactgccgaagatcgacatgggtgacctgctcgtgatccatgacaccggtgcacatggattttccatgggctataattacaatggaaagctgaagtcggcagagattctgctgaaagaagacggaagcttccagatgatccgcagagccgagacgccgaaggattattttgcaacatttgatttttgtgatatcttgaagaatatgaaatattaaccgaataaaaatgatgttggggtcaaaaggtgttttgcccccaactgatgcctacgaattgctccgctgcgaagcagctcccgcaattctgcaaacattcgaaatccgctgatttactacgtaaatcgctactttctcatgtttggcggatcccaagttcaaaagccttatcatgcaagcatgaacggctttttgaacttttgacccctatgatacacggattgcttcgcatttcatgctctcgcaatcctaaaacacctcaaatccgct

SEQ ID NO: 2198 - DNA, 9938 bp, Unknown
  16S sequences of unknown bacteria
ccatgatgacagccagtaccagtgcgagtacttttttcattgtgatttcctcctataattaagcgaaaggccgcaaacccgcttaatcaagggcttttcaatcgcctttcctacaccacccacccccaaatttgtgtgtaaaaagtggtgtaaatggtgcattcttttggccttcgataagtccctttctccgaccagccaaacaacaaatcacaatgtttttactctattttacgcccaatatggcccaaattgatccacataatatgcaaaatagaaaattgtaccgttaccaaattgtaatatttacacttaattacaaaaatagcccccggaaattgctccgggggtggtgtatgggtggtgtaaccgtcaatccgcgcggcaggctgtcaccatcgctatggcatacccgccatcgtggctcagggaaagcgccagctgccagccctcggccagcttttccgcctcgccgctcagggtaaaatacggcgcgccggtctctccataggccaccgccgcctccggcatggcccagccgctcagccccacgcccatcgccttaccaaaggcctccttggccgcccacagcgccgccgcggtttcagcagggcatgccttgcggcagatgtactcctgctcctccggcgaaaaacaccgcgccataaagcccggccgcttcatgcttttctctattcgctccaccgccacaatatccgcaccgtttcgcactctcattttgggtcctcccccgctcgttttcctttatgataccacaaaactcccccttgcaaaagcccctttgccgtggtaaaatagatgcgtaaaaatgccgtgaaccggtaaagtacccatctttttctggcacagagaagcgctccatcggctgggagagcgcgcaggaaaaaatgcgggaagttccccggggagcagcgccgctgaacccgattcagttcgagcagtaggcagcgacggaatggccctcgttaccgggccgtaaagtgtgcgtccccatgggcgcaaagctgggtggtaccacggagcatttgcggcttcgtccctgtcgcgggacgaggtctttttttatccgcccgccaaaaagctattattatcaaaatggagggatcactatgaaatccgcattggaagccatacgcgcccgcgcgctggaacggctgcaaaatgccgaggatctgaccgcgctggaggaagcgcgggtacagctcctgggcaaaaaaggcgagctgaccgccatcctcaagacgatgggccagctctccccggaggagcgccctgtcatgggccaaatggccaatgaggtccgcgccgccatcgaggaaaagctggctgcccgcggtgccgcgctcaaggccgccatggccgagcagaagctcaaaatggagaccatcgatgtcaccctgcccggcaaacccgtccgggagggccaccgccatcccctcaatctcgttttggatgagatcaaggaaattttcctcggcatgggcttcgatgtcgtctccggccccgaagtagagctggattactacaactttgaagcgctcaatctgccgcccgatcacccggcgcgcgatactcaggataccttctacatcaccgataaggtgctgctgcgcacccagacctccccggtgcagatccgcaccatggagcagcgcaagccccccatccgcatcatcgcccccggccgtgtgtaccgcagcgatgccgtggatgccacccactcccccatcttccatcagatcgagggcctggtcgttgatgagggcatcaccatgagcgacctcaagggctgcctggaaacggtcatcaagcgcctgtacggcgaagattccgtcgtgcgcttccgtccgcaccacttccccttcaccgaaccctccgccgaggtcgatgtccagtgctttgcctgccatggcaagggctgccgcatctgcaagggcgaaggctggatcgaaattctgggctgcggcatggtacaccccaaggtgctggccggctgcggactggaccccgaaaagtacagcggcttcgcgttcggcatcggcctggagcgcatcgtcatgcgccgctttgctgtcgatgatatgcgtctgttctacgaaaacgatacccgttttctggagcagttttaagggaaaggaggggtaacagttatgaatctttctatgagatggctggatgaattcgtccatgtagatacacccattcatgatttttgcgaagcgcttaccatgtccggctccaaggtagagggctatgaggtagagggcgccgagatcgaaaatgttgtagtcggcaaggtgctggcaatggagcgccaccccaatagcgatcatatgtggatctgtcaggtggatgtcggaaaatcggagccagtacagatcgtcaccggcgcccagaatgtccatgtgggcgatctggtccccgctgccctgcacaaatcccacctccccggcggcgtcaccatcaccaagggcaagctgcgcggcgtggaatccaacggtatgctctgctccctcaaggagctggggctcaccacccacgatttcccctacgctatcgaggacggcatcttcatcctgcaggaagcctgcgccgtcggcgaggacatccgcaccgccatcggcctcaatgataccgtcgtggaattcgagatcacctccaaccgtcccgattgcctttccatcattggtctggcacgggaaaccgctgcaacctaccgcctgccgctgcatctgcatacccccgtggtacagggcgccggcggcgatgtaaacggcctgctgaaggtccgggtggaaaataccgagctctgccagcgctatatggcggccgtcgtccgcaatatcaaggtagcgtcctctccccgctggctgcgggagcgcctgcgtgcctgcggtgtccgccccatcaataacatcgtcgatatcaccaactatgtcatgctggaatacggccagcccatgcacgccttcgatctcaagtatgtcaaggacggccagatcgtggtacgcaatgccgccgcgggcgagaccatcaccaccctggatggcaccgtgcgggagctctcccctgagatgctagtcattgccgatgccgaaaagcccagcgccgtagcgggcgtcatgggcggcgaatacagcggcatccacaatgacaccaataccatcgtctttgaatccgcctgcttcaagggcagcagcgtccgcctcaccgccaaaaagctgggcatgcgcaccgaatcctccggccgctttgaaaaaggtctggaccccatgaactgcgaaggcgctctgctgcgtgctttggagctggtggagcagctgggtgcgggcgaggtcgtctccggtgtcattgatatcgaccacgccgaccatgccctgcgccgcgttcccttcgatgccgactggatgaaccgtttcctcggcatctccctcacccgtgaggaaatggtggaatcgctgcgtcccctggagatcgccgtggtgggcaatgagtgcatcgttcccagctaccgcgctgatctggagcagaaggccgatatcgccgaggaagtagcccgtatgtacggctacgataagatccccaccaccgccctgcgcggctcggcggaggccattgtcacgccggagcaggatttcgagcgccgcatcaatagcgccatgattgccatgggctacgatgagatcgtcacctactccttcatgagccccaaaatgtacgataagatctgcctgccggccgatcatcccatgcgcaaatccgtcgtcatcaccaatcctctcggcgaggatacctccatcatgcgcaccaccgggctgcccagcatgctggataccctggcccgcaactacaataaccgcaatcccgaagcatggctctacgagatctccagcgagtaccttccccgtgagggcgaggacctgccggaggaacgggcggttctcatggtgggctgctacggcggcgaggccgatttcttcaccctcaagggcactgtggaatccctcctcagccggctgaatctgccccgcgccgattacaccgccgtttccacccatcccagctatcatcccggccgcttcgccgtcctcaccgttggggatgtcgagatcggctcggtcggtgaggtccaccccaccgtgctggagaacttcggcattggctgccgcgcctggatcgcccggctggatatcgccctgctctttgctgtccgcctgccggaggccacctaccacgccctgccccgtttccccgcctccacccgcgatctggccgtcatctgcgatgagagcctgcccgttgccgccatcgaaaagaccatcaccggtgccgttggcaatattctggagcagatcaagctgttcgatgtctaccgcggtgcccctgtccctgccggtaaaaagagcgtcgcctattccctggtgctgcgtgccgccgaccgcaccctcaccgtggaggaatgcgataaggccatcgaaaaagcgctcaaggcgctctcgcagtatggcatcaccctgcgcgcctaaaatatataaaacagggagaaaactagtttctttgcgctttttctccttgtattccccggcgctttacgctacaatagtattagtgcatcatttagggccgcctgcccatccggcgggcgcaccctatgcagcaccgggccgcccacagctttgcacagaagggagagtgacaatatggccaataccgaacccaccatctctttttccatcaaggaagaccgggaaaaggaactgaagagaaccctgaccaccgtatatgaggcgctgctggaaaagggctacaatcccatcaaccagctggttggctatatcctcagcgaagaccccacctatatcaccacccacaataacgcccgcgccctcatccgccacatcgatcgcgatgagctgctgcaggtgctgctgcgcagctatctggagcgttaagtgccctttttccccaccctactaagaaggaggccacccccatggaaaatatgctggaatataagggcaaaccgctggtgcgcagcggcaataccctctactacggcaacccggcagaaagctgtgttgccatgctcaagatcctttccaccaaggacgacgcggaaaaaaccgccgaccgggtgctggtgcagatcctctccaccgatgagaccctgccccccaaggatcgaatgatcaaaaagaccgaaaaaaacggcctgtacgaggcgctcaatatcgcctccatctggctggagcgttctctgaacccctcggcctgatcccccatcaaaaaagccccctgaagccaaattctcggctctcaggggttctttttattggttctcttccggcgggtgcgctatcaggtacttgatgcggatcccctgcccggcaaacatctcctcatgctcggtgcgggggctttcggccggggcgccctcccggtgcaggtcgtgggtgcggtagtccagcacccagcccgcctcctccaggtagcccaatgaggccataaacaggtcgtcgtcatcggtcttaaagtagagcctcgcgcccggggccatcagcttttggtagcgctccagctgccgcggatgggtcagacggtgcttgtgctggcggcacttggggcaaggcggacagaagttgatatacacctcatcaaattggtccgtctcatccatgatgaggaagatccgctcaatatccaccgccgtcatcaagaagttatccatcggcacgcccgccgcggcataggcctcctccgccttgcgcttggccagcaccagcatttcgcttttcacatccagcgcaatgtagttcttctccgggtgagcaggggccatctgcgccagaaagcctcccttgccgcagcccagctccagcaccatcggctgccgccgggcaaattgctccgcccagtgaccgcgcagcttttccggctcgtcaatgtagtattcccacgcggccagctccggccgcgcctccgggttgtatcgaatccgcatttgtcttcctctccgccgtcgttcaggtcaggttcttggcgttcagcgaggcaaatccctcgcccagcacctcgttcacattggtcgttattaggaatgccttgggatcatactgccgtatcagctcccgcaggcgggggtattcattgttacgcaccgcgcatagcaccacatggcgctccgcgccgctgtatgccccggtggcgttcagcagggtggcaccgcgccccatcttctccataatgcccttggcaatagcggtatgctcatcactcacgatcagcaccatgcgtccggtattctgtccgcccataatggtatcaatcacgcttccgctgacataaatggcgattagtgcgtacaggccggtctcaatgttcttaaagaccaccatcgaagccaccacgatcaccgcatccaccgcgatcatcgtcttgccgatgggcataaagggccagcgccgctgcagcagccggctcacgatatcggtcccgccggtggtggaaccccgcaggaacaccagcgccaccgcaatgccgatgcacacaccgccaaacagcgccgccaggatcttatccccggcataggccggcaggtaaggggccaccacatccaccagtaccgaccataccaggatggtcttcaggctgtgcagcgtaaattcatgtcccaaaaagcgccatgccagcagcagcagcgggatattgacgcagaagatggtgatacccatcgggatctcaaacaggtaattgaggatgaccgccacaccggacatccctccgggggcaatatcattggggttcgcaaagcagttcagacccaccgcgtagatcaaaccgcccactatatccatcaggagatccatcggcagccgccgcagccattcccggtttttcatcgcaccgtcctccgttttcagttctgtttcgcgttctctttgttggccgttatcgcctcaaaaagctcccgtgcccgctcctgcgacccattcaggtacaggtaaccaaaaagcgcctccagcccggtcgccttggcatagtggcccgggtcggcgttttttggcggatgggccccaccgttgcggccccggcgatataccgcctgctcctgcttggtcagcagcggggcaatgcggtcataggccgccgcctgcgccgtggcgttcacataggccaccgccatgcggtgcagctcgcccaccgggcggctaccatcccgggccagcatttcccgcaccagcaggccgtacaccccgtcccccacaaaggcaaggtccagcgcactcagcattttggggtcaaattttccgctcattgccatcacttcacatactcaaattcaaagtccaggatactcacggtatccccctcctgtatgcccatctcctccagcttcttgatgatcccgctctggatcagcacccgctggaagtattgcagcgattcgtagtcctccatattcacaccggtcagcgcattggccaaccagtcggccttcaccacatacacgccgtccaccacttccacggtgaactggttgcggcgggtggccttcaggcgctcctcctcggtgatgggctccggctcataccgcacgatgggcggcagcttggccaactccgcggcaatggcctgcaccagctcctcggtgccctgtcttgtcgccgcgctgatggggaaaaagcgatagccctccccctccacatactcgcggaaggccgctatctgctcctcagtggccatatcgcacttgttgccggccaccagcatggggcgctccgccagctcggggttaaagcgccgcagctcggtattgatggtcttaaagtcctcgatgggatcgcgtccctctatcccgctcacatccaccacatgcacaatcagccggcagcggtccacatgccgcagaaactcatgtcccagtcccagcccctcgctggcgccctcgatgagtccggggatatccgccatcacaaagctggtctcgccgtccacccgcaccacacccagcacgggggtcagggtggtaaagtggtaattcgctatttccggcttggcggcgctcaccaccgagatcagggtggatttgcccacattagggaagccgcacagccccacatcggccagcagcttcagttccaattccacatcgtagcgctcaccggggtagccgggccgcgcaaagcgcgggatctgtctggtcgccgtggcaaagtgctgattgccccatccgcccttgccgccgcgggctaccaccactggttcatctccggaaagatcggccagcacccggccggtctcggcctcccgcaccacggtacccttcggcaccttgatgaccaggctctcaccggttttaccgctgcaccgcgcgccgctgccgttctgtccgttttcggcggcatattttttcttataccggaacccgatcaggctgctcatgttggtgtccgcctggaagatcacatctcccccgcgtccgccgtcgccgccatcggggccgcccgccgccacaaacttttcccggtggaaggaaaccgcgccgttgccgccgtcccccgccttgatggaaattttcgctttatctacaaacatcttgttcctcgcttctatcataaaaaccgtcctaccggcagtttcccccgccggccgccggttatccgttgcaagaacaaatcccggggtttacactccgggactttgtctttggccaaattattctgcagggtaaacggaaaccttcttgcgctctttacccatacgctcaaacttgacgcggccgtcaaccagagcaaacagggtatcgtcgctgccgatccctacattctcaccgggatgaatgtgagtgcctctctggcggaccaggatgttgccagccaaaactgcctgaccgtcagcacgctttacgcccagacgcttggactcagaatcacggccgttcttggtagaacccataccttttttatgagccataaattacacctcacctttctcctcagttttcttggcagcagtcttacgggtagcgggctttttctcgccctccgccttgggagcagcagccttcttggcagtggtcttcttttcgccttcggccttgggagcagcagctttcttagcagcgggcttcttttcaccctccgccttgggagcagcagccttcttggcagcgggctttttctcgccttccgccttaggggcagcagccttcttcgcgggcttctcctcagtagcggtgcctaccgcggtgatctccaccttggtgtagggctggcgatgacccatcttgcgcttgctgtccttcttgggacgataggtcattaccacgatcttcttggccttgccattcttcagcaccttgccgcttacggtcatgccctctacatagggggtgccaaaggtcatggtgtcatcaccaactgcaagaaccttctcgaaggtcacggtctggtcgacttcagcgttcagcttctcgatgtaaagaacatcgccgacctttgcggtgtactgtttgccaccggtttcaaagattgcgtacatattgtgtagcctctttcgttaatctcgctgcgaaaaaacaaggcggcacccctttcgggatacacttataaaagcccgtcgcatgcggcacttgatattgtatcataccgcccacagcttgtcaaactattttgcgcagattttccttgtttcaagcggtttttccgcctgccggcggcggggccttcctcggccaatcgccgtcccgcgccccagcccccgcgacccccttcatcccaaatttcatctcgccttcggcgtcgcggagtcaccacagggtgacagcctgtacgcctcgccggcggggccctacttttctataaagaaaagtaaccaaaagtcactcggggaggaccccgagaccccctacgcgtcgg

SEQ ID NO: 2199 - DNA, 31336 bp, Unknown
  16S sequences of unknown bacteria
aaccccctgcccggccgcccgcagggcgaggcccatggccgcggtcgtcttgcccttcccatctccgcaatagagatggacacatcccgtttccattacgcatgctcctcgcaataggcccgcacccggtcgggcacgttcgtgatgatgccggtcaccccataggataccgccagcgcgatgtcctccggcgaatccaccgtccagacgttgacatcgatgccgtgcgccaggcaggtatcgacaatctccttgttgatgctgtgcagataggggtggatcgcatcggcgttgtaggcgcgaaccagctccagcgtttcctccggggtcttgggatcgccgccgtacagcagtccggtgcgcaaaaccggatactgggccttgaggtcccgcagccatccgtgcccgaagctcgaaaacagggtccgctccacacagccaaatcgctgcagggtctcaaagagcagacggtaggccgcctccatgtccgtcccctcccggaacgggcccttgatctcgatgttgatcggatcgacgtccttgaccacttcgagcagttcctccagggtgggcagaggggttcccgcaaaagcgggtgaaaatttcccgccgaaatcgtatgccttgagctgttcgaccgtcatatcctggatttttccctggccgttggaggtgcgggcgatctcgtcgtcgtggcagacgacaaagcggccgtcccgggtcaggtggatgtccgtctcgatcccgtcggccttctgctcgagggccagacggaacgcgggcagggtgttttcgggcgcgtatgcggaggctccgcgatgggcgtggatgatcggcataaaaagaggactcctttcgtcgctttttcctgattataccgcgcccgcgggcaaaagacaaacctttttgcggggcttctgcccccttttttctttacatcgttgtaatattcctcctctatactgtatactataggggaggttccgggtttccccgacggcaatcggaaaggctggtggaatatgaaacgctcacaaaaaatcgtcagtgtgctggatatcggctccaattccgtccggatggggatttaccaggcgggcaagacgggtgccgaccagctcgataggctggaatacccgctgcggatcgggcacgaggtgtttaccaccgggcacatcagcgccaagacggtgcgggcgctctccgccgtgctgcgggggtatacccaggtgatgaaagaatacggagtgaccgaataccgcgccatcgccaccaccgccctgcgggaggcggaaaaccgcgcctatgttctcgatcagctcaaaacccagaacaatctggtggtcgaagttctcgaggacggcgaggaaagcggcctgatttacggcgagctgcttcccactccctatttggagaacgaggcgatgctcgcctatgtgggcaccggcagtgtgggggtggcgctctgccgccgccatgaggtggtgcagacctgcaacatcaccctgggattcttaaagctcagcgagatcctcaagagcatggaggaccgcaccccccggttctatcaagtcattgaggaatatgtagacgcctatttccagcgcctgtcctggcggctggccggcggatccccgcgggagctggtgctcaccggacgggagctggacaccatcgcctctctatgcggagcggcggaggaaaacggggcattccgcatcccccgggacgcgctcgagggcctgtacgaaaccatcaagaacctgccggccggcatcatcgcggatcaggcggccatccccgaggagacggccgaccagctcctgcccatgctggtgatctaccagcgcatgatggattttgcgatggcgccggccatcctctccccccgcctgcgcctgatggacatcctggcccgccagatgctgctgcccgcggagaaggcccggttcgaggcacaggaacggaacggtgccctttcctgcgcccgggaaatgtgcgcgcgcagggggatggacctcgcccacgcggaacgggtacgggaatacgcggtgcttctgttcgaaaagctcaaaaagctccacggcgtcagcggcaagaaacggatcctgctcgaatgtgcggcgcttctgcacgaggccggatacggtatcaacgcgaaaaacacctcccttgccgcctatgacctgatcaagcagtcctatttttacggcctggacgaggcggaaaccgccctcatcgccgagatcgcgcagtacggcgacctgcaccgccccagccccggcaccctgatcctgtccgacaagcagaagctcctggccgacaagctcgcggccatcctcaacctggccaacaccctcgacgaatcccgcaagggcaagatcggcgaggtgaaggtgcggctggaggaggaacgcctcgtcgtcacggccaaggcgcgggcggagctgctgctcgagcaatgggcctttgacgactgtgcgcctttttttgaggacgtgttcggcattgagccggtgctgatcgtcaaaagcggcctgatgtagggagggagcgacatgaaaaaaacgaccgcattcccctataccaaccgggagctgagctggctggatttcaacgcccgggtgctggaggaggcgtatgaaaaggaaaatcccatcctcgaacggtgcaaatttctggggattaccgcctccaacctggacgaattcttcatggtccgcgtcgccggcctgcaggagcaggtccggtccggatacaaggagccggatccggccggcctgacgccttccgcccagctccgccgtctggaagaggcggtccacgcctttgtcgaacggcagtacaactgcttcgcgcgttccctgcttccccagctgaaaaaacagggtatcaccctgccgggcacagaggagctgaccccggaccagcgggatttcatcgcggagtatttcgaaaaggtgcttttcccggtcctgacccccctggcggtggaccggagccgtccctttcccatgctgtcgaataaaagcctcaatctgggcctccgtctgaaaaaagacggggagaccgcctttgccgtggtccaggtaccgtccatcctgccccgtctggtggagcttccgagtgaaaagggacgggcgttcatccttcaggaagccctgctcagcctccacctgggagatctgttcgagctccacgacatcgacgcggcggcctccttccgtgtcactcgcaacggcgacctctccatcgacgaggaggccgaggatctgctcatcgagatccagcagtccatcaaaaaacgcaagcggggcaagccggtccgcctggagctctcccgccactgcgaccgggagctgcgggagttcctcaccgagatgctccacgtggacgagcgggatatctatgaggtgccggggccgttggacctgaccttctgcttcaagctcagcgggctggacgaccggctccgccttcctcccgtcacgccggtgacaccggcggacttctggggcgtggcggatcccttcgaggcaatccgggaacgggaccgcttcgtccatcatccgtatgaaagcttcgactgtgtggtggatttcgtccgccgggccgcagaggatcccgacgtcctcgccatcaagcagaccctctaccgggtcagcggccagtcccccatcatcgccgccctgatgaaggcggccgacaacggcaagcaggtgacggtgctcgtcgagctcaaggcccgttttgacgaggaaaacaacatccactgggcgctcaagctggaggaagccggctgccatgtcctctacggcctggcgggactcaaaacccactgcaagatcctgctggtcgtccggcgggaggaggatggcctgcgccgctatctccatctcggcaccggcaactacaacgattctaccgcccgcctatacaccgacatggggatgttcacctgccgggaaagctatggcgcagacgcctcttccctgttcaacgtcctcaccgggtattccaggccccctcagtacagccggctggtggccgcgcccgaggggatgcgtcccttcttttaccgcatgatcgagaaagagatccaaaacgcctcccacggcctgccctccggcatcttcgccaaggtcaattccctggtggacccggccgtcatcgcccggctgtacgaggcgtcgcaggcgggggtgccggtgacgctggtggtgcgggggatctgctgcctcgtgcccggcttgcccgggataagctcccatatccgggtgttcagcatcgtcgggcagctgctcgagcacagccggatcttccgctttgaaaacggcgggaactccaaactgtacctcggcagcgccgatctgatgccccgtaacctggataggcgggtggaactgctctttcctgtggaagacgaggacatccgccgccgggtagatgaggcgatcgggctgtttctggccgatacggtgaatgcccgggagctccatgccgacgggacctatgaactgcccgaccgccgcgggcggcaggcggtcaacagccagctcgagctctaccggctggccagggaagctgtcgcccgcagggaacgggaggcggcagaagccggctctccgtacgaggggtaggaacaaaaacatccggagcgatccggcgcatatagaaaagcacggcttgaaagggatgtgtgacgatgttgagaatcggattgttgacgagcggcggagactgccagggcctgaacgccgcgatgagaggcgttgccaaggcgctgtatgaggcgtttgacgaggtggagatccacggtatcctggacggataccgcggcctgatccaggaccggatccgcctgatgaagccggaggatttttccggaatcctgaccctcggcggcactatactgggtacctcccgctgccccttcaaactgatgcgggtcatcggggaggatggcgtcgacaaggtcgaggccatgaaaaacacgataaaaaaacggaaactggactgccttgtgatcctcggtggcaacggcacccacaaaaccgcaaacctcctgcgcgccgaaggggtcaacgtcgtcaccctgcccaaaaccatcgacaacgacctttggggaaccgacatgaccttcggcttccaaagcgcggtggatatcgcggccaacgtcatcgactgcatccacaccaccgccacctctcacggccgggtctttatcgtggaggtcatggggcataaggtgggctggctgaccctgcacgccggcattgccgcgggggcggacatcgtcctcctgcctgaaatcccctatgacatcgaaaaggtcggcagcgcgatcgagcgccgccgcaaacagggcaagcctttctccatcttggctgtggcagagggggcgctttccaagcgagaagccaaaatgagcaaaaaggaactcgccgccgcccggcagaaggaggggcttccctccattgcctaccgcctggtacaggaactggagccctatgtgggcggagaatcccgggtatgcgtgccgggccatttccaacggggcggcgctccctgtgcctatgaccggatgctcgccaccatgctgggggccgctgccgcccgcctgatccgggaggggaaatacgggtatatgtgcgctatcgtcaacaatgaaatcgtccccgtgcccctggaagaggtcgcggggaagctgaaaaaggtgccggtggactgtccggccgtccagatggcccgggaaatcggggtgtctttcggcgactgacgggcttctggcccgtaaacaaaaccccggaaaaggtagccgttcgataaaaatgttgaagggcgtcatcgtgatcacgatgacgccctgttggcttgccttgcttttttgacggtgaaaatgtctgtttgggcaatttcaaaaacactccggcggctcataaacgcataccggacgtgatgtacgccgatgaagacgacaaggacaggcattcagaatcccagcagatgctccaacaggatcttgacgccgatgccgataagaacgataccgcccgcgatttcggcctttttcccgtatttatcgccggtcctgcagccgatctgaaccccggcgagacagagcacaaaggtgacgagggcgatgacgaggcagcagagcagaaaaccgtactgcggcgcgagcagcccggtccgtccggccagggccatcgtaaccccgaccgccatagcgtcgatgctggtggcaatggccatcacgagcaggtttttccagtcggtgggatcccccttggggatgtcgtcgccgtcgccgccccggagaacctcccagagcatcttgccaccgataaagacaagcaggccgaacgcgatccagtggtcgaacgcctcgatctggtgggcgaaggtgtgggcgatgacgtagccgatcacgggcatgagcccctggaaaaggccgaacgcccccgcgagcttgacgcttttagtccatttggtatggcacatcagaatgccgctgctcacggataccgcgaacgcgtccatcgacaggcccaccgccagcaggagcagggtaacgagatccattgaaaaacgagcctcccccatgtatcgacaaattcagacgccggtctctcattatacggcgaaaaaaaacgcctgtcaaccacactttacacatatatgggcaacggaggaaaattatgtggcggagccttgaattcggagaattcccttgacaagatttagggcggaatgcgataatgagggcatgtattttggaaaggcgtggtcaatgtggggaagtataccgccgaggacatcatgcggatggtggaggatgaaaatatccggttcatccgcctgcagttcaccgatatattcggctctttcaagaatatcgccatcaccgcctcccagctggagaaggcgcttcagaacaagtgcatgttcgacggctcctccatcgagggatttgtccggatcgaggagagcgacatgtatctctatcccgatctcgacagcttcgtcatcttcccgtggtatggggaaggggaacgggcggcccgcctgatctgcgacgtgtacaagccggacggcaccccctttgagggcgatccccgcggcctgctcaagaaggtgctccgccaggcggaggagatgggcttttccggattcaatgtggggccggaatgcgagttcttcctgttcaattacgacgaggacgggcatccgaccaccaagtccttcgaccggggcgcgtattttgagctcgggcccaccgacctcggggaaagcgcccgccgggatatgtgcctggcgctcgaggacatgggcttcgagatcgaggcctcccatcacgaatgcgcgaacggccagcacgaaatcgatttcaaatacgccgacgcgctttgtgccgcggacaacatcgtcaccttcaagctggtggtcaaaaccgtcgcccatatgcacaatatgtacgccaccttcatgccgaaaccggtctacggcaaggcgggcagcggcatgcatgtaaacatgtccctgatgaaggacgggaaaaacgcgttttacgaccccgacgattccttgggcctgagcaaaacggcttacagctttatcgcgggcatcctcgaacacgcccgcgggatgtgcgcggtgaccaatccgctggtcaattcctataaacggctggtgtcgggctatgaagcaccggtgtatatcgcctggtcggcgagcaaccgcagcccgttgatccgggtccccgcctcccgcggcatcggcacccgcatcgagctgcgcaatcccgacccctcggccaacccctatctggtgctggcgctctgccttgccgccgggctggacggcatccggagaggcctgatgcccccctcctccaccgacagcaatattttcgaactctcgggtgacgagcgggaggagcgggacatccattccctgccctccaatctcaaggacgccgtgcgcgccatgcggcgggacgaactggtccgggagaccctcggcgagcatattttcggcaagtatgtggaacataaaaccgaggaatgggacgaatacaaaatccgggttaccccctgggagctggaccggtatttggagcggtattgaccgcgggagggaaacgcatggggcgtcctgcggcaaaaacaggaaagtggctggcggccggtctcggctgtgccggcctttttctgttgtgcggcacgcttgtatttctgctgggccgcggatcggtgccggccggtccggccgcgcctccctttgtggcgatagaaccgggctccggggagacggatccgtccacagccggcaccacagcatcctccgcggcggcgtcctatccgtccgtacaaccctccggtgatcccgcccgggagttcaccttccccgaggagggccgcgccgcgctcgacacgctgctggccggatatgaaggggtatccgtcttttaccaggacgtcggttccggcgctgtctacgaataccggtcattggagaaatatcccgccgcgagcgtcgtcaaagccccctattgcctatatgtattggatctcgcatcgcaaggccgggccgacctgaatcagaccttcacctatacggaacagtggatgcggaaggggaccggtaaaatacagaatatgccgttcggcaccgtgctgaccctgcgggaactggtccgctacgccatcgaggagagcgacaacgtggcttttgccctgatccggtcggcgtttccggccgacggctaccgcgcgtatgcggcatcgttcggcctgacgtatccggaggatatccggaatggggcgaattccctcctctgcgcgagggacgcgggtgcctatctggcggcgatcgaccggtttattcggacgaacccctatggcccggagctgaaagcctccctgcagcggacgaaaaaccccatgatccgctcctcctatcccatggcccgcaaatacgggtggatggagggggcctatcacgatatggcgatcgtctacgcgccccatccgtaccggctggcgatcctctcgaaccacgacgaagggacgaaggaggatttgcggatgttccaggagatctcgatgcttatcgaacggtattcggggaatacgtgaaagaggtcggcgcgcaacatgaagcatgttgcgcgccgaccctcaatgatacggtggaaaatgtcagaccgaccagtgacggagctgttttttgagcgggcggcagatcccttccgccgcgaggatgctgatgatcatttcggggatgccgttggtcaggatgatcaggcccagggctcccagcagcagctcatagcccatgccggccgccgccgcgtattcgggcccgaagaagagataggcgcctccaaggacaagaaacgtgttggtcaggctgccgaccgcgccggccacggcaaattcgagtccggctttgtttcggaaaaaggcccggatcccggcaagcgcgccggtcatcttcctcgaatgctgccgggcgcgcagcttgaccagggctttggaaagcccactgtatgtcagccccgcgaaagtgccggtcaggatgcgggggagaaagcagaccaccaaactccagccgttgccctggaattcaccgagcgaataaaacggggtgtagataaaggcgaacatggccgacgtgggcgggggcatgaaggtccagaccaggaagctgaaaagccccgcgaagaagcccatgagggtccccgccccggtgcccagcaggatagcggcgacgatgaccggaagcatggcgaaggtcgccaccatcgggccgatgggcaggctgccgagcggcgtgaagcagaataccgcctcaatcgcgagcagcatggcgaactgaacgagaaacaggatctgtttgcggcccaggggtttgttcttgattttttgcaataaaatctcctcctagctgctgttcccttccgggatacagcgccgtttgtatatatcatcgccttgccccccggcggctgaccggctgaagcgcgtctgctgcctcgccgcagggccgctgatccgggggaacgagacgggattgtctgagaatcagacagccttgcggtttttttcgtagatgatccgcaggccctcgagcagcagggtgtcgtcccgccgaatttcccgccggcagtggacgaagaccacccggccgagtccgccggtgcccacgacggtcaccggatagccgagctcctcctcaatgcgggcggtcatcccttcgatcatggcggcggtgccgaaaacaatgccagattccatgcagtcgttggtgttggagccgaccaccttctccggcgcctgcaggcggatgcggggaaggagggaagctttcgtaatcagggaatccagggaactggaaatgcccggcataatggctcctccacggaacgccccggttttgtccaccaccgacaccttggaagcggttccgaggtcccagatcaggcagggcgctccatatttttttaccgccgccaccgcgccgacgaggagatccgcgccgagtgtggcgggattatcgataaggatgtttataccggtacgggtgccgggcccgacctgcatcgcgagcaccccggtgaccttgcgcaccgccccgtgcagggtctgatcgagcggaggcaccaccgagctgaggatcgccccttcaaagccggcggggtcgacgccgtacaggcggaagatatccagcagctcgaccgcatactgatcctccattttggaccggtcggtggcgatccgggattcaaaaagcagctcggtgtttttgaacacgccgagcgtgatattggtattccccatatcgagcgtcagaagcatcggacatccgcctttcctgctatgaactgccggacccctatccgtgtgccggctgagtttatattatagcatattcgtcaagtgtatgaaaagcccgccggtgcgcccgctttgcacctgccgcacattgccggtgggaaggacgggccccatcttaatcaaaaattcgcccttttttctttgaaatccccttagaaacggcctatactagctttataaatgccgcgtgagggaggggattcatatgccgggctggagcatcctgttctacaccctggccggagccgcggggcttctggcgcttccggtcctcgtctggcatgtggcgattgccttttgcggccttgcgccggcacgccgccgcaagaacctgccggtgccgggccggtaccgctttgccgtgatcgtgtgcgcccggcacgaggaaacggtgatcggccagctgctcgacagcctgaaggcgcaggactatccgcgggaaagctatgaggtgtttgtcatcgcggacaactgcaccggagacgataccgccggcgccgccaaggcgcacggcgcggccgtgtatgaacggtgggaccagcggcggatcggcaaagggtatgctctgcaatgggcgcttagccgcatccgggaggattaccccggacggttcgacgccgtgtgcgtgttcgacgccgacaatctggcggcaccggatttcctgacgaaaatgaacgaggcgctgcaaaatggcgccgacgtcgcgcagggataccgcgagacggtcaatccggaggaaagctgggtcagcggctgttacgcggtttactggatgtttctcatgcggtttttctaccgggcgcggcagacactcggaatgtcctgtatggtctgcggaaccggcttcgcgttcaagatggaggttttggagcccggcggctggaatacccggaccgtgacggaagactgcgagttttccgtccagcagatcaccgccggacggaccatcgcgtttgtggatagggcggtcttttatgatgaacagccgtccggcttcgccacctcgctgcgccagcggtaccgctgggttgtgggcgccgctcaggcgacacgctggtgtatgaaggacgtaggcaggggtatccgggcccggcacaagggatcggtagatatgctgtgctatctgctcgctgtcccggctaccctgctgctgatgctccaggggccgctgctcctgttggcggcgctgctgcagccgctttcgccgctcccgattttatggggaatattgacggggaccgctgtctcctataccgtggccgcgctgattgcgctgctgtgcgtgcacctggagggaaaaagcgtccgccggttgtggaagcccatcctgctttttccgttgttcatgctgccgatgggcttcatggctgtggcggcggccattcatccccgggtcgcctggaagccgatcgtgcatcggcgggcgtcgacaattgacgacgtcctcaaatcctgataaactatacgatatgtccggcggatatggaatcccacggcgccggagtcatgaggaggaatcgagatgttttcacaggagctccaaaacgcggctgtggcacagggctggcgggtgaatccccagacaggtgccgtgacaggtgtgtgcgatggcgtagcgtttcgcgccctggcggaggacgggctttctctggaactgtcggccagtatcggggaaaaacagataccgaagctttcggtgaagttttcccaggcctgtcccggatcttcggtccagcccgccacctgcggcgtccggatcgactgtcccgcatcccctcagacgggagaggcgttcgtttccctggtgcatctggcggccaaaacagcggtgtcgcacatcgaggtggcgcacgacgacaaattcgaacgctatggcgagccgttttacgtttatctgcgcggagcggccggtgcgctcctgggcgcgctggtgggggcggtgccttggtttctgatcgggggcggctggttctcgatgtggctcggtgcactcatcagcatggcctctttctacggctaccggctgttcaagggcgcgcatcacacgacctttgccacggttacagtcgtgctgttttccctgcttgcgatgttcggcgccgagttctgcgggatgctgctcgattatgtgcgcaccggttattatgcggatgtggctcaggcctttgcggccatgatggcgggcctggagggcggcggcctgtggaccttgctgcgcagtatgctggtagggctcatctttgggttgatcgggctgttctccatccgtaaatatatctcggtctatacccatgagccccggttcctgcgcagccggggacacaggcgggataaataaagccaccggcaggtgcgggccccctatgatagggcagccgcccaaaatctcgcgtccttgggggataaccggttttgaaataatccctattatctcaagagaggggcgggcgatatgctgacgctgacacacgagttgagtgatatggtggcggatgctttcgaagggtgcggatacggccgggattgggggcaggtgtcgggttccgaccggctggatctgtgccaattccaatgcaacggcgccttcgcgtgcgcgaaacgctatcataaggcaccgctggcgattgccggggaggtggcggccgttctggcgcggaatcccctgtttgccagggtggacgcggcgccgccgggtttcctcaacctgaccttgtccgatgccgcgcttctcgcccgtctcgccgaactggcggaggacccccatctcgggatcccacaggaaccaggcggcacgatcctgatcgactatggcggtcccaacgtcgcgaaacccctgcacatcggccatctgcgctcggcgatcatcggggaatccctcaagcgcctggccagagctatggggcggacggtgctgggggatgttcatctgggagactggggcctccagatcggcctggtcatcgccgaattaacagaccggcacccggattggcgctgcttttcccccgacttccgtccggatgaggacggcgtcccgtccttgacgccggagctgctcgccgaggtctatcccacagcaagcggccggagcaaggacgaccccgcgttcaaagaaaaggcgcagcgcgccacgggggaattgcagcagggccgggcgggttatctggctctgtggagagagatcctgcgggtgtcggtcggggatctcaagaccaattaccgccgcctgcaggtggatttcgatttgtggtacggggaaagcgacgcggaaccctatgtagaacccctgcttgcccggctgcgggaacgccatctgctgcgcgagagcgagggggccctggtggtcgacgtggaggaggagggagacaaagcccccatgccgcccgtcattgtcaagaaaagcgacagttccagcatatacgccaccaccgacctggcgaccattctgcagcgggaacgcgactttgccccggcggagatctggtacgtggtggataaacggcagagcctgcatttcacccaggtgttccgctgtgcaaagaaagcggggctcgtcccgccttcggcccggctggagcatctcggcttcggcaccatgaacggcagcgacggcaagccctataaaacccgggacggcggagtgatgcggctttcggagtttctggataccgtgacggacgcggccttttccaaaatgggggactcggccttcgtctccaaagaggaggggcccgaaacagcccgccggctggggctcgccgccgtcaaattcggggatctggtgaatcaccggaccaaggattacgttttcgacctggataaattcctggcattcgaggggaaaaccggggtatatctcctctataccctgacccgcatccagtcgattctgaacaaggccggggatccgtccggcacctgtccctccgggatttatacggacgtggagcgggagctggtcctcgctatgctgctgacgggcgatgccttttcccacgcgtttgcggagcgggcaccgaatatcgtatgtgagaacgcataccggatcgcctcggtgttttcccggttttatcacgataaccacattctgggagagacggatccggaccgcagagcctcctggctctccctttgccgcctgaccaaacgcctgctcctcctgcagctcgacgtcctcggcatcgaaccggtcgacagcatgtagcggcgccgcaaaaaagcggggccttatgagaaacttaagacggttcccgtttattcttaaaattttgtccatccgcatatgctacaatgacagggacatcacacacaggaaaagaggtcccgcaccatgcatgaatccgatccctatccatatgatgacgcctatgacccggcagctgtccggaaccagcggatggaacggcgccgccgggaacagcggcgccgttggcgccggctattggtcgtctgtacactggttgccgccgtaccgctgctgatatacgggctttggcggacaggaaggaacgggccggctcccgtcgcctcctccggcggaccgtctgccatcgcgatcccggaatggatcgaccagcagatcatcgacctggacggcgccgccaggaccgggacgcccattggaaggatccgcgatatcgcgatccattatgtagccaatcccggcaccacggcgcggcaaaaccgcaattatttcaatcaaaaaggggtggaggtgagctctcacttcattgtcgggctggagggggaggtcgtgcagtgcgtccctctcgacgaaaaatcctccgcgaccaacgaccggaacatcgacaccatctccatcgaggtctgccacccggacgaaaccgggcggttcaacgatgccgcctatgcctcgctggtcaagctgtgcacctggctgatggggcagtatggactggatgaaacccatctcatccgccattacgatgttacgggcaaactctgtcccctctatttcgtccggcatgaggacgcgtgggagcgtttcaaacaggatgtcgtatcctaccaaaagaacgggacgtacaacgaaaaccgtctgtaaacccccttctatcgacaaataccgttgcgaaaatccaaaaagtttactctgttttttcatgcgcatatatgctataatatccgcaaaggccggcaaggcttttgcggatatttttgcgggtgttcgggaagaaagcgatgcctttcaccccttgtcgcgtttatataggaaccgaagccggcggtgagacacacagattccgcaccgggtggaaagcccacaccgagaggaccgccgcagcaaaagacgggagtgacgagatgccggtcagtatgcaggcagaacagactataacgcagtttctggaacttctggccgctttccgcctgaaagaggccggggagctggtttttgaagatatttggtacgatatccccgggaccgattggttggaggggcgggcaggcctcgagatcctggccgcctatctgcgggcggagcttccggaaggctggaagcaggaggcgccggtccggcgttcattcggagcggacttggaggaaatccgggtcgtgaccggcttgccgggccgccgcctgcgctggaccgccgtcaccggaaaaggtccggcgggctggcgcattcgcagcatacgggttgccctggccgacggtgcggagatgtgggaccgtgtccccttcggcctgcagaaatgccgtctcgacgacgcctgcacctgtctttacctttccgacgcgtttctgcggatggtgggatatacccggcaggagatccgggagctgttcgaggatagcttttaccgcctcctgccgcccgacgacgctgcgcgcgtccggcgatccatcaatgaggccctggatgccggggagtcctccttagagctcgagtaccgtctgcaaaccaaggacggcgggtatatatgggtgcttgacaggacggaggtttttggggaggacgggaccgcttacgcgtattgtgtcatctcggatatcaccccgcagcatactctcaaagcctattatgaaaacatcctggactgcctgcccacccctttaatcgtcaccgaccgtcggaaccgtttaaggctgctcaacaacagcgccctgcatctgatcggcaaacccgccggggaacttctcggccggaacagcgataccctctaccagggggataaaccgtcgtatgttgaaagggacggccgctgttacaaggtggactactcccacctgtacgacgcggagggccgtgaagacgcacacatcgcggtgatgagcgacatcacggccctccgggagatggacgacagcttgaaatccctggccaaaaagatccccggcggggtgtgcgaggtcgcgttcgacgaggacttcaccctcctgtatggcaacgagggcttttatgccatgtacggctatacgccggctgaaatgcgcgaggaactggggaaccgcctgattttggcgatccatcccgaggatgttccccacatccggcaggaggtggctgaggcaggggaacaaaaccgtggattcgaatttgaaaagcgtatctaccgcaaggacgggacgatggtgtgcatgctcacccgcggcaccatctccaggcggcagagcgggcttgtgctcgactgcctcatcctggatattaccgcccggaaaaacatggaacaggagctgcgcctgagcgaggagcgtttccgcattgccctggcgcagacaaccgacattgtcttcgattatgatatgcggcggggtgaggtgctccataccaaccgttcggtggcggtctacgggctgccccaaatcgtggcaggcgcgccccaggccattgtggacagcggcgccgtacagcccgattcggccgaggttttcctcgatatgtaccgccggatcgacgccggggagcagacggcttcctgcataatcggtgccaggcatgccgacgggaagccggtttggaaccgcattacgatgacgaatgtttacgggaccgacggccggcccttccgggcggtcggcatcattgaggatatcacggcccagcgggaggccgaacgccgctttgcggaggaggaacagttccgcgcggcgatgctgtccaaggccatcacatcatatgaggtgaatgtctcgcaaaaccgcctgatccgcggctttgaaaatgaggatacctggttcggcgtcgagctgacggaggattttgaggagctgatgcggcgcttggctgacaaagcggtgcatccggaggaccgggaagccttccttcgggtgcaagattgccggcgtctgctggatgcttttgaaaacggggtacgggaatgcacggccgagtaccgccgccgggaaagcgatggacgctatatctgggcctcctgcgtaatccacctgctaaaagaggccgtgacgggggaactcaagggctttgcctatgtcaccgacatcgacgatcagaaaaagcacgagctgtcgctgcaatacagcgccgaacgggatctgctgaccgggttgtacaaccgtcacacggccgaacggctcatccgggagctcctgcaggccggagaaaaggacgcgctccacgccttcctgatgatcgacctcgacgatttcaaggcggtcaacgatacccttggtcatattttcggcgacgcagtcctctccgagatcgccaaaaaaatccggggcatattccgcaagagcgatatcgtcgggcggatcggcggggacgaatttgtcgtcttcctgcgcgatatcccccaaatcgagcacgcagtggccaaagcggaagagctgtgccgggaattccgggccgcttatgcgggagagaatgggacctataagatttcggggtcgatcggcatcgcgtatttcccgtccgatggggtaacgttcgacgagctgtacggcaaggccgatctggcgctttacgcagcaaagcacaaggggaaagacgcctgcgccgtttatcgcgatgtcctgccagaacacaccggccgtccccggcctctggacgatatcgaaaatacccgggctaaaaacttctccgaaaacgtatcggaatacgttttccggatcctgtatgaggcaaaggatctccagctggcggtggaatcggtcctgaagctgctctgccggcatttcggggtcagccggggctatatcttcgaaaacactgcggatgaccagggctgctccaacaccttcgaatggtgcgacgctggggtagagccccagattgaccggctgcagaatatcagctacgcctcgctcgggggatatgagaaaaattttgcccgggacgatatttacattgttcacagcctcgatgatgtcgccgaagaggaacgggtcgtgctcgaaccgcagggaatccgctccatgctgcagtgcgcgatccggatcgggggccggttcaagggctttatgggagtggatgagtgcaaacagaaccgggtcttcaccttcgacgaaatcgagacccttcggaatgtcgcggggctcctcggcaccttcctgtccaacagacgggccgaggaagcggtccggcagaccaaccgggcgctgcggacggtgatggacaacctcaacagctacacctacgtcgtccggcccggcagctatgaactgctgttcatcaaccagaaaaccctcggggtcgcgcctgggacggctgccggagataaatgctaccgcgcgttttttgggcgggaggagccctgtgccgcctgtccgatgcaggatctacgggaaggggtttcgcagagccggcgggagatctacaacgacctgctggacatctggaccgagactacggcaagcttggtggactggacggacgacgagcgctgctgtctgctcaactgcatcgatatatcggagtataaaccccaggggaaatgaacgaacgggcgccggaggaaatcctccggcgcccttatgatacggcatccgcggttatgcggccaggcgttgaatcgggccatctgaacggcgggagtcaaaccgtacggtcagaagatcctcaatatgggaggccgcgcgaggcctgccttcaagacattccggccgccatatttccgtggcagggcggcaaccggaacggtgtggcgcgcactatgggatccgccgttgcgggagcagcggcccctctgattactagcatacgagctctcgtaaaacgtccttggcgacggtttgtaccgaccgctcaatggaaacggcttcacgcagggctgccgccagcctcacacgcgtgtcccggtcccagctttcttccgggcccgcattgaaagcaaactgttcgctaagacggttgtagggtaccacagctaaaattccatcacacagctcccggtacagcgccgcgatttccaatagctttttcccggcggatccccccgccagaacagcgctttcctccagatacacctgggcgctgcggcgtgcatccaccagaaccccgacatgatagttttcgtttcgccggaagctcttgtattcctcctcttccttgagcaggccgtcgatgagaatttggtaagcggccgctccaaaccggcactcgttcacctcaccgtgcgtaaaatactccaagcaggcctgtagagactgtgtgagaagctccactggtgccttttgacggcatggcttatcgaaaaatttgacaaaacaatcgggataggttccgggataatcgacggcacgccggtatcggttttgggtatgaaaaatgttgtcgctactgtaaaacgggctgtcgggattggttttctgggcgtcaaaataactccttccgaaaaacgtccggccgttttcggcataaccggtgagcaggccccattccggcgggccgatctgccccatacataaaactggccggcccgcgtccaggttctccatgacccgcttgtcccgctgttccgcatcgggaatactgtatagctccaatcccagagcggcatagatgctgtcatcccataccgttccgttctgaaccaacgccgaaccgggacaccaattcggcctcatagcaaaccgatagcaaaggccggatacacccatcagatttcatagctgaccggaatgcccaccacggctgccgcgagggcaatggcgccgcagtaggtattgtctttccactcgccccaattcagcatgggaacgccgtcgatatatcggccattatccgcagttttcaccgagtatgtttgggagtcagaagctctttcggccgctgtttccgctatcgtgataattgccggcttgaccttcggggaatagctttcgggagaagaatcgcattttttagctggttcgctcattttgattatccttattacacgaaaataagtagcccagttgagaaaccacaccatctttaggtatattagccggaacgtatacctcggcatgataatatccaaccgggtaaggaatccctctcccatcagctaaaattctatctctcgtcatcgtataggcctggtcaatcatatcattaaactccccgtagtaaatagctaaagcagcgcaagacgcgggaatatcataatagtcaaagccttctggaaccgaggattccgctttcataaatctgccgacgatataatgcatgggatggttgccatctaaattatcatgatgcattaaagcgcaattgtctcttaataaggaagcgtaattctccatttgatccaaaacagaaaaaatttctccgctttttgcccacataagtccatattgatttcccgcatccgggccgctggctatcacgtctttcccgataaatcgcaaagcgggtagatgcaagtattctaattttgccaatttaacactatggttttgtttcatttcctccgcttcttctaccgttactttttctactagattcactatccagggcttgatcttcggggaatagctttcaggggtttgatccattttcttaacaggctcgttcaattttcattcctcctttaccggttatttggattgtactacaattaaggacggctgtgttatccgtttttgtcatttttcaaccgcttatacagcctcatttggatgtgttcgttatcgtatctgccgttcagaatcgtataaacggcaaaaacaggctcgtcttcatggagaatcgcattctttttcagccataagtccattttctcgctgccgatgcggatatcgccaaaacagtcgtccggcagtacggcatatcggcccgccggcatttggatgaggctcactccgctgttcatatgctgctccggcagtgccgttatccggaaaccgccgccgcattcgagcccgcacgcataaacgctgtcatatatgcaaacataaaagttttgggcatggcgaatcagcaatggatggtgctcctgcagaaaagataccaccttttcggaggcttttctctcggcgttatacccactctctttcgcggcgataaatgtccgctccggttctgttgtaatggtaatgtgctgctccgtttttcgttttttgacaggcaggtataacttcaacttccgcggtttaccgttttgaaagagatattcctcaaaataccggtcaccggatttctcgaacatactggcggaaagccagttatgatacaaataattccatccgtcgttgatttctgattctttataattaacggtacaggtggcgtacagatccgtgttgccttcgccgggtttctccgtcatcacttcatagcacaatcggcttccgacctgtttgccattccggccgaaaacccggccggaaatctcccccgccgccgcaagcgccctgtcctcaataccggtcaggcagtaatcgtaaaaacgcatcgtattgcatggaggaatcgtttccatacccaccttgatggcaaggctcatttcatccagcacaaaaggataaaaataaaaatagctgtcgttcctccggtattcgagtggggtcatgccaacggtgcttctgaactgtttataaaaagcctggatcgtctgatatccgctttcatccgcgataacagtgagaggcagctcggaacacttgattttttcacaagcgtttgaaatgcggcgtttacggatgtattccttaacggaatggcctgtaaaagcgtaaaaatcccggtataactgactcaccgagatgaagtgtccgccggctatgctttcgggtttcaagtcctccgataaatggtcttcaatataggaaagcatcgcatggatatacgcacgtttttgcataggtcacctcgcagcttgtccttatgtacggattatatcacgccttcatccgcaacacaattccagatgcgttggatttcccggtttttggtgcgtggcccccgtttttgtactgttagaaagactacgtaaaagggccctctttggtcctggcaggtaaaagagggccctttcatttatgcttaaacataaaaaatcccctcccgcgagcacgggaggggagaaagcggaaatcttacttgagctcgaccttggcgccggcttcttccagcttcttcttgatctcttcggcgtcgtccttgccggcgccttccttgacgggcttcggagcgccgtccaccagatccttggcttccttcaggccgaggccggtgatctcacggacaaccttgatgacgttgatcttgttggggccgacttcggcgagaaccacgtcaaactcggtcttctcttccgcggcggcggcagcggccggggcggcagcggcggcgacagccaccggggcggcggcggaaacgccaaattcctcttcgagagccttaaccagttcggacagctccatcacggtgagagccttgacatcttcgataagcttcagcactttatcagacatgttctgttcctccaatttttatgaaatggtttgtgtgataaccggcgccgtcaggcgctctgtttttcggcgatggcgttcagcgccaccaccagcccccgcaggttcgcactgagcacgttggcaaagccgctgatcggggcgttcaggccgccgaggaccttggcgacgaggacctccttgggaggcatcttagccagttcctggacctctttcgcgtcaatggccttcccctcgacgaagcccgccttgatttcaaaattcttgctcttctcggcgtattcgcaaaggattttggctgcggccacatgatcggtcgggctgaccgcgagagccgtagcgccttcaagtacgctgtcgagtccgttcaagccgaccttttcagccgcgcggcgcagcatggtgttcttgacgaccgcgtaatccacgccggcctcgcgcagctttttgcgcagggcggtatcgtccgcgacagtgatgccctgatagttgaccaccacgccggcgaccgaaccatccagcttctctgcgagcttcgcgacaaattcctgcttatcctgcaaaaccttctcgcttggcaaatgttttcacctccgttcggtttctgccggttctcccaaaagaaaagccctctccgtgagccacagagagggcggtacatgcatcggatagttcctcccgcacaaaaccgtccggaaagaaaaccaactcatgctctgcctcggcaggcggcggtggcccgcgcttacacgttcccaaacgaaacgcacctgctgtctgtggaagaacagcgatattcagtatacctcacgccgccgtgtctgtcaagaggattcttgcggacggcagaggcgaggtcaacccaccttggcgggattgatcttgacgcccgggcccatggtggaggccaccacgcaggagcggatatactggcccttggcagcggcgggcttcgccttgacgatggcgccgagcagggtgtcgaagttctcctgcagcttttcggtgccgaaggacaccttaccgatggggcaatggatgatgttggtcttatcgagccggtactcgatcttaccggccttggcatcggtgacggccttggcgacatccggggtgacggtgccggccttggggttgggcatcaggccgcgggggccgagcaccttaccgagacggccaaccacacccatcatatcggggctggcgatgacgacgtcgaaatccatccagccgccctgaattttggcgacgagctcctcagcgcccacaaaatcggcgcccgcgtcggtagcggcctgctgcttgtcgcccttggcaaacaccagcacccggacctttttgccggtgccgtgaggcagcacgacggcgccgcggacctgctggtcggcatgacgggaatcgacgcccaggcggacatggacttccacagtctcatcgaattttgctttgccggtttttaccgcgagatcgagcgcctccgacacctcatagagggtggtacggtcgatcagtttggcgttatcggtatattttttcccatgtttcatcggttaatcctccctgttggaccctcgcgcgaagcgaaggttgagtggtaaaatcggaatgctcggttgttcctcccacccggaacgggtctgctcagtcgacaacctcaatgcccatgctgcgggcggtgccggcgaccatgctcatggccgactcgacgctcgcggcgttcagatcgggcattttggtttcggcgattttgcggacctgctccttcgtgatcttcgcgaccttggtcttgttgggaacgccggaggccttgtcgatgccgcaggccttcttgatgagaacggccgcggggggcgtcttggtgatgaaggtaaaggagcggtcggcatacaccgtgatgacgacagggatcacgaggcccacatcgttcttggtgcgctcgttgaattcctttgtaaaggccatgatgttcacgccgtgctggccgagggccggcccgacagggggcgccggcgtggccttgccggccggaatctgcagtttgatatacccggtgatcttttgagccattttacttgcacctccaataatcgtggtggatgacggcggagccggccggccccgcctcccacagccggaagagtgtccggcgcacaggtaaagcatggcgaacccatgctcaaaaccgtctcacaatcacgtatgcggccgcgttcagccagccaagccggctcaatcgagcagctcggcctgatccagcttgagctcgacgggcgtttcccgcccgaacatggaaatggtgacccgcaccttattcttctcccggtcgacctcatccacatggccggagaaattctccagcggtccatcgatgatccggaccatgtcgcccacgtcgtaattgacctcgacctcgcgcttttcgacccccagggcggcgacctcttcctccgtcagaggagtcggcttcccattggggccgacgaagcccgtgcagccgcgggtgttgcgcaccacataccaggaatcatcggtcatcaccattttcaccagcacgtagccggggaaaattttgcgttccacctcgcgtttttttccgtccttgatctcggtaacggtctcggtggggacagcgatttcctgaatccaatcctggagtttccggttttccacaatggtttccaggttcgtggcgaccttgttctcatagccggaataggtatggcatacataccatttcgcttcctcggacatccactaggcctccctgcctactgccgcaggggtttagcccaacgacacgagtaattggatcagtttgcccaggccgaaatcgatgacacaaatgaccaggcccatgatcgcgcacatcgccagcgtcacaccggtattgcgcagcaccgtggggaaggtgggccagatgatcttcttgaattcgcccctgagatcccggaagtatttggcgatccgtttgccgaggccacggccttttttcttggcgggcttggcatccttgccgtccttagcggacttctggaccttctcttccggttggttatcggttttcacgatcttttcatcagccatgcgtacccctcttttcgtttcaggttaaccggcggccaaagcgggggatccccctcacttggtctcgcggtgcagggtgtgcttacggcagaaccggcaatacttgttcatttccagccggtcgggatcgttcttcttgtttttcatggtgttgtagttgcgctgcttgcattccgtgcaggccagggtgattttgactctcataacggcacctccgacagctcccgcaaaagcgggatgatttgaagcctccctcaggggttggacgtccaaatttgggcgcaaaaaaataaaaccccttttgaggtgattcaataatagcacagttttgtaaagcggtcaaggatttttttcatttttttaccgctttatccatatcatccggcccccagcgggcgcatttagggtttattgccatccatgtcttccggccccggggcgcttttggcgcgtttgacgtatgaaacgataggcatatgcccggccccggggatatgagggccgccgtccttaatccccggctggaagcagaggggggccgtccccctctgggtggccggcccggcgtctcgttaccggggagtatccgccgcactggggagaggctccggccggccgcctctttccattgagaacacatggtccacgatccgggcggccacatccaccccgctgcaggccgataccgctgccataaaggcattggaattgacctcacagacaagggggccgtctctgccgaacagcaagtccacccccgcgaaatccaggcccaaaatccggcagcagcgcaccgcgagctcttcctcctcccgggaaggccgataggccagggcatgtccaccgctgccgatattggcccggaaatcggacgtcgaacggcgttccatcgccgcttccggccggccgccgaccacataaatcctcacatcccggccggcgctttcggcaatatagcgctgcgccaggaagggacgaggccccatggtacgcgccagccggcaaaagtcctcaccggtttcagccagatacacctgcccgccgagggaaccgaagcactccttgaccaccaggggaaagcccagccgcgccgccgcctcttccaaaaacgccgcctccggcccggccatatgatcgtaagtcatgggggccaccagggtttccggcatgggaatacccgcgcggcaaagggccagctgggtcgccgccttgtcgtcgcagagcgcgaccgccccggcgcggttgtagagccggacgccgcaggcctccatcgccctcgccagccggatatccttatcccagaacagggcgaaatccgcgccggacaaataccgcccctcccccatcgtgacccgcacggtatcgcccaggagcgcagtcaggcgggaattgggaaccggtgtcagcaccgatccgcgctctccggccgcccgctggagccgtgcgaccggctccggcggtccggagggattccagaagccgttgtaaacgatatatcccgccatgcgcctcccccttccgggcatcaggtatagctgtgctccactgtggccacgataaacagccgcggatccagccgctggacccgccgctcgatttcctgcccgagcggcgtatcctctttatatccgtaaggcaccaccaggtcgaaaatcagattggtgtgcgtctctccgaacaccacccggaaatcgtgcatctccagccgttcatcgatatccctcaaaacggcctcgacgagctggcggagggtctccacccgttcgtcctcggtgtcgaccggatccatgtggatgcaggcgatggcatggaatttccgcatcagttccttttcgatgcagtcgatccggtcatggctgcgcatcatgtcctcccggcaggggacctccgcgtgcagggagagcacgcaccggcccgggccgtagttgtggaccatgacgtcatgcaccccgacaatcccttcgtaggacagcaccatctccttgatgccccggaccatatccggatcgggcgcctgcccgagcagaggggacaccgcctcccgcacaatggagaagccggaccagatcacgaacagcgccacggcagcgcctacatatccgtcgaccgccacaccggtcccccatccgaccagagaggacaagagcaccaccccagtgcagatcacgtcgttccggctgtccgtcgccgccgccttcagggtctcggagcggatgatgccaccgattttacggttgaacagcgccatccagagcttgacgaggatggacatcgccagaatcacgatcgacaagaccgaaatggccgtaggcgtcggatgcagaattttatctaccgccgatttggccagctcgaagcccgccaccataatgagcgccgcgacggcgagggcggagaggtactccatccgtccgtggccgaagggatgctccttgtccggaggggcggacgagagtttgaagcccaccagggtaacgatggaagagcctgcgtcggacaggttgttgaacgcgtcggccacgatcgccaggctgccggagagcaggcccgcggcgagcttggccgcaaacagcaggacgttggccgtgagccccgaggccccggccagccgcccataggcatatcgcacccggtcattgtccacgtcctcccggtttttgacaaacgtgcggataagcgcctcggtcagcatgcgagtccctccattctcgcgatcgccatggccacgccgtcctcgtcgttgcccccgatgacctcatccgcctgcgccttggcttccggaaggccgttcgccacgacacaggccacgtcggcggccttcagcatgggcaggtcgttgagattgtccccgaaggcaaccacccgcgtggcgcccagacgttcccggagagaccgcatcgcggcgtctttgcccgccccggcgtggaaaatctccataaaccagttgttctccatatagacgtcccgatacaccacagtctggatgcccgggacatcccgcaacgccgccgccagcgcttccattttctcgcgggtatcctgcatggaaaaataaaatccacccgtctccggttcataggccggcaggatccggatgcagccggggaaacgggcgttgcgcttgtccatgaatgcccgctccccttccgaggtcaccccggtggagacgcccatcacctcgtctgcgtgaacctgatacagcagcggcgttttgccgtaacccgcacagatgtccaacacccgccggatagtgtccggggaaagggcgcgcgtctcgaccaccttccgccgcgacatgtcgtacagcatcgatccgttgcccagcacaaacggcacgttccatttcacgccgctgaggtccagcagattcagcccgatgaggatacgggccgtcgcagccgtaaagaggcctccggcatcgatcagtcggcccaggatgtccacggttttcggggtcaggcaggctccgggcgccagcagtgtcccgtccaggtcgctgatatacagggttttctccgtcatcgtcccaatcctcatttcacaggaagaatatccggctcgccgtcgagggagcggaataaaaaatcaaaatacggggatccgtaatgatgaaaacggcggcgcttcaccatctccatgagctgcccgcgggagacccagcgggcgtcggcgacctcctctttctgcaggcggagggccgacagcggcacatcccgccggagccgccaaagatcgcacaaagagttgcggcggcgcagacggccgagccgtttgagttcggaaggggcggcctcgatccccagctcctccgacagctcgcgcgcggcggccgtcaggctgtcctcccccgccagggcggagcctccggtcaccgcccaggtatccggcatcagtttgagatgcggggcacgtttctggatgagcaggcggcccttggaatcctccacccagatgtggaccaccagatgatattgccctggccggagcttgtccccccgtaccagtgtttgtcccaaaggacggccgtcgccgtccagcaaatcccatttttccatagccaagcggcctcccttccccggcgggttccttctcatcggccggagacaacgtactctttatgttaatccatttaaaaggaaatgtctagactttcctttcgaaatccgttccaaaatccctgcccggcaccatttttcatcgtcccgcgtatagtttttccaagagtgttcatactagcttacgtctccgctcctgtccgggaaaagaggatgccgtctccgacctgcgcgtggccccttctgcttgaccgtgcgcacacccgcaaaagcgaaaaaaacttcgaaaaaagatggaaattcgctcttgacattcggggggatatcgtgtatgatattcaagcagttccggtatgcaccattagctcagttggtagagcacctgactcttaatcagggtgtcccgggttcgag

SEQ ID NO: 2200 - DNA, 3217 bp, Unknown
  16S sequences of unknown bacteria
tgccacatgaaacgccaaaatcaacttactttccatatcaaaagccggctgataaaattgagcgtcggtggcgccggtcataacatagggcgagcagggcagcccggggaaggtttcggaaatgaccttttcaacggttttataggcttcgccgtttatgtcgacgggctttgtgaaatcgttggagtggacgacctgcgtctcaagaccgtgcttttttgcaaggctttcgattatttcaaggctttccttttcgccctggtggggtataaatctcatgttggcgccgagagttgcctcctggggaatgacgttataggcttccgagcccgattgcattgtaaaggcaatggtggttttgagcatggcgccggcttgggcgcttatggagggcatgagagcggttaaaaggggtttgaaaagccaaaggtttccgaaaagaaatctcagcccgaagggggcatagggcgcaagggccttgaacatggaggaaacctcgggggacattttcgatttgaaaggatgctttgtttcaacctcgtttacaaaagcggcgaggcgggcgacgggagtgtcctttgtgggggcgcttgcgtggccgccggtgctttttgccgtgaatttaacgtcggccttgcccttttcgaaaattcccaccatggcgaaattaccgtgaataccgccgattggctcggaaattatggctccaccctcgtcgcaaacaaggaacagctcgacgccgcgtcttttaagctcgtccacgattttcggagcgccgtctcccgcccattcctcggtgcaggaggaggcaagatagacgtcgacgggaggggtgtattcttcgcccagcagctgctcgacagcctcgaaaaaggccatgaccgagcattttgtgtcggccgtgcctctgccgaaaacctttccgttttctatgtctcccgaaaagggctcgtgctcccattttccttcggcgggaacaacgtcctgatggctcatgagaagaatgggctttttgtcgctttttcctttccagaaaaagagcagattgccgtcgatttcggtcttttcaaggcgctcgtgaacaaggggaaaaaggttttttaaaacctcgtgaaagccgagaaatttttcccgttcatccacgcccgcgtgggaagtggtgtcatatttgaccatttccgacagctttttcgcaaggcggagcgattcctcctcgtcttcattcggggcatacagagaaaccttctttttgccgagcagcgtgtgaacaagggcaatcaaaagcagcagggcgattagactcaaaacgcacagcggaattatccataaaagcttcaattctcttcatcctttctttctcttttgtaaaggagcagggcgatgccgattgcaatggcgcccgagggaattatcataaagcttgtggaggaggtgagggaggggaggaaaataaagagcaggctcatgataacgaggggagcaacggccacctttatgttcttgcgatagtacttatatgccatggcgccgaaaagagccggcacaacgttatcaaaagcaggctgaagagcggggctttcaagcaccggtttcagcggggtgagtattgccacgcccaccgcaagcaccaaaatggtgacgagagacgaggtggcgatggaaagggtggaaataatttcgttttccttggtgccggttttcgctcccaccatgtctcttgcgttgacggcgcaggggattttcatgtttatgagatttcctgttatgaatgcaaggtatccgccgcccgagccgagcatcggggtgtatataagaaattcggcaatgctgcttacaaaccagattattcctaccgaaaagaagccctttgccgtggccgaaaggtcgggcatggcgccgagatattttccgataagaaagggagcgcccacaagcattataagcgcggcgatgcttgccgtgcggccgattatgtgagtctgtctgctgtatttttcccagcttgaattgttttgtccgttcatattttgccctccttaaacaagtcccgcgacaactgccgccgccatgccgacgagcatactgaccgctaccgagaagttttccacccaggcgaatttttcctttttggacaggaagataaacagcgccataaccgccgccgacacggcaacgactatgaggggaataaggcttcccttaaaggtgaaaagtccttccgacgaaacaaaggagcctatatagcttccgatgtatgcgctgacaaggccgatgaacatggccgtcatggccgtgtcgccgaatcccgcagcgaggccgccgctttttccgcccgagccgagctttttggtgtattttttgttgaacagcaccgacagcagcataccccatataatgcacacgctcatgagcagggcaattgtggcaaagcccgaggcggtcatttcggcggaggaaagggacgacattcccgtttgctcggccgccgcctgagccacctgcgtttcatagtggagggcaccgattaccgaaaggcggagccacggccaagggattccgagacttcccgcaagggcgataactccgagaagtatgccgatactcggcagcaccgagaaggttgcgcttgatacgatgacccgtttcatttttgttgtgtccatgccgagagcctttccctggcggtaggctctgaccatgaaaatcacacagaccaccgccacaaaggcgatgattccgccgcatatggcgtagagaggcgcgctgttaagcttatccatgacagacattgcaaaatctcctttgatttttctttcattatataacattttccaccctcgggcaagatgtttataaaacaaaaacccgctcggcggcaaccgagcgggaaaaggacaaagaatgtgattatttaagtttatgctctttaagtttgcaggaacttacgaccagctttgaaagcaccacaagggcaaggacgttgggaattaccatgagattgttgaacatatcggtcatttcccaaacaaggtcgttggagagtaccgagccgaggaagatgaaaacaatggcaagcagagaatagataaggtcggatttcttgccgaagaggtaatgaacgtttattctgccgaaaaggttccagccgagaatggtggagaaagcgaagaagagcatgcgcgtctgccaattccgccactcctgcgaacaagcatta

SEQ ID NO: 2201 - DNA, 4060 bp, Unknown
  16S sequences of unknown bacteria
gggcactccgccccgagcgagaggtcgggcagctcttcgtcgagccccagccagacgccgtagtcgccaaactgcaggtcgccctcgaggagcgtcgtcttgacccctgcacgggcggcgaggcacgcgcacagaagcgcgatcgtgctctttcccgcgcctccgctcgccgagacgacggtcatgagcggagcagtgcgcatatcgctcgtgtacccgcgcatcagctgccccctttcgcgttgtcggtgccgcttggcagcacgaagtggatggtccccttcgatgacgccgtgatcagctcgctcacacttgcaggcgtcaccgcgagcgtcacccaggtgatctgctgcttcgtgttggggttttcgctcgtgctcgtctcgagcacgaggatcttctggccgaggagcaccacctctccctcggcggtctcgacgtacacgtcgacgaacgaccctttctgtatggcgccgccaaccgcgagcacgtcgtcggaggaaacgctcaccgccgacagccccacgggcacggcaatacgcgatgccccgcctccgacgcggtcgagcatgatcggctcgtttttcttgatgtctgcctgcgccaccttgcccgtgacctggtcgacggaagttgccgcctccccctgcgcgagcagatcgacaagccactcctgcgtcgtgacattggattcgtccactgcgcttccaacggggatatctttcgtggcgaccacgacctccacgcgttcgcccccgtagttgtgtatcgccgccgcacgtgccatggcagcctcggaattgaccgaggccgtatatgcgaacacgcccagtaccgcaacagccgcgcagaccacggagatgatcgtctgcctgcgttgtcttgccatgtcgcctcctcattcgtcgtaggtaacgcatgagtgactatcgcttgaaacgacctgccaaaaccaccccgcaaagtctgagcacttcgcaggctcagccacgagctcattccgagccaaacaagagcccgctccgaccagcacccggccaggaacagagacgcaccgctcaagggctcgcggaaaacaccagtttttcgggcatgaaaaaaagccgcaccctaaaggggcacggctttcgcgcgcttcttgttgtccgcctggctacttcatcagcatcgtcactgccgggaagcagaacgcgaagatgagcagcacgcagatgaggacggaaaacacggtgacgacgacgcgcttgcgcttttccgccttcagcctgcggtattcctccgcgcgtgcggcctcgaccttgtcgtgctgggtctgctttttgtacttctgtgccatgtgctcttcgtctttctacctgttgaaacggtcgcggcggtcttcgctcgcgctgtccagcatcgcctcgcgcagctcgtcgttgtcgacgttggcgcggatgcgctcgcgcagctcgttggcgcgcgcgacgatgccgtcacggtcgacgccggagacgtgcgtgaaattgtcgtacaagatcttgccgtcgatcatcgtcatcttgacgttgtcctggtttgccgtgtagatgaccgcgctctcggggttgttggtcgggttctggtgcgagttgtgcaggtcgaccgcgatgatgtccgccttcttgccgatctcgagcgagccgatgctgttctcgacgtgcagcgcgcgggcgccgttgatggtcgccatgcgcagcatctggtcagaacgcaggtggatgcgcctatcggggctggtcgcgcgggtgatcatcaggccggtgtgcatctcgtcgatcatgtccgtcgtatcgaccgccgccggggagtcggtgccaaggccgacggtgatgccggccgccaagaacttgatgagcggcgccgagcccatgctgagcttggcgttgatgcgcgggcagtacgcgatgtcgacgcccttttccgcgagcgtcgcgatatcctcgtcgtccacgtgcacacagtgcacggccagcatctcgggcacgtccaggatgtcccagttggagacgtatttgaccggcgagacgcctgcgggcagccacggcgggtacgcctcgctcaggcggtggttctcgtgctcggacgtgtggacggaaaacggcgaggagccatagcggatgaagtcgtcttcttcgtggctgcccgcaaggtgcatggcaaccgggacgccgttctcgttggcgtagcgcgcgatggagctgaacaccttgggatggcacgagtagatggggccggacgcgatgccaaactggatgcgcgagctcgtgtcctgctcgcgccaggccttgatgtcgtcaacgccctcctgcacgacggcatcggcatggtcgccgtggatggtcatgacctcgcggtagatacgggcgcgcaggccgatttcggatgcggccacgaaagagctgcccgtcgaggtgatgtcggcgatggtcgtgatgccggacgcgacggcctcgagcgagcccaggcgcgccgagtcaatccaatcctgcggcgtgaaaagcacctcgcggcgcaggaccgcgcgtttccagtcggaatacggcaggtcgccgaacatgccgcgcagcgccgtgtagcccaggtgcgtgtgcacgtcgacgaagccaggcatgagggcggaaagccccatgtcgcgtacttcctcgtccgggtacttggccttcaggaactcggcggggccgacatcggcgatctcgtcccctctgacgagcacggcaccgtcttcgatgaacggggcggtaaccggtatgacgtacttcgcagtaaacagcatcgtgttctcccgttacgctttcctggcgtctttcttgctggcgtctttcgcatcggcgtcgtcgtgctttgcggcgtccgtttccttcttgtcccacggcatgcgacgcttggcgcccttctgctcggcctgcgccttctcgctcagcgcgatttgctggtcgagcttgcgcttctcgctcttcgagaggtgctgggcccgtgcctgctgcgccttgcgcagggggcggatcttcttgaagtcgatgaacagcgcgaagatgatggccgcgtacccgatgacgatgccggcaatgctgagcggctgcatgaggtcgtggaactgctgcgagacctcgccgttgttgccgtagatcgaggcgagccacgacgcgagcacgcacacgatggcgacgacgagcgagacgacccaccagcggcgccacttcttgtactcgggcagcgcctgcgtgcccaccgtgagcagggcctcgcgcttgcggtcctgcgcggcctcggccttctccttctccttgcgctccttgtccttttgcttcttgcgggcgcggtcggtggtcacggacacggacgcgcctgcgggcttgacgagctttgccgagctcgcggacttgcgggtcttgcccttgggccgttcctggttgcgcggattcatcgggttacgttgagtcattcagtgcttacctttcaaaacctctcgaaaaagcatcggcggcgcaaacgtcgcgctacgcctgggcagggacgaacttctcgcccgtgatgagctcgtaggcctggatatacttctgggacgtcttctcgatgatgtcggcgggaagatgcggcgggttgcccgtgcggtcccagttggcgttgagccaatcgcgcacgaactgcttgtcaaagctcgactggctcttgccgggctcgtactcgtcttgtggccagaagcgcgacgagtccggcgtgatgacctcgtcggccaaggtgagcttgccgtcgaccaggccaaactcgaatttcgtgtcggcgatgatgatgccgcgctgggccgcgtagtcggcggccgtctgatagaccttgagcgaggcgccgcgaagcgcggccgcgtctttctctcccaacatctccacggtgcgctcgaacgaaacgttttcgtcgtggtcgccgatctctgccttggtggagggagtgtagatcggggtgggcagcttgctggagttcacgaggccggccggaagctcgataccgcagaccgtgccggacttctcgtattctttcaggcccg

SEQ ID NO: 2202 - DNA, 20454 bp, Unknown
  16S sequences of unknown bacteria
aaacgcggggaggaacattttatgagcagaaaatttttcgtgaaatttttggtcgtgctcgcctttttggcggcggccgttttgtggcttttgtccgtattggtgcccgacaccttcggctttttcaatcttaactgggcggtcgcgctctttgcgggcgtgggcggtttggcattcctctttaacgggtttgcggaaaagaacagcgttacgctgaaaaaaatgaacattatcctcggcgcgtgccttctggtcattgccgcggtctgcatcgctttcgcgctggcgctgccgaaaaacctcgtgtggcccatcatcgccgtgatccttgctgcggcgctcgtcatcggactgttcgctacgggcggcaaaaagtgggacgagggcgacaatcacaaagcgggctacaaaaattattacgagcgcaaaaaagaagaaaagaataaagaagataagtaagatacaaaaaaggacggcgttatcgccgtccatttgtttacaaagcggttttcgtatgctataatgtaccataaaaaaagcggctgggagtgagatggaaacgacagaaaacacgctgaaacgcatcgggcaggagcagattttgcgctattggggcgaattgaacgaaagcgaaaaaaaatcgttggaggcgcaggtacggggcaccgactggtcggtgctggaaaatctggcgcatcccgaaaatttaagcggaaagggaaagatcgagccgatttcgggtttgcgcgcgaaagagatcgaagcgcggcgcgaagagtttttcgcgctcgggaaagaggcgatcaaaaaaggcaaagtcagcgcggtgctgcttgcgggcgggcagggcacgcggctgggaacggacgcgcccaagggcacgttcgatatcggcataacgcgtccgctgtatatatttcagcagcagatcgaaaacttattggaagtcacgaacgagtgcggcgcgtacgtgccgctgtacgtgatgacaagcgaaaagaacaacgacgaaacggttgctttctggaaagaaaagaactatttcggatatcccgcgcagtacgtgcggtttttcaaacaggatatggcgcccgcggtggatttttcgggtaaagtgattctggaaggcaaggcgaatatcgcgctttcgcccaacgggaacggcgggtggtactcgtcgcttgcgcggtgcgggcttttaagcgagatccgcgcgcggggcatagagtggctgaacgcgttcgcggtggacaacgtattgcagcggatcgcggatcccgtattcgtgggggcgtgcatcgcggagggcgtgaactgcgggtctaaggtggtatgcaaagcggagccgcacgaaaaagtgggcgtgctgtgtctggaagacggaaagccgaatattatagaatattacgaactcaccgaagaaatggcgaacgcgcgggacgaaaagggcgatttgcagtatatttacggcgtaatattgaattatctgttccgtctggaaaaattggacgaagtggcggacgcaaaaattcccgtgcacgtggtgaagaaaaaggtgccgtatctcagcgaggcgggcgaactcgtcaagccgcagacggaaaacgggtataagtttgaaacgctgatactcgacatgatcaaactgatggaaacgtgcctgccgttcgaagtggtacgcgagagagaatttgctcccatcaaaaaccgaacgggcgtggacagcgtggaaaccgcgcgcgaactgctgcaaaagaacgggatcgtattataagaaaaaacgcaccccagatttgagaggtgcgtttttttaatcttctcttcccacgagatggtcgagggaacaatccaactgtttggctaagtatatgatagtatcaagttgactgtctgtgccgtttttccatttttgaaaataggaatcttttatttgcgtatgtgttccgatataatagcgagtaattcctttttcattcattactttacgcaagtttttgtaaaaaggcgggcatacttttggagaaaccgtaatacgttcttctgtcagaccagcgagaaaatctaatgaacaagtaaaaaagtccgctaattttatagcattcgataaataaatggttctgctgccgttacaccatgcacgcaccgcagaacctgctactccgattgcctttgctaaactttcggattttatattatcacaataaaacatcaattctttgagtctttcagaaaatttttccatataaaaattatcctaccaacttagacaaaatgcttgcattgtcttagatagtaggatataatatcattatcagcaaaaggagaaaaactatgcaaaaattaacgagcgacgacgttgcgggcgaaatttacaagattttacgcaataaaaacggttggctcgtgcaaacttcgtgctcgggcgaaaacgcgcacttgcagatcaccgcggacgacggaagttcgttcatcgtctatatttcgccgctttcgcccttgccttccgacgaggaagaccgcgccgccgacgccttatggaacaaaatcaaaaaaagaatttccaaagaacaaaagtaaaagagcgctgcccgcaaacggggcagcgctttttcatttttgtcagttacattggaaaatccgcttctttcgcgctataatggggcagaggtcgaaagtggaggttttctatgatcatttatgccgacggcaacggaaaaattctcaatgccgtgcaggaacgcgtctttcagggcgcggcgggctcgtaccgcctggggttggtttctcctttccccgaaaccgacgcggtcaccgcgtcgttcactttgtcgggcggcaaaacctgcccgcccgtccttttatcaaccgacttttccctttcgggtatccgcgacgacaacggcgcgccgctcgtcgttcgcagcgcgctctttccttcgcccgtgctttccgaacacggcagagtcaaagtgcagttccacgtgcgctataacgggcaggcgggcgcagagatctttgccctcgaacccttcgtctttaccgtcgaacgcggcgtgcgcgaaaatcttcccgaatcgccctcggacgacgtgtacggccgcctgctttccgccgtttcgtcgctcaatgcggacgtactggacgggcgctacggggcgcgctcgctctattgctggaaagaggattcgtcctacggaaaaggggaactcgtgttcgccgtgcgggacggcggcgaaggctgtatcgtgcgctcgctcgtcgcagaaaacgcgcagccgccctttgccgacggtcaactcaaccgcggttactggcagacggcgctcgatttttccgaaatgaccgccgcgcacctctcttcgctcgaaaaggtgaaagcggaggcgcaggcgctcgcggaaaagagcaaaacagaggcgaaccgcgccgagagttatgcggaaaaactggctcagatggcgggaatgcgcgtggaaacggtggaaaatctgcccgcgcgcggcgagagcggcgttctgtacctgcgcgtggacgacgcgggggaaagcctgttcgaactgtttacgtatgcgtcgggcgcatggcagagtaaagggagcgtcgctttgcatctttcgggcagccgcgcgttcgcattcacgctcaaagcgcaaaactgggcgcaaaacaagcaagtctttaccgcggaagggcttgcggcggcggaaatatccgtgtatcccgacgacgattcggcaaaggaatatctgacgtgcggcgtcgaagcgtcggcagaaagcggaaacgtggtatttacggcgaaacgcgcgccccaaagcgacctcggggtgacgctcgtcgccgcgccgatgaccgacgaactgtacgcgggatattattccaaaagggaaacggacgctgccctcaccgccaagcaggacgttctgtcgttcgacgccgcgcctacgcaagatagcaccaacgcgctcagtagcggcgcggtttatctggctttggaagacgtgcgcgcggagatccaggaaaaaacgcccaaatacgaggcgggcaagggcctcgccaagacggacaataccttttcggtggtgctggacgccgcgtccgacgaggcgctgcggctcacgagcgcgggactcaggctggatctcagtgattattccacgacggtggaatcggataccaaactttcgggagcctatacgcgcatcaattcggtggcaacgctggcggagggcaacgcggagcgcattgcggcggcggagcaaacggcgcagaaccatgaagaaacgctttccgcgctggaaacgcaggcggcgggaatgctcgggcgcatcaccgcgctggaagagggtgcgtcctttacggaagaactcgtcttgcccgtatcggcgtggcagaacaagacggcggtattcgattctgcggcgcttgcggcgctttcctctctcacggcgggaagtttcgtgggcgcggcgcccgcggcgggatacgcggcggcgtttttgaaaaacaacgtgcggctggtttccgtcggcgcgggcacgctcacgtttacggcggacaccgtgccgtcaacggaactgcgcgctattttgacggcggttatataaggagtgaaatatgagagtgaaaaatcctgccacggtgcagatgatacgggatattatagaggggaacacgccgcccgcgcgcgtgcccgagagcgaaaacgccgcgaaagtgacggaaagcatcggcggcgcgccgcttgcggaaattttcgccgcggacggcaaggcggttttgaacgcggcgtgcgcggataaggtgaaacacgcgctgaaactgactgcgggcgggcgcgaatattctttcgacggcgcggcggcggcagagatcgatttagaggggatcgcgccttccgcctggaaaaacgggcgcagcggcggtttaacggtggagggcgcgggcacctatcagtttttcgtgcccgcggcggacggtgcgacgcgcggcgtttcggaaatattgctcgtcgcagatcttgcggacacggcgttcggcgcgctgcacccgatcacgggaaagaacgccgccgtgcgggtgtgcgtcgaacagggcgtgatcatggtatatacgggcgaaaatgcccggaccccgacgaattgcgcggtttccgtgcggaaattgttcgattaaaaagttgacattttttgcgcgttcggctatactataccaaaatcaaaacgtgctgcatgctataagttttactgtttctgagataaacagagggcttatagcattttttatgcgaaagaggaacttatgccgcaggataacgagcgcctattgggcgaaaaaccgatttttcggctgttgatgaaaatggctgtgccgaccatgctgtccatgtttattcagtccatgtacaatatcgtggacagcattttcgtcacgcgcctcggtcagcaggcgttcaacgccgtcacgctcgtgtatccgctgcaaaatctcgtgctggcggtcgcggtcggattgggcgtggggctgaattcctgtatttcgcgctctctgggcgcgggacggcgcgacgaggcggattcgtacgccgcgcacgggttcatgctctcgttcattcactgcgcgctctttctcgtattggggctgttcggcacgaaaccgtttctgaaattgtttaccgacgatcccgcggttctggaatacggcgtttcttacgggaagatcgtcttgtgtctggcgtgcttttccctcgtgcatatcgccgtggaaaaactgttccaggcgacggggaataccatgttccccatgctgatgcaggcgctcggggcgatcgtcaacatcatcttcgacccgctcctgatctacggcgtgggcgtatttccggaaatgggcgtcacgggcgcggcggtcgcaaccgttttggggcaggcgtgcgcgtgcatcgtgtcgctcgtgtggtttttcgcaaaggggaacgggctgaaagtcagattccgcggtttccgtttccgcaaaaaggaagtggggcgcatctacgcggtgggcgtcccttcggcgctgatgatggcgatgccctcggcgctcgtggggatattgaacaccattctcgggcgcgtatccgaactttcggtcaactttttcggcatttattacaaattgcagacgctcatctatgtgcccgcctcgggtctggtgcagggaatgcgccccatcgtgggatacaatcacggcgcaaaattatacgggcgcatggacaaatgcgtgcggctgagccttctcgtcgtgggcggttttattctggcgggaacgctgctgttcgaactgtttccccgccccattctcgcgctgttcggcgcggacaacgagatgatggagatcggcattcccgggcttcggatcctcgcgtcgggatttctggtgtccacgttcggcgtcattttgccgggcgcgttcgaggcgctgggcatgggcgtgcgctctctggcgatcacgctggtccgacaactcatcctcattccgccgctcgccctcgcgctcctgcccgcgatggggcttgcgggcgtatggctcgcctttcccgtttccgaatgcgcggcggcggcgctggctctcgcgctgtacgcgcaatttaaaaagaggcggggcgcggctcagccgtcgatctcggcgaacgcctcgtaaaagtcctgctgcacgccgttttcggtagcggtgacgaggtatttgccaaaaattttgcttccctcgggcgcttcgatcactttctgcgtagcggtatcgatggacagtaagccgctcatatagcgtttttcttctgcaaatcgatttttttcgaagacgaggaactgcggttcttcgccacgcgaacgaatgcagacgcccaaccgttcgtattcggaaacgaattcgcgcgcgctcttttgttcggagagtgcgaaggggtgaaatgcgggcagccgctcgtacacgcaggcgttgccgcgcgctctcagttcgccgatacggcggatcgccgcggacttttttttcagacgtacgagcgaactttccaactccgcgatacggcgggtaagcgtctgttcgttttcttcgaacacgtcggaaatttctccgagggacgaggcgaaacaggtcctgatcttatcgacgggtatggacagactgcgcaaaaacagtatgtcgtacaccgccagcatattctgcatggtcggttcgcggtagttgttttcccggttgcgctcgaatttcagcagcccttcgctttcccaatagcgcagcgccgaggcgcggatcccgaatatttttgcgatttccgaaagatatttttcttgtttcataatgttccgctatcctcttgacattcaagttgctttaaggtttatactatacaagtataacacattttggagaaaatggcaatgataaaacaatttttgcgctacgtgctgccctccatggcggcgtttgcgttttcggggttgtattccattgtcgacgggtatttcgtcggcaacaacgtgggggacgcggggcttgccgccatcaatatcgcctatcccatgatcgcactcgtcaactcggtgggaacgggcatcggtatcggcggcgcggtgttcgtttccttaacgcgcggcgagggcgatgcggagagcgaaaaaaaatatctgggcaacacattgatgtttttattgggcgcgagcgtagtgtgcacgctcttgctgctcgccgtgtaccgcccgtttctgcaggcgttcggcgcgacgggcgaggtgctggagggcgcgaaaacctattcgctcgtgctcattttatgcactgctttgcaggtattggccacgggctgtatcccgctgcttcgcaatttcggcgcggcggtgggggcgatgctcgccatgagcggcggtttcgtcagcaatatctttctcgattggctgttcgtgcagtatatgtccctcggactgttcggcgccgcgcttgcaacgggcatcgggcaggcggtcacggtggtgccgtgcgcggtctttttgtttttgcgcatcagaaagatgggcggcggggtattctccttttcccttcggcgtatcggcaagatcgccgcggtgggcgcatcgcccttcgggctgacgctctgccccaatatcaccacgctcatactcaataaattttgtctggaattcggcggggatacggcggtcgcggcgtacgcggtggtcgcgtatatgtattcggtcattctctttttgttgcagggcgtgggcgacggcgcgcagcctcttgtcagcgcctgttacggagagggacaggaaaagaccgcgaaaaaattccggaattacgcctacgttacggcgctcgtcaccgcgctcgtttatttcctcgcgctgcttttctgccgcgaactcattccgaaagcattcggcacgagcgatgaggcgggtgcgctcgcggcgcgcgtactgccgatattcggcgcgggtacgctgttcacggcaattatcaaagtgacttcctcctatttttattccatcggcaagagcaaagtgtcctacggtcttgtgtacggggaattggcgatcgtgtttgcggcggcgttcgcgctctcgtcttttttaaaacttgacggggtatggctggctttgcctctcacgcaggcggtcctgtgcgttgcggcgatcgcgatccttttcgcgctttcccgtaaaaataagtttaaaaacatttgacatgggttaaactctatgatagaatgttaaaaaacacaaaaataaggatttttcgaaaaatgaacgacggcaacggagacgtagcccccgacccaagttatgataatacgaaagaattttaaggcatagccgtacccggctatgtctttttgtgttttcaaaaatttattcggaggagtaaaaactcgaaatctatggaaagtcaagatcacaaaccctggcactcgttgtccgtgcgcgaagtggaggagattttatccacgagcgaacggggactcagcgacgaagaggccgccagacggctggaacaatacggcaaaaacgatcttcggcagaaaaaacccaagagcatcctgaaaatgctgtgggaacaggtctccgacgtgatggtgctcattcttatcgcggcggcggtcttttcgatggtcatgcaggaatgggcggaggcggtcatcattctcgccgtcgtcgcgctcaatgcggtcatcggaatcattcaggagaaaaaagccgctaacgcgttggcggctttgaagagcatgagcgctcccaccgcgcgcgtcctgcgcgaaggggaggagagcgtcgtgcccgcgagcgaactggtgccgggagattatatctatctcgaggacggcgccatcgtgcccgcggatatccgcatcgtcgcggattcgaacataaaaatacaggaagccgcgctcacgggcgagagcgtgccgtcggaaaaggacggccccagcatccttcccgaggacgcgcccttgggcgaccgcgtgaatatggcgtatacgtcgtccgtcgtcatgtacggcaacgcgcagggcatcgtcgttggcacgggcatgaataccgaagtcggcaagatcgcgggcatgctcgaagaggaagacgatctggaaactcccttaaagaaaaaactcaattccgtgggaaaaattttaagcctcgtggggcttgtggtctgcgttttggtattcgtcatcggtatgctgcgcggacggcagatcctgccgctcgtgatgacggcgatctcgctcgcgatttccattattcccgaaggacttcccgcgaccgcgaccatcatcatggcgctcggcgtgcagcgcatggcgaaaaagaacgccttggtgcgcaacctgcccgccgtggagacgctcggcggcgcgacggtcatctgctgcgacaagacgggcacgctcacgctcaataaaatgacggtcacgcacgtcgccatcaacggcgattttgtggaggggaatgcgaccgatgcttcagaatcggtgcaaaagtacggcgatctgtgccgcgatcttgtgttcggctgcgcgctgtgcaacaacgcgtcgaaagatcccgaccgccccggcgaaacgctgggcgatcccaccgagggcgcgcttttattctacgctgacaaattcggggacgattacgaccaactgaaaacgcagtatccgcgcctgttcgaacagccgttcgattccgtgcgcaagcgcatgaccacggtgcacgaaatagacggaaagatcgtcgcgtacaccaagggcgcggtggacgaaatgttgccgctttgcacgcacgttctgacaaaagaaggcgtgcgcgcgatgaccgaagaggatcgcgcacagatcctcgccctcgtgcagaagatgagcgcggaggctttgcgccttctgggatttgccaagcgcgaacttgccgcggtgcccgacgacgagcaggcggacgtggagatcaacatgaccttcgtcggcgcggtgggcatgatcgacccgcccagaaacgaggtcatcggcgcggtcgaaacctgccacacggcgggcattcaggtcatcatgatcacgggcgaccataagatcacggcgacggcgatcgcgaaacaactgcatatctatcaagagggcaacatcgtcattacgggacaggaacttgacgaaatgaccgacgacgaattggacgcggcggtcaaaaagaccacggtgttcgcgcgcgtttcgccttccgataaaatgcgcatcatccgttcgctcaaacgaaacggcgaaatagccgccatgacgggcgacggcgtaaacgactcgcccgccctgaaagaggcggatatcggcgtggcgatgggcattacgggcacggacgtcgccaaggacgccgcggacatgatcctgatggacgacaacttcaccaccatcgaatacgccgtgcgcgaggggcggcgggtgtaccgcaatattcaaaaggtcatccagtttctcgtcgcgggcaatatcgcggagatccttacgctctttctcgccgtctgtttcaactgggcggatcccattttggcggtgcatatcctgctcatcaacctcgccaccgattcgctgcccgccatcgcgctgggcgtggatccttccgattccaacgtgatgaagactaaacccgtcaagagcggctcgctgtttgccgacggattgcttttccgcatcgtgctgcacggcgtattcatttccattgcgacgctcgccgcgtactggatcggcgagttgtatttcggaaaccaccccgaagcgatgaccatgacctttatcgttctggcattttcgcaactcgtgcactcgctcaaccagcgcagcaactacgacagcgtgttccataaaaataaggaacacaacttctatctgttcggcgccatggccgtttcggctgccatcgcgctcgcggtactgctcattccgcccctgcagggatttttcaaattcgtatccctgggctggaaggaatggctcatcgccatcgggctttcgctctttccgctcgtcgccgtggagatcagcaagatcttcatgcgcgcttcgagaaaacgaaaatccgtataaaaagtgcggggcgctgtgcgctccgctttttttatgatgaaatttgaacggaacgattgattttttcacgaatcttccttataatgaaagggaagaaatcaagggagaaaaccatggtgaaagatataaaaaatatcatagaatcgggcggctgttcgctcggcatcgaattcggctccacgaggatcaaggcggtgctcatcggcgaggacaacgagcctttggcgacgggcggccacgactgggaaaacaaattcgagaacgggatctggacgtacgcgctcgcagacgtcgtcgcggggatgcaagacgcgtacaaaaaactcgcggacgacgttttcacgcgctacggcgcgaccgtttcgaaacttgcggcgctcggcgtgagcgcgatgatgcacggttatctggtattcgacgacgagggcagacaactcgcgcctttttgcacatggcgcaacaacaacgcggcgtccgccgcggaaaaactgacgaaacttttcgcctatcccgtgcccgcgcgctggtccgccgcgcatctgtaccgggcaattctgagcggggaagaacacgtgaaaaagatatctttccagacgacgctggaaggctgggtgcattatcttctgacgggcgaaaaggtgatcggtatcggcgaggcctcgggtatgttccccgtggatacccaaaccaaggatttcgacgcggcgatgctggaaaaattcgacgacgccgtaaaaagttacggcgtaccgtaccgtttgaaagatattttgcccaaagtgctcgttgcgggcaaggacgcgggcgcgctcaccgaagagggcgcgcgccttttagacccgacggggacactggcggcgggcgctcccatgtgtccgcccgagggcgacgcgggcacgggcatggtggcgacgaacagcgtaaagcgccgcacgggcaacgtttcggcgggcacgtcggtattcgccatgatcgtgctggaaagaccgctttccaaagtctatcccgaaatcgatctcgtcactacgcctgcgggcgatctcgtcggcatggtgcactgcaacaactgcacgtccgacctcaacgcttgggtggacgtgttcggggaattcgcccgcctttcagggcgcgacatggaacgatcggaactcttcgaacttttataccgcgagagcgaaaagggcgacgccgactgcggcggcctcatttcgtacaactacgtttccaacgaacatattacagggatcgacgcggggcggccgctgttcgcgaggacttccgagagtaagtttacgctcgccaatctcatgcgttcgcatctgttcgcgtcgctcggcgcgctgaagatcggctgcgacatccttctcaaagaggagggcgtgaaagtggacgcgatcacgggccacggcggactgttcaagaccgagggcgtggggcagagttatctcgcggcggcgctgaacgcgcccgtcaccgtcatgaagacggcgggcgagggcggcgcctggggcatcgcgatcttagccaattaccgcgtgcgcggcggctctcttccgctcgaagaataccttgcgcaaaaggtgttcgcggggcgcgaaagttatacgctcgcgcccgatcccgaaaccgttgctggttacgaaaaatttgccgcgcgctacaaggcggggcttccgatcgtgcgcgaagccgtgcgctgcatggggaaggaataaggagaataagatatgctgaaaaaatgcaaggaaaaagtgttccgcgccaatcttcaattggtcgaaaacaaactcgtgctctatacctggggcaacgtgagcgagcgcgacagggaaagcgggctcgtcgtcatcaagcccagcggcgtttcctacgccgaaatgaccgcggacgacatggtcgtcgtggatttggacggaaacgtcgtagaggggcagctgcgcccttccagcgatacgccgacgcatctggaaatatataaggcgtatcccgagatctgcggcgtgacgcacacccactccacctttgcgacgagttgggcgcaggcggggcgggatattcccttttacgggaccacccacgccgactatttttacggcgatattccctgcgcgcgcgctttgatgcgccaagaggtggagggcgagtacgaaaagaatacggggctggtcattctggaacgctttcaaaaggacggactgaaacccatggaagtgcccggcgtgctcgtcaagagccacggcgtgttcgcgttcgggaaagacgcggccgagtccgtgcacaatgccaccgtgatggaagagatcgccaaaatggcgtttttgaccgaatccgtcaatcccgaagtttcgcgcgctgatcgggcgatgatggataaacatttcctgcgcaagcacggcgcgaacgcatattacgggcaggcgaaaaaatgacgacgggcgtttccaccgcctctttatttttaagggaaatgaacgaggacgcgctcacggtgttcaaggatctgggcgtaaagtgcacggaaatttttctcgccaccttttccgaatacaccgaggactacgcgcggcttttaaaggcgcgcgccgaggggcttgacgtccgttcggtgcatgttctgaacacgcagttcgaaccgcagttgttcggcgcgcatccgcgcgcccgcagggacgcgtacgaaatattggacggcgtcatgcgttccgcgcgcattttcggcgcgcgggcgtatacctttcacggcgtcacgcggctgaaaaagagtttcaaggggctggattatccgcagatcgcggcaagcctgtgcgaaatttcccaaacctgcgaaaaatacggcgtcgctttatgtctggaaaacgtgcactgggcgacctacgcggagccgggcgtctttcggaaattgaaggcgtacgcgccttccctgcaaggcgtattcgacatcaagcaggcgcgcctttcggggtatccgtacgccatgtatatcaaggacatggcgggcagcatttcccacgtgcacctctcggatgtggacgggaacgggaaaatgtgccttcccggcaagggccgtacggattttttcgaggtgttttcgcgcctcaaagacgcggggttcgacggcgccgccatcgtggaggcgtacacgggcgactacggcgaatatgcggaattaaaagagagttgcgattatctggacgaggtgatcgacaaggtttactagatcggcccccgattttttcggcgcggccgtattatttttgtatgcggcgcaattttttgcgcgtttgtgcgtttattatatgagacggtgcgatggacaaacgggaagtcaacaatctggtgcgcgagatcgcgcgcggcgacgtttccgccgcggaaaaactgtacgggctgatgaaagtgcccttactgtcttttgtcgcgccctattgcgcggatttttccgagcgggaggacgtggtgcaggctgtatttttgaaggtcatacaaaaatcaccttccctcgtctttttcaccgactgtttcgcctggatgttccgcattgcgaaaaacgaatgttttgaccgcgccagaaagcgcaggcttttgcccgcggagggaccgcgcgaagaggaggatcattttgaccttcgctttgccctttcaaaactggacgcaaagcgtcggcagatggtggaactcaaatactttgcggggttttcgcaaaaagagatcgcctgcgcgctgcatttgggggaatcggcggtatcgcgcggacttgcggcggcgctgaacgatctgcgggggtgactggatgaagaagattgaatccgaactttatacgatgtttgcggcgcagcccgtcgaaaaaactctgccgcccgcattgatagaggcagcggaaaaaaacgcaaaaaaacgaaagaggcattggcgcgcgctcgccgcctccgccgtttcgttcgttctcgtgctggtcgtatcgctgtatgcggggctcgtcgtattcgcgcccgccaataacaagggagaagagcagggaccgcagtacgaacgcgtcgggtacgacgcatcgctttcgtacggcctcgcgcccgccgaatgggaatacgcgctcaaatcttcggacagagggcttttgttctctctcgccgaggcgccgatccccgattttttgtttgaggcggccatggaaggcggcgaggtctggtatttttatcggggaaacgaactggtgctttcccgctggcagacgggaacggtctttgcggcggtttcgtccgtgcccgttacgggcggcggggaattccttacgggcgaaaaaatatggcttgcgggcgtggaagtcattgaaaacgacggcaaattttacttttctcatctctcatacgactggtatttcgacggagaaggtctgcaaggggaactggaaaattttttgaaggagggaaacgtatgaaaaaagcgaggctcgccgtatgcgcggctgcgcatttttgcatggattttgcgaccatcgcctatctgtattcggtgatcgcgccgcagttatacggcgccgtgcccgatgcggccggctattcgccctatgtttacgggaccgcgctgaccgccgcgctggtgcttgcgtacgatctttgcgcctttgccttgcagccgtttttcggcgcgtgggcggatcagaagaacgtcgccgcgcccgttctctttgcaagtcttttgatcgtggcgctcgtcgatatcctcgccgcggcgctggattttacaaacgttttcgctgcggcgatcgcggggcttgttctcgtgtccgtcgcaaacgccgcatttcacgttgcggcgggcgcgttcgtcatcgcggacgcggaacggtgcgcaccgctcgggattttcgtcggcacgggcgcgctgggcgtggcgctcggaaaagtgctctcgtccgccgccgccttttacgtcggcctcggctgcctcgtctgcgccgtctctttctttttcgtaaaggcgaaaggggagaccatgcgcccgtattatgaaaaactgcgaagggaaaaggtgcagaccgaagccgacgttctgccgctcgtcagtctgggcgttgccgtgtttctgcgcgggttctgcggcaccgcagccgcgggcgagtttccgtccacgtcgctcaccgtcgtctttttgggcgcgttcgccgcgtgcggaaagatcatgggcgggttctgggcggatacggtgggcatcaaggcggcgatcgcctcgtttctgcctctcggcgctctattgatgtgtttcggcgcgcagagcgttgcgctctatgccgtgggcacgctgctgttcaacacctccatgcccgtcacgctgtttatggcgatacgcgccctgccgcgctggcggaacgccgcgttcggcatgctcgcggcgcttctgatggcgggctccgttctggcgatgtggggcgcgccgtccggatatatcacgttggcgctcacgttcgcgggcggcgccgccatactgtttgcggaaatcaagagcaagaataaaaatctgtttgaggagggaatcttatgaatattctgaatttgatcctggacgtcgccgtctggcccatgttcgttctgggtgctatggcgattctggcgccgatcgtcgtgatcgtcagcattatcgttctcgtgatcgtgctgaaacggaaaaagcggacgcagaacaaacccgaagatgaacgtaaggacgaagacgaatgagcgatatcgtatattttccgctcgcattggcgatgacgctcttgctcgaagggatcgtcctgcttccgttactgatcaaaggcgacaaatatttgatcggcgtgttcgtgctcgtcaacgtgatcaccaatgtcacgctcaatttcgcgctcggattgttggaatgttttcccgtcgacgtttccgccatcgacgtcgtgtacgtgatcggggagtgcgttgccgtggctgtcgagtatctgatactgaaacgcgtttgccggaataaatacctgtttctgttcgtgctttgcgccaacatcgtgagcgcgttggcgggcgggctgctcctacgcgtacttttcaactgactttctgcgaatttaattgacattgccgccgttttgttttacaataaatggcaagagtattgcatcagaaacggaggtttttatgaatttcaggaacaaagattggcgcaacggcatgcgcgtcacggtggactacaacaatatgatgaaaaaattcgtcggcgccgacggatttaaagattccgagataaacgaactcaaagaggcggcggcggacgcgttcgattgcgtcgcgcaaggccgcggcaagggcatgatgggctggacggaacttccctataaccagaaagagatcgtggaagatatcctcgccaccgccaaagaagtgcgcagaaagttcaaatatttcgtcgtgctgggcatcggcggcagcgcgctcggccccatcgcggtgttcaacgccctgtgtcatctgcactataacgaccttgcgccctccaagagaaagggccccaaattctacgtggaagacaacgtggatcccgaaaggatggccgcgcttctggacgtcatcgaacccgaaaagacctgctttaacgtgatcaccaaatcgggcgcgaccagcgagaccatggcgcagtacctgatcatcaacgacatgctcgtcaaggcggtcggggacaaggcgaacgatcatatcatcgccaccaccgacgcggcgaagggcaacctcatcaaacttgccgaacagaacgattacaagacgttctgtatccccgacggcgtgggcggaagattttccgaactgtgccccgtgggacttttgcccgcggcggttctgggattggatatcaaagcgatgctcgcgggcgcggcgttcatggataacgtctgctccaagccttccgtcgcgaaaaatcccgcgctcgcatcggccgttttacaatacatggcgatgaagcgcggcaaaaacgtgggcgtgatgatgccgtatgcggacagtttgaaatttatgtccgactggtactgccagttgtgggcggagagcctcggcaaaaacgtcaccctggacggaaaaccctgcaacgtggggcagacgcccgtcaaagcgctcggcgttacagaccagcattcgcaggtgcagttatataccgaaggtcccttcgacaaagtcgttacgttcctgtcggtcggaaattaccgcaaggaattccccattccgcacggctgcgaggatattcccgacgtggcgtttttgggcgggcacacgatgaacgaactgatcgccgccgaaaacaaggcgaccgcctacgcgctcaccaaggcgggacggcagaactacacgatcactctccccgaagtcaacgaattcaccctcgggcagttgatgtatctctttgaattgcagaccgcttatgcgggcgcgctgttccatatcgatactttcaatcagccgggcgtcgaggcgggcaagcaggcgacctacgcgctgcttggcaaaaagggctacgaggccaagcgcgaagaactcgacaacgctcccaaagcggaagataaatatatcgtataaattttgcgaggcataaatatttatgcctcgcatttcattcgtaatcaaggataaaagaaatggtagataatttaacttttcagatgtttaatccaattggtaaagaactgagagctgacgacgaaaaagttacaaaagcaataaaaatattcgtgaatggattaaacttatgcgatatgctaaaaaagatcgaattgccttatctgaaaaaagatgaaaaatatttatcttatgggcatttagaacctaaaagactgcatagttatttaacaacggctatggatagcaatattcccgctcctttattttgttgtcccgaatgcggagaggcgtgttgttggtcggtagaggtttttatcagacatgatgaaaaatatgtttactggaaaaagtttgaacattctcatagagacgaatggaagtataatctctcatttaagttcaacaggcaacagtatgaaatacaattagatagtttacttaccatataataaagaagaacttggttttcaccaagttcttctttcattccgaaaataatttcgatatcatctgatttacgtaagcgacgggcaccaactggatctggttctcgaattttttcacggatttaaagtttttggcgggaaagaggattcttttaaatcccattttgatgcactcgttcacgcgcttttcggcgtaggtcacgccgcgcacttcgcccgtcaggcccacttcgccgaacacggcggtgtacttgtctacggcgacgtttttgaacccgctcgcgagcgccgcgcagacggcgaggtcgatgctcggctccgcgaggcgtatgcctcccatcgcgttcagatacacgtcctgattgtaaaaggggatgccgcaccgcttttccagcaccgcgatcaacaggatcattttattattgtccacgccgaggggcattctgcgcggcagcccgtaggcggtctttgcgagcagcgtctggatctctaccatcatgcagcggttgcccgtttccgagggggtgaccacgcttcccgctgcgatcccgcggctttcggagaggaatatgcccgaataatctgttacgccgaataagccttcgcccgtcatctcgaaaacgcccacttcctgcaccgaaccgaaacggtttttcaccgcgcgcaggattttgaaactttcttcgcgttcgccctcgaaatagagcacggtgtccataatgtgttccagaactttcggtcccgccagggcgccctctttggtgacgtgcccgacgatgaaaaacgtgatgccgtggctcttggcgatgcg

SEQ ID NO: 2203 - DNA, 7619 bp, Unknown
  16S sequences of unknown bacteria
tttgaggtgttttaggattgcgaaagcatgaaatgcgaagcaatccgtgtatcatgtagatacccaactttaccggagacctttatattatgaagaaaaacacacattttattctgtttgcagccggcatccttttccttctgctcgctgcccttgccatctggcttggccttggccagcaccgtatgacatcaaagacggtgtctcccgcagagtccgaagcggacgctgtactgcagacattgcaggatatgacggcagagcagaccgcatcgtcggcatctgccacagaaatacagagtgaaaccgcccatacagagcctaaagccatggatgagctgcggatctgggtcggcgactcccgtacactcggcatggagcaggcgctcgacggcgccacgcctgacatctttatcggcgctgctggtgaaggctatgactggtttgccgcagacggtctgccacagctcttatccgcaatgaaagcgcatcctctctctccgatcattttcaatctgggcgtgaacgattacgacaatctctcccgctatcttgcactctatcgatcgctgcaaaaagagcacccttctgcccggttttattttctctcggtcaatccgatcgaccctgcgcggtgccagaatatcacaaatgaagaaatctctgaatttaacgcacagctgcaggagctcgcgggcgatctgtatatcgacagctatacatggatgcgcgcgaacgacatccagacaaaggacggcatccattatgaagaggatgattaccgcgccctttataaatatgtaaaaacacagatagaagctttcacgttttaaacgcattttttcacattttgaacacattttttcacttgacggattttttttattgaattatcataaagaaaagaacagcagtgccgctcatttcgggcggcgctctctttgtttttcacagaaaggaggatctatttttgattcgcacaattgcaaaagaaatcaaggaatacaaatgggcttctatcgccacgccgctgtttatgctgctggaagtcctgatggagaccctgattccgtacctcatggcctcgatcatcgacaagggtgtcaatgccggtgacatcggccatatctaccgcatcggtgggctgatgattgtcgcagccgccatcggactgctggccggaatggcaggcgggcgcttcggggcaaaggcttcagccggactggcaaagaacctgcgcgagagcatgttcggccatatccagacattttcctttgccaacatcgacaaattcagcacagccgggcttgtgacccgtctgacgactgacatctccaatatccagaacgcctaccagatggtgctccgcatgatgatgcgtgctccgtcgagcatgatctgtgctctgatcatggcgtttacaatcaaccgacggctcgcaagcatttacctgatcgccgttgtcttcctcggcatcatcctgtttttcatcatccggcacgcgacccgctacttccagatggcatttccgaaatacgacgagctgaacgcctccgtacaggaaaatgtatccgcgatccgcgtcgtaaaagcctacgtccgcgaagaacatgagacctcccgcttccaaaaagccagtgaaaacatttatcggatctttgtgaaagcggagcacaacgtcatcgtcaatgctcctctgatgcagtttaccgtctatacctgtatcatcctgatcagctggacgggcgcaaaaatgatcgtaagcaacgagctgacgaccggtgagctgatgagccttctgacctactgtatgaacatcctcatgagcctgatgatgctctcgatggtcttcgtcatgatctccatgagcacagcaagcatggagcgtgtctgccaggtactcaatgagacgagcgatctggcaaatccggtaaatccggtacatgaggttgccgacggcagcatctccttctctcacgtcaatttctcctataaaaaggacagcgccgagccggtgcttaaggatatcacacttgacattcgttccggcgagacggtcggtatcatcggtgcgaccggaagtgcaaaatccagtctggtctccctgatcagccgtctttacgatgtgacagccggagaggtacgggtcggaggccgcaacgtaaaggactacgatatggcatctctgagaaatcaggtatccgtcgtacttcagaacaatgtgcttttctccggcagcatctatgacaacctgcgctggggcgacccgaatgcctctgacgaagaatgtcagagagcctgccgcctcgcctgtgccgatgattttatccgctccttcccggacggatacaacacccacatcgagcagggaggaaacaatgtatccggcggacagaagcagcgtctgtgcatcgcccgtgcccttctgaaaaaaccgaagatcctgatcctcgacgacagtacaagcgccgtcgacacagcgaccgacgcaaatatccgccgggccttccggaatgagattccaaacacgacaaagctgatcattgcccagcgtatatccagcgtacaggatgccgaccgtattcttgttctggatgaaggacggatcaatggctttgggacacatgaagagctgcttgcttccaatgagatttaccgtgaggtctatgaatctcagacaaagggcggcggagattttgacgaaaggaccggtgactgattatgccaggaccaatgaaccgcacaccgcgcggacagaagccgcaggtggaacatccgtttgcactgctcgcccgtctgatgcactacgtattccgtgactataaattccactgcatcgcagtctttcttcttatttttgcgggtgtcatcgcaaacgtacagggaacgatgtttaccaaaaatctgatcgacgattacattacgccgttccttttaagtgacaacccgaattttgcgccgctcgcaaaggccatttcccgtgtcgctgtattttatgcaatcggtgtcatctctacctatgcttataaccgtatcatggtcgcagtcacacagggaaccctgcgcaatctgcgcaacgacctgtttgcacatatggaaaagctgccgatccgttactttgatacacattcccacggcgatatcatgtccgtgtacacaaacgatatcgataccctgcgccagatgatcagccagagcatcccgcagatcatcaacagcacgttcacgatcgtgagtgtcttcgtgagtatgctcattctgaacatcccgctgacgctcgtcacgctcgtcatggtctcgcttatgctcatctgtaccaaaaaagccgccggacagagcggcaagtatttcctggaccagcagaaaaatctcggcgccgtcaacggctacatcgaagagatgatgaacggtcagaaggtcgtcaaggtcttctgccatgaggatgcaagcatcagagaattccacgagctcaatgaagcgctctatacgagtgcggaccgcgcaaacacgttcgccaatattttaggaccgatcaacgcacagctcggcaatatcagctatgtcatctgcgcaatcgtcggcggtgtgctcgctctaaatgggttcggaggatttacccttggcggccttgccagctttctgacatttaacaagagtttcaacatgccaatcaatcaggtcagccagcagttcaatgcgatcgtcatggcgatggccggagcggaccgtatcttccggctgatggatgaaccggtcgagaaggacgacggctatgtactgctcgttaatgcaaaggaagaaaacggaaagctcaccgaaagtactgcccgcaccggacaatgggcatggaagcacacgcaccaggcggacggctccgtcgactacaaaaagctgcgcggcgacgtcgtattcgacggcgtggacttcggctacacggatgacaagatcgtactccacgacgtaaagctgtacgcgaagccgggacagaaaatcgcatttgtcggctccaccggggccggtaagacgacaatcacaaacctgatcaaccgcttttacgacatccaggacggcaagatccgctatgatggcatcaatatcaataaaatcaaaaaagccgacctgcgtcggtccctcggcatcgttctgcaggatacacatctctttaccggaacggtaagagaaaacatccgtttcggaaaactcgatgccacagaagaagaggtcatcgcagctgcaaggcttgcaaatgcggacggcttcatccgccgtcttccgaacgggtatgacacgatgctcaccggcgacggtgcaaacctgagccagggacagcgtcagctcctcgcgattgcccgggcggccatcgcagatccgccggtgctcattctcgatgaggcgaccagctccatcgatacccgaaccgaacgcatcgtacaggacggcatggaccggctcatgaagggccgcacgaccttcgtcatcgcccaccgtctctccacggtacggaattctgactgtatcatggtgcttgagagtggccgcatcatcgagcgcggcacgcatgagcagctgatccatgaaaagggccggtactaccagctgtataccggaaatgcgatcggggcatagcctgtcaataaaagggagcgtacagaaccattatttaagttctgtacgctccctttttctttatgattctttatgccagcttctcaccggtcagcatctcatacgcctgcaggtatttctcgatcgtcttgtctacaatctcctgtggaagcgtccagtcattgcccggattcgccttcagccagtcacgtgcgaactgcttgtcaaaggacggctgtccatgtcccggctcatagccctctgccggccagaaacgagagctgtccggtgtgagcatctcgtcgccaagcacgatgttgccatcttcatccagtccgaattcaaattttgtgtccgcaatgataatgccgcgtccaagtgcatattccgcacattttttataaagagcaatcgtgtagtcacggatcttctccgcatattctctgccttttcccggataatatttttccagatgcgcaacactctgctcaaaggaaatattttcatcgtgatctccgatctcagcctttgtggacggcgtatagatcggctccggaagcttgtccgactccttcagcccctccggaaggcggatgccacagacctcaccggtcttctgatagcttgcccagccgctacccgtgatgtagccacgcacaatgcactcgaccggaaccatattcagcttccggcacagcatgctgtttccgtcaaatttctcctgctggaaaaattccggcatatccttgacatctgtagagatcatgtggttcggaaggatatccttcgtgaggttgaaccaaaattttgacatctgagtcagcacagtgccctttttcgtcaccacgttgttcagaatcacatcgaagcagctgatccggtctgttgctaccatgatcaggctgtccccattgtcataaatctcgcgtacctttccttctttgatcggcttcatttcctgcatgattgttctcccttttttctgttagtaaccttcagcaagccgaaacagcttctgcccacaggcagctgtaccggtatgccaaatgtcccgtatgtatggaatcacaaaaggcactgtcctacagtgcccttgcctgtaacgtatagtacgttacaccgtttgctatcgcattgtcaataccaaaatcaaatttactccggaatccggatacattttgcctcttttcgaaccgccagtccgcctaggatccgcgcaattgcttcctctaccgataccgtcacctgcttctcggcatcatcctccgcggcaaacattttctttaaggtcacctgattgtccctgatctcatcctcgccaaggaagatcgcatacgggatcgccagcttgtctgcatagccgatcttatgcttgaatttctttttctcgaagtagatctgtgtgctgatacccgcctcgcgcagctttgcagaaatctccaccgctgccgtcatatcatccgtcatcggaatcatcagcacgtctgccgaagtcgcaaggctgcggttcagatactcaaactcattcagaatatagaacagccgggtcagtccgatcgacatacccacacccggaagctttttctttgtgtaaaactcagccagattgtcgtagcgcccgccgctgcagatgctgccgatctccggatgacggttgaacgtcgtctcatatacggtaccggtatagtagtccagaccgcgtgcgatcgtcagatcgatccggtaattcgtctccggaaccccgaatttgcccatatagtaaacaacctccgagagctcctgcacaccgagatccagcttctcactgcggcccgcaaatgcgcgcagcttctccagaatctcttcattgcttcctttaaagccaagcagcgcgagcagttcatccgctgcctctgcagatacctgcagctcggcaagctctgccctgacattctccgcaccgatcttctccagcttgtcaatgatgcgcatcacgtccgtcgcatgttcgctctgtccatacagctcaaacagtccattcagcaccttacggttgttcagacgaatggtaaaatcctgcagtccgagcccggtaaatacgtgatacatgatgctcggcacctccgcatcattcatgacgctcagctctccgtctccgatgatgtcgatatctgcctgataaaactcacggaagcgtccctgctgtgcacgctcaccgcggtataccttgccgatctggtagcgtttgaacggaaacgtcagctcagaataatttttcgccacatactttgcaagcggcacggtcaggtcaaaccgcatcgccatatccgtatcgcccttgctgaaacggtaaatctgcttctcggtatctccgccggtcttggcaagcaaaatttcgctgcgctccaatatcggtgtatcaatcggataaaaaccgtacagacggtaggtctcctccagcttctgtttgatcttttcaaaaagaacctgctccttcggaaccagctccataaagccggacaaattctttggggtaatgatgttcatagtcattccttctctttctatgtaatctgtatcgccattctgtcattttagcatgaccgtcccgctttgtaaaccgccacaatgcactaaccctgtgcttccagctcctttaaagcagccatcagcgcctcataccggaccgtcagttcttcaaaaagcgcctcatatccgctgcaatctcttccgcgcagatgctcggtcagcgccgcacttgactcgtacaggcggtcaaatccgagattcagacaaacaccctttaaggtatgcgctgcccggaaggctgtctctccgtccttctttataagcgcgtccttcagctcctgataacttggatccttcaaaaatttcaacgcaaagcgctttaccagcgcctcactgcccaggcgcttcagcacacctgcatagtcagatccgatctgctcatagcactcttttactgtcatcgcttttcctcctgcaatctattgaaatagagccccgtctgtaat

SEQ ID NO: 2204 - DNA, 13588 bp, Unknown
  16S sequences of unknown bacteria
ggatacgcccactgccagagcgtcgatgctggtggccaccgccagcggcagcatggcccggaaactaaaatcgtcgttttgtttttctctttcgccaccgctcagcgcctcacggatcatatttgcgccaatcagacccagcagcaaaaaggcgatccagtgatcataggcttcgatcgttcccgcaaacccggcacccagcagatagcccagcagcggcatcagtgcctgaaaagcgccaaaatacagcccggccagcagcatgtgccgcacccgcaggtgctgcacggacaatcccttgcagatggatacggcaaacgcgtccatagaaagcccaatcccaatcaaaaaaagctccacaaatcccatatgtttttctcccttacaaataacatccccgcacaggcaaacaaaaaacacatgcagcaaaccaagccacatgtgcacgcggagcagattctgtatggcagcgcagcagcatgtatagcatttctccctattactctatacatgagtctcgttgattaagacaagccagggcgaaaaaccgtccagtatgttgacttgccgcgcatcaaatcacacgccactactccctcaaacgccattaaccataccataaatccccctttctgtcaacgatttcccccctccgtattctgcagataagtacattttctctgttttcgcactggacgcattccccggactatgctacaatgaaattagaaaagcaacgtatgctccaggggaaggagcgtatactatttgagaaatggaggtcctttgtatgaccgaaaaagacgtaacgatttccatccctgccggactgactgcaaaaacagttactgtcattgttgaaaaagccaacagcttttcttcctctattgtttttgaaagcgaccatcgccgcgtcaacggcaaaagcctgctgggcgtgctgtccctgggtctgaaatgcggcgacacgttcgccctcagcgccagcggcgacgacgaaatcgacgccgtggaagccctctccgccatgctttaatcgtttctccgaggcaggcatccgccccccgtgggcggatgcctgcttttgacaaaggaagtgtccatatgatccaagacattgccccaaagcagttctccgtagcttatgatctgcatgtgccggaaagcagggataccgtctgcctgttccgcggatcgcgcattctcggcgcgcgctgcaccgatggcgaactgcgcctgccccgcttctgcgagctgcccgtgcaggaaagcgactgctggtttctgttctccgtttccagccggaattatttttggtgccgccgcgccctgactcccgccggaggcgattacagctgggtttctctgcgccggagcatggccttttctcctcagcacgaggcttttgccgccttgacagcccgccacctcgccaggtggtacgaggataaccgctattgcggccgctgcggccgcggcctggtgcgcgacgccaaagagcgtgcgctgctgtgcccggaatgcggcaatctaatctatccccgtatcaatccggtgattattgtgggcgtggtggacggcgaacgcctgctggtgaccaaatacgcccccagccacgccgcggccaaacacttcgccttagtagccggtttttgtgaaatcggcgaaacggccgaagatactgtacgccgtgaagtgtgggaagaggtcggcctgcgggtacagcatatccgctattacggcagccagccctggggaatcgacgggaatctttccctgggcttttttgccgatctggagggcagcgacgcgatccaactggaaacggacgagctgtcccaggccctgtggctgcaccgcagcgacctgcccgcacgcagcgacaccatggccctgacctctgatatgatggaggctttccggacagggaaaatatcctgagcagcagcgcatgtcccggcagcacttggccggctccatcagcggtttcccgcagactgccgccgccctgtcttgacaaaattccattgcgggcttataaatggtttcgataacctgtgcctgggtggacgcaggttgtaaaaaataacaaaggagattttatcatggcagaattgaaaaacaagcgcatcatcactgtggccctgaccggcgcatggccgaagaaagaaaataatcccaatgtccccatgacccccgcggaaatttcggaagatatttacgcctgctggaaggcaggcgccgccgtagcccatatgcacatgcgcgacgacgacggcaacggcaccatggacgtcaataaattccgcgagacggtggagctgctgcgcaaaaaccatcccgagtgcgacatcgtcctgaacatgaccacttccggcgacctgaacgccactgaggaaacccgccagatccacctcaaggagctgcgccccgaaatgggttcttacgactgcggctccatgaactggatgaacagcggcctgtttatcaacagccccaagttcctggaagaattgggcagaaatatgcaggagtggaacgtgaagcctgagatcgaggcattcgaccccggcatgatcgccaatgctgcctattatctgaaaaagggcgtgctgaaagcgcccctgcacttccagttctgcatgggctgcgccaacggtattgtgggcagcaccaaaaacctggtgttcatgaaggaaaccatggattccctctgccccggctccacctggagctgcttcggcgtcggccacagcgccatggagatcatgtatgccggcgtggccatgggcggtcatatccgcgtgggcatggaagacaacgtgatgtatgccaaaggccagctggccgaaagcaacgttcagtttgtcgaacgcgccaaacgcgtcattgaggagttcggctgccaggccgccactcccgatgaggcccgtcagatcctgagcctgaacaaatgagctggggaccctgttttctatactaccgctgcccgcagtgcagcaaaaaattcaagtatgccacagatctgattccggtgttcggcgatgatttcggcaaatgccccgtctgcagcgccatgggcattttggaaaaagaaggcgcccgcactccggatgatctggattatacagaggtggaataactgccatctgaccgcaaacggtatgtatttcgcagagatacataccgtttgcttttactcctaaaaaccgatgaacaattgtgcggagggacccccttatgatttcaaacattctatttgagtatctcttggatcagttccccttggggttatacattctcgacaatcagggccgatatatctataccaacgacgcttatgaccggctgctggaccttccccgcgaaaaactcatcatgcgaagcgtgcatgaactgatgcatgacggccattacgatgcctgtatctccgacattgtgttccgcgaaaagcagccggtttccgtcttcctgaacgtgtttgtggacgatggaaacaccattaaacgcgtgcgccacctggtgcgtgctgttcccctgttcgaaccagccggcgaaatttcctatatgatcggcatttgcgaggccgtcaacgacttaaacgaatgttaccacgaagccagcgcccgcaccatggtggcccagtccacaacgttccatcagccgctgacgcaggagcaccgccacagcacccagatgatcgccgtcagtgaagtgatgcaggccgttctggccactgcaaaaaatatggcgcaggtggattccaccgtcctgatctccggcgcttccggcaccggaaaagaactgatggcggaatatatccaccgcaacagccctcgcagcacatcccgtatggtggtcgtcaactgcgcctccattccggaaaatctgctggagtccacactgtacggctatgagcgcggcgcctttaccggcgcgctggcctccggcaaaatcggtctgattgaagcggccaataccggcacgcttttcctggacgagatcaattccctgcccctgggcctgcagggcaaactgctgcgtacactggaaaccaaaaaagtgcagcgcgtgggcgcggtgaacgagttttcggtagacttccgcctgattgccgccaccaaccagaacctacaggaaatggtgcgcaccggcctgttccgtgaggacctgtactaccggctgaatatccttcccatcgacttgccttccctgcgcgagcgccgcgaagatattattcccctggcacgccattactgcaatttgttctgcagcaaatataaaaaagatattttctttgatgacgatgccctgcagcgccttgtcgaatacgactggcccggcaacatccgcgaactgcgcaatgtgattgagcggatcgtggtcatgagcagccagacctgcattttcgaagacatcgtcacacacaacctcggtgcagcgccggatccctctccttcatttattgaacgcaaacctgttccggacaatgccctgatctattccaccatgctggacaaccacgtctcgctgcaggactatacggaacgctgcgaaaaagcctatcttcaatatgtgctggagaaattccccagcacatacgaaaccgccaaagccctgcaaacaacccaatcgctggttatgcggcgaaagaaaaaatataacttataaaataaatcgaaatcaacttacagcaagtcggaatcaacttattaattcgattccgacttgctgcttttttatttttgtttcctgatccacacaaaaatgccgcaagccacaggcattcggtccgatcgaatggtatgccttctactggcacgttatttgctatataacagaaaacctgagaaaaggaggtatttttatggttgggctttccatcgatcagctttccatcggccaaagcgcatcgttctccaaaaccatttccgaatcggacgtatacatgtttgccggcgtcacaggagacgtcaacccggcgcacatcaacgaatcgtacgccaacgccaccccgtttaaaacccgcatcgctcatggcatgctgtcagccgggctgatttccgctgtactgggaacacagctgcccggcccaggctcaatctacgccgctcagaccctgcgctttaccgcgccggtacacatcggcgataccatcaccgctgttgccaccgtaaaagagctgttgcccgaacgcaaccgcgcaatcatcgaaactgtgtgcaccaaccaggacggcaccgtcgttacctgcggtgaggccacagtgctgccgcccgcgcacaaaccgtaaagtattttcccaaagaacaaaggaggcttctcatgagcaatttgaaaaacaaacgcgtcattaccgccgccttgtgcggctcctgggccacaaaggacatgaatcccgccgttccctacacgccggaggaaatcgcccgggacgcttacgagtgctggaaagcaggcgccgccatcgtccatatccatgtgcgcaacgccgacggctcaccctctaccaaatttgaactgtacaaggaaaccattgaacgcatccgcgcctttccagactgtgacgtatgcctgaacatcacctcttccggcagcgtggatttcggcgatgaagagcgcatttacccactgcagcagctgctgccggagctggcctcctacgacgcaggcacgctgaactggcagaaccgcaccgtatttatgaatccccccgcattcctggaaaaactgggatatgcactgcaggaaagcaatattaaacccgaaattgagatctttgacgccggcatgatctacaacaccctgtattatctgaaaaaaggcgtgctgaaagccccctgccattaccagatcgtgctgggctgcgccggcggcatgaccagcaccgttgaaaatctggcatatctgaaaaatttgctgccggaaggctccacctgggcgggctgcggcatttcctccggccatctgcccatcatgatggccaccatcgccatgggcgggcatctgcgtgtcggtctggaagacaacctctatctggatcatggcgtgctggccaaatccaatgcccagctggtagagcgggccgtccaattgctggcactgaacaatctggaaccggccaccccggaagaggcccgcaaaatctatggtttgacgcgcaaagtcttctgagcgacggaagaaccccacaaaaagagacgagaggagagttccccatgtcaacaaatggaacaatgaaagaccgcctgaccaccggttttatccgtttttttgaaaaatggacgccgaattcgatggtatttgcctttctgctgacaatcgtcgtcggcattctggctttgctctttaccccaacgccattgttgtttacctccgccgaaggtcagctcagcctggtggacgcctgggtgcagggcttctggaacctgctgaccttcgccatgcaaatggccctgattatgatcaccggttctgtggtcgccactgcgccgccggtcaagcgtgccctgcatcgcctggcttatgtgcccaattcccctttttccgccattatgctgattctgctcgttaccggcatcacctattggatccactggggcgtcggtatgatgttcagcattaacctgggccgcgagatcctggccgcatccagggaaaaaggctacaaaatccatcagcccgcttttgtcgcgctttcttattccaccttcgccgctggtatcggcctgtctcaggcggctcccatcttgggcgctacacccggcgcgctgcaggacctggtggtttccgacgccgtgaaagcctacatccccgaaaccgttccgctcactcaaacggtgctttctccgatcaacctgctccactgcggtctgatcctgctggtggttatcgttctgggctgggcgctttaccccaaaaaagacagccaaatcgtggagctgagcgatgaactctatgaagacatcaaaaaaagcggcgaggcgcagctctcccgccacaaagccaccagtccggcggactggatcaaccacagtcccctgttgaatctggtgatcggcgggttcggcctgttctggatcatcaagcttatggcttccggcggctttgccaacatctctctggataatatcaactttatcctgctgattctcggggtattgctctgccgtgacccggagaccttctgcagctgtgttatgcaggctaccgcctccgtttggggtgtgatcatccagttccccttctatgcaggtattttcggcatgatcgcctacaccggcctgagcgatgtcatcgtgaactttttcatgtcctttgcaaccaaaggcaacttcccgatggtcgcctacatatactctgccatccttaatatggcggttccttccggcggatcgaaatttgccattgaagcaccgtatattctggatgtttgcagccgcctcgatatcgatgtgggaaaaatccttcttgcgtacaccttcggcgatcaaaccaccaatatcatccagcccttctgggcgcttcctttcctggcaatgtataaactggatttcaaacacatcctgcccttcgcgtttatgatctgcattgcagcgctgatcatcgactgcattttcaccggttttgtttatcagctgatttaatcattccgctgcattgtcttgtttgatacaagggacgcagccgatttcgctgcagcaaaggcgtcccgcatcgttctcccccctgaacgatgcgggacgcccgcttctgtctctgtttccatgtccgatccgatgcatgcccgtttggccgtgttttctcctccgtccgaacgccggcggtgcacagcgtgcccaccgccgcattcaccacagcagcgccatatcccgttcagcacgggactggcccagatcaaaccgcagctgatcgctgtcccgatcctgccaaaacacttcccacaccaaattggccagctcatgccacaccgggtatacgttcagatcctgcagcgcatcggtcacagcctgataataccacccctgctcagccttgcttttgttgttgaaccgctcccagacctgctcgcctaaaatcccataatcccgctgcagcgcccggatgttggagagcttgtctcccaacgcaatcattttcacttccagccgcggttccttcagcagcctttccacactttcctgtttgcgcagacgccaagtcatctccgccggctgctcccggcgcttgttttcactgacagccagcaccagctccgtcacatggccgcccaccgtctcgcgcagctcttcctcggtcacgctggtgtcttccagcacatcgtgcagcaccgcagcggccagtacgtcctcatcctcggtcatggtgccgacaatttccgccgtttccatcacgtgcagaagatagggcgccctgccgcctttgcggtaggccccgtcatgggcctgggccgccaatcttgtcgcctggcacagcaggctgctcaaatactccattttcatgcttcctttgccttatgatcttccaaaaaagaaccagccgcccggctcctgccgctacagctgaactgtcttgtattgtaccacaaacatgaagccaagaaaagagcaatatccttcgccccggccgggcaggcgaaaagcccgccgcagcaatacgtcccctcccgccccccggctgttgtcaatatcctgcgccgcatcctgccaaagctgtacagccgagcagcgcagtgaacctgaaagtgcgccatggattgacaaagcgcagaaagcattgtactatttatacgaaattatcccctctttttgtctattttatctatttttcgaatcataccattctttttctgaatgattccccaagatccggaaaggagcgaccgccatgaccgattcctataaccgcaccatcgactatctgcgcctttcggtgactgaccgctgcaatctgcgctgcatctactgcatgcccagcgagggcgtccaatgggtgcctcatggtgacatcctccgctttgaagagaccgtgcacttggtgcggctgctctccggtttgggaatccgccgcgtacgcctgaccggaggcgaacctctggtgcgtgagggtatccttgatctcgccgcagccctgcacgccctgcccggtatcgacgaaatccacctgaccaccaatggcgtgctctttgcccccatggcagatccgctccggcaggcgggaattcatggcgtcaacttcagtctcgacactctgcagccggatatattccgccgcatcacccgtaccgatcagttcgccgcagcccgcgcgggcattgacaaggcgctggaggcaggctttccgtcggtcaaagtcaactgcgttctgatgcggggaatcaatgacggcgaggctgctgccctggctgccttggccaaagacgcccccctggaggtgcgttttattgaaatgatgcccatcggctgcggaaaaggctacacccctgtgcccacggaagaggtgtataccgcgctggtgaaatcgtttggaaaaccgaacgctttcaccacgccgctgggcagcggcccggcggtttatgtatcttttcccgccttccaaggccatgtgggctttatcagcgccatgacccatgtattctgcgcccgatgcaaccgggtgcggctgacagcagagggatacctgaaaccctgcctgcacaatccagccggcaccgacctgcgcacgcccctgcgtaccggcatggacgatgcggcactaacagcgctgctgcgccgggcgattgaacaaaaaccggcccgccaccattttacttcatgccaagccggcgaggctatggaaacgcgtactatgaacgccatcggcggttgacacgcattgccgcccggcgagccgtttggctctgccgggcggtttttttgaatggattttcccgcctgcaagcgcacaagccatgggacacggatataagctgcaaaaagcaccgcggattcggcacaggacaccgtttcatccacctgccgcacaacactttacaggatgccgctcccgcgctttccccacaaaaagagagcatgaaccgacactgcattcaaataaaacaggtcatacgcaccattaacggcacgagaaagcgtccgctgccacacagggctcctgccaaacacagaatgtaaagcatgtccgcaaaatctcattttatttatccccgccttgtcacggcattgcggctgcggtataatgaaagtccgtcattccgctgccggcacagtttcccgcgaacggcggtttgataccattcaaaaaacgcagagaggacgttccacccatggaaattgaacgcaagtggctggtaaacggctggccgaaggggctgcgccccgaacacatttatacaatggaacagggctatctcgcactgcgccccacaacggtgcgcatccgccgggaagcagaacggggcgggacgaccgcatacatcttgtgcttcaagagcaaaggcgggctggtgcgcgaggagattgaacttcccatcgacgagaccctgtttgaacggttgcgcgcgctgattggcctccccctgatccgcaaggaacgccgggattatctcctgccggatggacagacactggaagtaaacgaggtagacgccggcgcgcccggttcttttttctatgccgaggtggaatttcccaccgtaaaagctgcagatgcctggtcaccgaaagcggccggcctggctgcgtatcttgccaacgaagtaaccgaaaaacaggacgtcagcatgggcgcttattgggaaagaacccgttatgacgtacagtgagcagaaaacagcgccgaccgacttaaccgaagcgcattacagtcatcacacccgctatctctcctattccattcctcccgtacaggacggcgctcaggtgaacacgctgctgcgccatacgctgcaactgtcggcgagcctcatcaagcgcgtcaaatggttaagcgacggcattaccctggacggactgcgtgcgactacccgcaccgccgttcgcgccggacaggtgctgcgcatccggctcagcgacagtgtgcgccgcagcgagatcgttccatctccgggcccgctggatcttttatatgaagacgaagatctcctgatcctcaacaaagctcccggtattgccgtccatcccggactgggccattgggacgatacgctgggcagttttttgctggcttattacgatcgctgcggcatcccagccgatttccacccggtgcaccggctggacaaaggcacctccggcgtaatggcagtagccaaacatgcccacgcccaggatgttctgcgccgcgccctgcacaccgacgcgttccggcgcgaatacctggctgtgtgcgacggcgcgccggaacaggcgcacggcgtaattgatctgccgctggcccacgcaggggactctgtcatccgccaggaagtatgctccacaggctgcattgcccggacggaatacgaggttctgtaccgcacgccggaacgggcactggtgcgcctgcgcctgcagaccggccgcacccatcagatccgcgttcatatggcggccattggctgcccgcttaccggggattttctctacggcagagaaaatccggctctgatcccccggccggccctgcatgcccatacgctttctctcctgcaccccctcaccggccagcgcctttccttcaccgttccgctgccccaggatatggcagcattgctcgttccagcagcagtgccttaagcatgccgcaacggcccagcacagcggccgccggacaaacagcctgcacagaaaaaggcagaaagatcctgtacacgaatctgccccaaattgccatcattgcacaggccgcctgcctgagcgcagcaatgcagcccatttcgctcacgcaaacgcctgccaccagaatattaggacggagcatcaagctgatcccaccggccaccgcctccctttggatggcgtacaacctccgctatgcgaaaaacaccgtacaataccggaaaagcgcgcaggccgaactgctctgttgcctcactcagcggactgccgtcctgttcggttcagccggcagtatagaaacgtcaccgtgctgctcctgtgaatcggcttatggtgagatcttccggatcagcccgaagaggtggaacagtccattgaccacaaaatgggggcaagcagtcttaaaagaatggacggcaacagccgcccggaggcaaaacagtatgtttttgttgtatttttgcgttggttgtgctatttttaataaaaccgcgccgtctgaccccagccggtgaagagaggcagttctgactgcgcggcctatcgaatagaatacaatgtgataccatcgtttcgccgccgcgtgcggcgctgcgactgcgaaaggagcattctgatcatgaaaacacccattttcaccggttccggtcttgcaatgatcacccccatgaatgccgacggcagcgtaaattacgctgagattgaccgcatcctggaagatcagctggccagccacaccgacgcgattttgtcctgcggcaccacgggagaagcctctactttggaggacgaagaacacctgcaggtgatcaaacatgtagtcaagcgggtaaacggccgcgttcccgtcatcgccggcaccggctccaacaacaccgcccacgcagtcatgatgtccaaaggggcagccgatctgggtgccgatgccctgctggtggttaccccctattacaacaagaccagccaggccggtttgattgccagctacaccgccgtggcagatgccacggaactgcccgtgatcatgtataacgtcccctcccgcaccggcgtcaacattgcccccgacacggcctatgccctgtcagcgcaccccaaaatcaacgccatcaaggaagccagcggaaacatcagccaggtggctcagatcgcagcgctgtgcggcgatgatttgaatatctactccggaaacgacgaccagatcgtcccgctgctcgccctgggcggcaagggcgttctgtccgtggccgcccatgtcgccccgcagcagatccacgacatctgccagctctggtttgacggcaaacccgccgaatctgccgcgctgcagctgcagctgttggaattatgcaatgtgctgttctgtgatgtaaatcccattccggtgaaagctgctatgaacctgctgggctatcaggccgggccttgccgtctgcctctggtggcccccagtgaaacaaatctggaaaaagtccgctccgccctggaaaaatacggctttctgggcaagtaaaactgctgtttgccggggagcgccgcggcgctccccggttttcttttttcttttaaaattccttcttgacaaatccaaaaatttatgctattctatacaagctgaatctgccggagtggcggaattggcagacgcacgggacttaaaatcccgcgaaggaaacttcgtgccggttcgatcccggtctccggcaccaaattgaataacgcggtgtagagcagttggttagctcgtcgggctcataacccggaggtcgttg

SEQ ID NO: 2205 - DNA, 19305 bp, Unknown
  16S sequences of unknown bacteria
catatcttggttgaaacttctcttcttattggttcatatcattttaacacatacatttttaaacaaaaagcgtgcagccctgttttttaaagtactcaattttttcgtaaatacgtttttcgggaaccttaagctctgccgacaggcagcttatacacataaattcgcggcttccgcggtttataaattttttgtgtgcgcctatgtcgttaaacgaaagctctttaccgcaatgaatacagtatgtcattacttatttaccactttgcagcggtataccaagctgtcatacggcttgatattatgcataaaggttccgtttttaaccgtaatgctttcatcctcccacacgctttgcatacacagcgttctgccggtgctttcgggcagccccagttcgtcaatatttattctgaccgcaccctcttcaccgctgaaattaaagactccgagcgctatatcgccgttttcaagaaaacgcgcatacgctttgatattgtcgttccagaacgggttcagcttgaatatctggcagcaggcttcgtcctgatttatttttataagctccctgttggtaagtattttaaaggtttcgtcattcatattgcgtatatcgcagcctatcataagcggtgaagcgagcaatgcccatattgaaaaatgggtcttgtactgcgtgtcgctaagcccctcaagacctacgtagcccttgccgtacatgcctactaccagcatatccatatcgttaaagcaacccttgccgccgtaggcgaatatgctctcctgctcctcggtgagcttttttatcgactcccatgcatcggctatatcgtatgtcgagcgccacatatcggcacccgtttcgcgtatccactcggcggtattatcagcccccccaggagcaggcgctgaaaagtatatctctgccgcagtttttgagcgctgtgcccatgcggcggtacaaatacttgccgtgaattatgttgctgtggtagcagtaatcgtatttaagaaaatccacgccccatgaggcgaaggtttcggcgtcggtaaattcatgctcaaagctgcccggatgtcccgcgcaggtaagatttcccgcgcaggaatacattccgaatttgagcccttttgaatgcacatagtcagccacagccttcattccgttcgggaatttttcggggtcggcaacgagtctgccgttttcatcccgttccttttttgaccagcagtcgtctataacgaggtaagtatatcccgctgtcaaaagcccgctttccgccattttgtcggcagtgtcctttattaattgctcgtttatatctgcgccgaaggtattccatgaattccagcccatgggcggtgtgtttttaatcatttttcttgacctccgtgaaaaaatattgtaaattaagtatatggtataaaagtattattttcaataatattttattgcaaatatatgtatttttgtttcacggaggaattttttatgcctgcaacgatctgctacgggcgacaggactgccatgatttacattcatggggacccggcataaggacctgctatgtattgcattatataataaggggtaagggaacgtttataaacggcggcaaaagctatgctttagcggcaggggagagctttgtgatacgcccgtttgataatattgcgtattaccccgatgaaaaagagccatgggagtacacatggattgagtttaacggtgaaaaatatgcttctttgcttaaccgtatagactttgcaagggataactgcataatcggcgcagtagacagagagagcatcatgccgcttttcgatattataaaccgaataagcctcggaacgcaaaagaacaccgtgagcggcatggcttcggcaatactgggggtttacgcggatatgtttgagaaccatgcgaaatcgggcgaaaacgattgctttgactcggcgcggtctttaattgaaaacaattttcataaacccgattttgacctttccgcggtgtgcggcacgcttggcataagccgcgccacactgcacaggtgcttcgtgcgagtgtgcgcaacgccgccgggcgcgtatattatgaagtacaggctcgaccgcgccaaggaatttctggagcgcgggttttcggttaaatctaccgcgctttcctgcggtttttccgattcactttatttctcgaaggtcttcaaggcgtccgtcggcgtatcgcccggcggataccgtaaaagtattcacggcgctgaagacggcaaataaatatcccgcgttatctcggtgcatttttcacaagcggcatttcggtcattctcagctttgcgcagccgtatgggtaaagctctgccgtttccgtatccgacagcggttttgccgaatgcggtatcttaccgcatacggtttcataaccgtcggcaaagccccaatcaattttgcaaacgcttgctttaagcaccgcgggcggttcgctttcagaaaacggggaattgccgaccatgcggcgcaccgcttcaagcccgtcgccgcaaaaagcataattccagtcgctttgcggtataagctcataatcacagtaggggaattttctttcaacgccgtcgtgagtgtattcatgcatacgcttttcgtattttatgggtaatgaaaacacaagcgaaccgcagcgcgcggtattaagcccgtaagggcggcttataagcacgggtcttgtttcataggaaatttcaatagtcctgtttttgcaaggcgttattttaaagctgagcacacctatatcggctttttcaccgtttacggtgacattttccgcaaaggacggaatacggattttaaattcaaactcaatgtcggaatttacggtgtatttaaagctgtttttaaatgggtattcggtttcaagatttatattaaagccgtctgttttaagatttgacggcacgggcaatacgtttattacagtgttttcgccgtacataaacgccgaaagcgcgaatttcggccagccctgattgaagtttgccgtgcaacagccgaaattaggctctaagccgaataaatgcgcgtcgctgccgttggttctgaacagggatttaccggggaatatttcacaggcaatctggttgctctgctggtcgtactggtgcgtccacatatcttcgcttattgcggcgggcagagcgttgaaggcggcaagctccagcctttctgcccacttttcattacccgtgtatgcgtagagccattcgtaagaatacataagctccgtaaccgagcaaagctccgtgccctgtatcgggcttaagcccgaaagcacctcatcgcctgtaaaggttgcaaccggggtaccgttatatttttccaatatatcgcaaagtcgggaggcgctgtcggtgtattccgaattgaaaaggttcgatgtgagaacctccgatttcagcatcattgccatatttacaatgtgtgtttcaaatctttgcttattaagcggggttttccaaagctcggtaaattcgctgtagtccgcgccttgttctttcaaaatttccgccaatttgagcagccaatcctctttaaagcggtcgtatgtaaatttaatggctataaaggtttcgaaccacctgaattttccccagtcaaacagcttgatttcaccgcgccgcaataattcataatagtttttaagtattttgtaaattacgttcggtatgcgttcatcctttgagcagtcataataaactacaagcacctttgtgataagctgtaccgcccaggtatcgtattcggcgcgtcggccgtcggggcaggggcatatccagccgtcctccttttgcgcggcaatgatcgcgtctatatacttttttgcgcggcgcttcatatcctcatcgtccaaaaggtaagcaagcgggataaacccatcgagccagtagggtacgcgctcccacccctcgcgcgtgccgcctatccaggcgctgtttgcaacatcgggccacattttatcaagatttccgctaagtcccgccgcctgaatttcaagctggcgtttgagccaccccgatggctttatttcatttgtcgtataaaaattatatttccgcatattcttatctcctttctatatttattttatcacactgttttttattaaaacatagtttatttcacacaatacattgacaatatcacactgtgtattatataataatttcggtgatgaaaaatgcagggagtggatttgaataagccgatacgttatataaacgcgtcattgcgctttttcaaggagggcgagcaccacgttacgcgcttttgtgaggatgacgttttactgctggtttacagcggcgttctgcgtttttccgaaaacggggagcagaaggaaatttcggcgggagaatattacattcagcggcacggtatgcgccagggcggcgaaacggcgagtgaaaagccgaaatatctttatatacatcttcgggctgaaaactgggcggcgaagggcgatattcttccgaaacgcggtaaatttgaatattccgcccttaaagcggatatggaggaaatgaaccgtctgtcgcacggcggcgcgccgtatattgcaaaggcgggcaagctttataatattttaaccgcactcggcgcgaaaagatctgtcccgttgcctgctgatgatatttcggcatatattgcgaaaaaccgtggcggcgaaattactctgtctgtgctttgcgaggaatttcatttcagtaaaaaccatataataaatattttcaaaaaggcttacggtatgaccccgatagcttatcttcaaaaccaaagactgcggcaatgcgaatatcttatggagatgacctcggattcgcttgaaagcattgccgcggcaagcggttttaataattactcatatttttataagctgtttgtgcgtaaaaacggtatttcgcccgaaaaatggcgcgagaaaaggcgattggggcagtaatacgcaaaaccgaacccgacggttgccgtttaaacgttgccgtcgggtccgatcagggctataaaccgcgtatgcgtataacgctccgcgatttttacaatctttcaaaaaccgtcttgataaacaaggcgataggtagtataatcttgatatgttaaggggtattttttatgaattacaacgcgaaaaacagtcttttactccagctgctgaagcttttcggcgcgtatatagtttcgcaactgcttatagtttttatattcgcggctgccgtatcgggcgatgaaatacccgaaaaatacgatctgcctatggttattattgcaatactgctggcttttgcggttaatatggtaatagatttcaacgtgatagcaaggcttaaaagcaccattgcaaaatcaaaatcggatatagcggcggtaaccgaaaccggcgccgcccttatagacaaggcggagcgcgttgccgataaatacagaaaagccgaaaccgaggtgtattcggaatttgccgaagcccgcagcggcaagcgcatacgcagcggcaatgatttcaaaatggttatggaggcataccccgagcttaaatcaaacgagcatacccaaaagcttttaaatcagattgagcagacggaaaacgcaaagctcaaagcccgcatgacctacagcgaggcggcggcgaaatataacgcaaaaatacactcattcccgattgttatgctgcgccgtgcgatgaagtgggaggatgaagtaattaccgcaggtattccgaaagaagacattgtttcggatgaagagttgggtatttaataggatagcttattttattatctgccacgtgtttatcagtctgtcaagcgaccaagccgcgtttgcggggctggttgagggcaggcagattgccttttgccccaccgttttttcaatataacgaatatagtatttttccgctgttttgccgtttacgaatattcggcttacggcggtattttcaattatacccgcaatatcgttcggtttaacgttttttatgctcgtatcggcagagcccgtaatttcgcactccgcaattacatcccacagtgcgagcctgttttcaagcaccagctttttcttttgctccaccgtttcgggaacaggcgcggaaaacacgcccgcaagcacgcgccaaaagcggttttgcggatgtccgtagaaaaattccgcctcgcgtgatttaaccgacggaaagctgcccaaaataagggtctgagaagccttactgtaaagcggcggtatattgtgcagaatcattcttcatcctcttttaagcaccgcaccgcacagggtgcacaatgcaaagcccgcaatatccaccgcgaccaccgtagcccccacgggcgttcccgcaagcaccgaagcaatcatgccgagagcggtgcatactgcggcgaataccgcagagaaaaccgaaaccgacagaaagcttttaaaaagccgcattgccgacagcgcgggaaaaactataagcgccgatacaagcagcgagcccgcaagcttcattgcaagcactattacaaccgcggttataacggcaataagcatattgtaagcgccggtgttgacgcccgacgcgcgggaaaagctttcatcaaaggttaccgcgaacagcttgttgtaaagcagcacaaaaagagtaatcacaactaatgccagcaccgcacagaatatgacctcgcccccggagagggtaagaatcgaggtcgagccgaaaagcgtgccgcaaacatcccccgaaacatttgcggagggcgagaaaatattcattatcagatacccgaacgccagcgccccgacggaaagcattgcaattgcggcgtccccccgaatttttgaggaggctccgccctttaaaagcaaaacggcgcatataactgtaacgggcagtattatcacggtttgatttgtgaaattaagcgcggcggctatcgccattgccccgaatgcgacatgcgatagcccatcgcctataaacgaaagcctttttagcaccaacgtcacgccgagaagcgacgcgcacacggcaattaaaattccgaccgtcagcgcataccgcacgaagggatagctgaaatacagcttcaaattattaaatgcttcagtcatttttttcagcctccgtatattcgcccgccgtgccgaaaaagccatgcttgcctatttccagaatgtgtgttccgagcattgcggcgggtatatcgtgggttatcattataaccgtcatgccgtctctgttaagtcttgatataagcttatacatatcctccgccgcctcggggtcaagccccgccgtgggttcatcaagcaataaaagactttcggcggcgcaaagcgcgcggcatagcagcgcccgctgctgctgcccgcccgaaagagtggcatagccgcgctttacaaggctttctattcccattttgcgcatattaaagagcgcatctgccctttgtgccgcgctgtaaaacggacggtaaccgcatttacccgcaaagcccgacataacaatttctccgactgttgcgggaaaatcgcgctgaacctcggtctgctgcggcagatagccgatcttttttaagtcgagcgctgtttcaagactgcccgatacaggcttgttgagccccaaaagagtttttataagcgtgcttttacccgagccgttttcacctataacgcaaagataatcgccctcgtttaccgtgaaatttatattttccgcaacggtttttccgtcatacccaagcgctaaatcacaagcccttataagcgtcattcattccaccccgatttcaatcgtctcaagatttttttccataaccgaaatataggttattccgtttttaatatcatttttatttacggattgcatactgtcaagcgttaaaattttcttattcttttttgccgtgttttggtttaccgcatttgcaatatcgccgtttgaagtttcggttataaaaatacagtcgccgttttcatcggcttttttcgcaagaaatatcaccgtttcaaagctcgcctcggtttcggcagaacagccgggaaaggcggcgtaataatccagtccgtaatcgtcggtgagatacctgaacgggaaacggtcggcaaaaatcagggctttttgttttgcgtttttcaaagcatcggtatatttttcatccaaggtcttaagagctttagaatattcccccgcatttttgcggtaaacggctgcgttttcaccgtccgccgcacacaaggcctccgcgattttatcggtcagtattccggcgtttttaagggaaagccaaatgtgctcgtcggtctcatccccgtcgcttcgcaccgcggtgccctcctcgcgctcgttcaccgctctgtcacccaaaagctccgtgagcttaagcacccttaaatttttattttccgaactttttatgacatccgccacccacttttcggattcgccgccggtgtatatcaaaacatcgcagctgtgcaatctcacaatatccgccgcagtgggctgatagctgtgcatatccgctccgttctcattaagcagcgacacctctgccgcctctcccgcaatattccgcgcccaatcgtaaagcggaaaaaccgtgcaaagcacatgaagcgagccgctccttttttcgggcagctcgccgcagccggcagataaaaaaataacggcggctgtgagcgccgccgccaaggcatatttaatgcggcctttcattctgcagtcaactccaatttgcaactcacttgcaaattagtataactcctttcctgccgtttgtcaagcccgaagcgtttaataaaataatgtctactgaataattgcattagcaaatgcaattatataaaatcgagttaaaatctcgattttatgggtcaaaacctttgttttgaccgtcagtttccattgattgtcgcctgattttaaaaagaatcaaaatgtgattctttttaaagtgcaagggtttttcgcaaaattgcgcaaaaaccttgcacctgaacaattcaaaagtttacaccaacatgcttggttaaggtactgttgaattgttcagcaggcattaaaataaaaccgaccccactcggcttaaagccgggcagagccgattttatttgtgttatgagaattttttatcaatttcctttgcggcggcttcaagagccgtgcaggtgaatttttcaaactcgccgttatccaccagctgcgccaaatcagggtcgataggcagctccgccaaaagcggaagacccagctcctctgcgacggcgccgctcccctttccgaaaagacggagctttttgccgcaatcgggacataccgcatagctcatattttcaataagtcccaaaaccggaatgtccatcattttcgccatattataagcctttcttacaataagcgacaccaaatcctgcggggaggtcactatgaccgcgccgtcgatcggtattgactgaaaaacagtcagcggaacatcccctgtgccgggcggacagtcgattatcagataatcgaggtctccccaaaccacgtcctgccaaaactgctttacagctcccgcaataacggggccgcgccaaagcaccggcatatcgccctcctcaagcaaaagatttatagacatcaccttaatgcccgtttcggtttccgcgggaagaatgccgatttcattctgatatgcgcgcgagcgtattccgaaggttttagggatagacgggcctgttatgtccgcatcgagaatgccgacatttcgccccattcttttaagcagcaccgcaagcattgaagcggtcatggattttcccactccgcccttgccgctgacaaccgccaaaacgtgctttatgttattgtattctccggtaggctcaataaggctttggctctcgcgcgaagcacagctttcaccgcaggacgcgcaattgcccgagcagccggtatttttttcttcagacattttcattttctccgtttctgtttgttttatctaaatcaagtataccactttttatcggagatatcaatagctattcaaggtaatattctctgttaaattcaagcgtttttccgcctcttatattatccgtaaacagggcgggattttcggagttggactcaaacatatcataatgattgggtatgtttaccgccgcgccgattttctcggcggttatgagcgcctctttaacgttcatattgccgagcctgccgtttatacaaataaaggcgtaatcgggcttatattccgctatgccgaaaagcttttcgttaaaaagcgtatcgccgctgaaatatagggtcttgccttctgcccttacaataagcccgaacgccttgaccgtgtggtcggcaaaaaccgccgttatgttaaaatcgcctacggttacgctgtcccccgtgttcagggctttaacattggttctgccaagctttaaaagctcagcttttccctcgtttgtggtaatataaaactgattttcgtttattttcaccaccgtttcggggtctaaatggtcaaggtggttgtgggtgcatataaccgcgtcgcaatttatatcttcggggtttatcggtatcggcaatgtccgcggtctgcccgccacacggttaacgctgtcggaaagataagggtctatcacaatttcggtattgccgctttttaatatatatccgctttgccctaaaaaccgtattttcattgtacactttttcccccgtcaacataaatgctctgccccgttatataccgtccctcgtccgagcataaaaggcttaccgtgcccgcgcagtggactatcatcttatagccgtccacttgcaagccttatcgctgttgctctgcccagtgtgacattgcaaaacctctcaaattattatttcgtttaccgcagagccgtccttgtgtataccgaattcagcggtgaaatccttgcccgaagcggtataacctccgcaaaatccgcggaattcgatatagccgctttcatcggtaacagcctctaaatcggtatgccatacctcgtttataagcgtatgaagccttaaagcagactttttaggtgtcagatcatgatgccaaagaccgccgcggcatttgttctcattccagtcgcccgagccgtcgtcataggcatagccgtcgggaacgttccagtaaactatatcctgcatagcagggtggctgaaccatacgctgtaaagcaattcaatcagatccgcctgcagctcctcatcctcttcggtctcgccgaaggtcggcaaggtaacctcggtcatttcaagcggcagaccgagctctgcaataacatcaagtcccttaagtattttcgcgggatcaaccataggatcgccgcaccttacggcattttcataggcttcctcggttttacaggttgcaccggtgaaaatatggtgctgtaagccgagcttgtcaatttccgcaccgcttttaagcgcattttccaccatcataaaaaagctgctgcgatattttgcccgacttaaatcaaccagcggatttccttcatttataataagtgtatcattcgggaaatattttctcgccaaagcaaacgcccattctattatatcacgcttactgctgattgcgcttttatagctccatccttgctcgcagagcagctcattgataacctcaaattcaagcagccttccggcaaagcgctcggaaatctgcctgaagcgctcctcataaagcctttccatcccgcgcatatcgccgcgcggcagccactcaggaatgaatttatcgtaaaccaggcagtgcagcttcggcattatgccgttttcctcgcagtattccgtgcaaagctcgggcgagggtctgcgccacaccttcgggctgtttttatcataacgcggcttaccctcttccggctcaagaccgtcccaataaaacggaacggttgcaaggttaaagtattttttaaattctccgcggtatcttcggttatactcttcgttgtcaaattcatcaagcataaaaatgtttgcgccgaagccgaaatcatgtgatgtctgattaatcctcactttgatattttttaaaggcttcccgtccgcgccgatgaaacggagcttacacgggcgctttcggtatttctctatatcatttttaactctgccgtcaagcagtgcgcggttttcctctgccgccttcaaccatatttttctgttctctgccggatccgacatgagccccacctccgaaaattttataattaatgcctgctgaacaattcaaaagtaccttaaccctagcatgtcggtataaacttttgaattgttcttgtgcaaggtttttgcgcaattttgcgaaaaaatcttgcactttaaaaagaatcacattttgattctttttaaaatcaggcgacaatcaatggatactgacggtcaaaacaaaggttttgacccataaaatcgagattttaactcgattttatataattgcatttgctaatgcaattattcagtagacattaattaacctttggtatcgcaaaaaacaacctctgatttcattataacattttgcgtgagtttttcatcaactatattactttatttgcaaactattttacgatttaatgcttttgacttttaaaacagctttatcattatcattgagcatatgcctgtgattacgcccaaaatgctgtaaaccgaaagcttttccttatatatcgccgccgccgcgagagtggatattatagttccgccgccgtttatgaaggtgaacaggaagaccggcggcaggagtgcagtcagctttgttgcaaactggtttataacaaacaccgccgccgcaagtgcgattccgcagatataaagcgttttcccgagtttcaaatcttcacttttgtatttttcggatttacccatggcaaacgccgtcggcagccctgccgccgccaccgatccgaaggacagaaacgaaaacaggcttatgctgccgttcggcacataataggtatacatctgctgtgcgagcattgtaagcccgtttgcaagcattgctcctatgagcaaaagaagtgtcttaaggctgaagccattatatgtattttttgaattttttataagcagccatgcggaaacgaaaaatatcgccgtacccacgccctgcaaaatgctcacgggctgaccgaacaaaaagacccccgcaattatcggcacaagcagccccgccgttccaaacatcgaaaccaggctgaccgtaccgcttttcattccgtatatgctgaaaaatgtactgaaaaagagcgacacgcccgacaaaagcgcaattcccagggtcggcagatcgattttcagatttgacatatccgccagcagtaaaatgagccccaaagccgcagatacggaatattgataagccgtatactttacggtcagaacgatattattggcttcgttgcttgaaagcttactgaaaaccgcctgcacaacgcgggcggcaagaatagaaaaaagataaacataaatcatattgacattcccccgaaatgtttgctattataatagcatagcacgcatttactttcaataaattgcgcgccgaaaaattttcggttttcggaagtgaaaacaatgactctttcaaggcttgcacagctggcaaatgtagcggtttcaaccgcctcaaaggcgttttcaatgagcagcgacataaacgagcagacacgcgaggaaattttcagggtcgccagagaaaacggctgctttaaaaagttttttaatgcgaaataccccaaattcacagtcgcactcatctgtcccgaggtgcacagccagcattattccgagttatgctttgcgctgcagagccgtcttcaggcgggaggctgtgagctttgcatatcatcaagcaatttttccgcagagactgccgccgaccgattggattattacgaaaaatactcttcaaccgacgcgataattcttatagacgcgccggacacggtgctcgcgcctcacgaaactccgattgtggctgtgggcggcgaggttaaaaacgccgacgcggttataacccttgattatgagcctgccttaagggaagcgctgctttattttaaagaatcagggctttcgggcataggctttataggtgaagcacgcaccgtttcaaagcttgccgcattcaaaaggaatatgaacggaattttcggcggcgactttgaaaaatacatatccgtaagcgaactccgctttgaaaaaggcggatatgcggcggcaaaggcgctttatcagcgcggctctctgcccgacgcgctcatctgcgcttatgacgatctggcgctcggagcaatgcgtttcttttacgaaaacggtatttccgtacccgaaaaaataaaaataatcggaatggacaacataccccactccgaatattttgcgcccagcctttccgcaattgactttatgaacgaggacatagcctctgcggcagctgaaagcgtttttgaaattttaaacggaaagaccccgaaaacggagcgcaattttaaagcaaggctcattctgcgtgaatcatcggcgaataagcctataggatagacaatataatcggacaatttttccgctacgggaagtattgcaccttgattgtattgtctagacaaagcaatcagggtacaatagttttttcggctacacagcgttattagcggctttgttgccctccgctcacaatacgacagtattcttcggtcgggcgtcgcgccgctaaaaacgctctttgccgaaaatcttcgacctgaaacgagaagattttccgttttagaaggcgaagaacgcgggaatactaacgtatttcaagtgatgagacaaacaaaacggggaaatattacgtttcaggaactgttgtatcctgattgctttgtctaagcaggaaaaattgttcagcttcccgtagagccgaagccaccctctccgcgcacggtgtcggaaagctcgtccgtctcggtaaattccgcccttaaaaacggggtgataaccagctgggctattctctctccgtcggcaatttcctgcacagcgtccgagtgattatggagcgacaccatgatttcgccgcggtaatcgctgtcaataactcctaccttgtttgcaggcgccaagccgcgctttgtggctataccgctgcgggcgtatatgagccctgcgtagccttcgggaatttcaaccgcaaagcccgtgtggatcattacggtctcatccggagctatgcttaccgtttcgccgtttgtcagcgcgtaaatatccgctcccgcagccgaaagcgagccgtaggtcggggcatgcgcgtttttatcgagctttttgaaatttaccttcatttttatcattcctttaatttattcgtaaatatttccgctgccgacagctctttcccaaacgccttcaagccaaacgacattaccggcttcaagcgttttttttatatctattatgcgctgatttgaagagccgcggaagataagcgcggggcttttcttttcttctataaattttccatccaccaaaacatcgatatatccgagcatttcccgcgccgaatcatcgttcagtccttcgaattcaaagccggtgtagcaccaaacgcttttttcggggaattcctttttcaccgtttttaaaaattcggtgagcgcgggtcggttttcgggctcaaagggctcgccgcccaaaagcgacagcccggttatatattcggcagacatggcgttcaatatttcacgctcggtgctttccgtaaacggtttaccgtaagaaaaatcccatgcctctttattaaagcagtttttgcacctgtggcggcagccgctcacaaaaagcgaaacgcggacgcccggtccgtttgcaatatcaaattttttaagcgccgcgtaattcattataaaacctctgtgacagtattaagggacggtgcaaagcaccgtcctttttaattcgaattgaaaattaaagatgcaaaactctttctttaatttcctgtgttctgccctgattccagaactgcgtgccgatgtatccgcaggttctgcgggcaacattcattttatcctgatcggtattgccgcaattcgggcatttccaaaccagcttgccgtcgtcattctcgcttatttcgatctcgccgtcatacccgcaagcctggcagtaatcgctctttgtgttaagctcggcgtacattatattatcgtaaataaacttcataaccgaaattaccgcgtcaagattattctgcatatccggcacttcaacatacgaaattgcgccgccgggcgataatgcctggaacttggcttcaagcgccagcttatcgaatgcgtcgatattttcggtaacatgaacatggtaactgttggtgatatagtttttatcggtaacgccctttattatgccgaaacgcttctgcaggcattttgcaaacttataggtagtgctctcaagcggcgtaccgtaaagcgaatagtcgatattttcatcggctttccactttgcggtatactcgttgagctttttcattatttcaaggccgaactcctcgccctcgggctctgtgagctttttgccgatcatgctgtaaacgcattcccaaagccccgcatagccgagcgacagggtggaatacccgccgtggagatatttatcgatagtttcgccctttttaaggcgcaaaagcgcgccgtattgccaaaggatgggggccgcgtcggacacggtgccggtaagtctttcatggcgcgcctgcagcgctctgtggcagagctgcatacggtcatcgaatatcttccagaatttatctatatcgccctgtgcggaaagacctatatccaccaaattcacggtgacaacgccctgattgaagcggccgtaatacttcggcttgccgttttcatccacatatggcgtcaaaaagctgcggcagcccatgcaggtgtagcagtgaccctcgccgtttttatcgatcttgtttttaagcatgaccttttcggaaatgtaatcgggcaccattcgctttgcggtgcactttgccgaaagcttcgttaaataccagtactcgccgtcctcggttatattgtcatcctcaagcacataaataagcttcgggaatgcgggcgttatccacacgcccttttcgtttttaacgccctgatagcgctgctttaatacctcttctataataagcgccaaatcacgcttttcctgctcgtttttagcctcgttcagatacataaataccgtgacaaagggtgcctgaccgttggtggtcataagggtcactacctggtattgaatcatctgaacgcccttgcgaacctcgttgagcaaccgtttttcggttatctcgcgcgccttttcgggggtgatttcagtccccgcctcgcaaaactcctctaaaacatcgctgtatattttcttgcggcttatatccacaaagggggctaggtgcgccaggcttatgctctgcccgccgtactggcatgacgctacctgcgctattatttgggttgcgatattgcaggcggtggaaaagctgtgcggcttttcaatcagcgtgccgcttatgaccgtgccgttctgcagcatatcctcaaggtttacaaggtcgcagttgtgcatatgctgggcaaaataatccgcgtcatgaaaatgaattatgccctgctcgtgcgcttcgactatatcgttatcaagcaaaagtcttttggtaatgtccttgctgacctcacccgccatatagtcgcgctgaacgctgtttacggtcgggttcttattggaattttcctgctttacctcttcgttgttgcattcgataaggcttaaaatctgctcgtcggtggtgttcgcctttctcacaagtgcgcgctgataacggtaggttatgtatctgcgcgcaacatcgaaggcgcgctggttcattatctgatcctctaccatatcctgtatttcctcaacgcttaaagagcggttgacattggaagccgcgctctcaacatcctccgctatgcgctttatctgtatatccgacatacgctcgctcggaacaacgctttcatttgccttttttaccgcaatttcaatctttttagggtcaaaatcaacctctgccccgcttctttttatgattttcattcaaacatccccttgtagccgcattccaaaaaagcggcttatatatacaatatcttgttagcatgaaactattataccacaaattacggaaaatgcaatagtcaatttcaataatattcaggtttttgttttgaacccttcgccgagcacctcgcccgcctccccgacgattataaaggcatttttatcacactctgtagcaagcctgcataccgccgccacctcgttgcggcgaacggtgcacataagcatctgcctttgagcgccggtgtatgcacccgttacattaagcagggtaacgccgcggtttataagcgacattatgctgtcggacagctcctttgaattatcggttatgacataaatgatcttgcccctgtcagccccgtagagtatcacatccataacacgggacgaggtgtaaattgcaatcacggcataaagcgcgctttcaatatttttgtaaaccagcgccgtcgcaaccaccaccgccgcgtcagccgcaagcataagtctgccgactgtcaggtgcggaaatctgcggtttatgagctttgcgactatatccgtgccgccggtagtggctccgcgcagcataaacaggctgattccgagtcccatcagcagtcctccgaagagggctgccaaaatagggtcgatttttattctgggcaaaaacagccccgaaatatcaagcatcagggacattatcgccgtagcgacagcggtcttcgcaataaaaataccgccgaatttaataaatgccgccgcaagcagcggaatattgagaacgaacacaaccgcgccaatcggcagcgagaaaagatagttaagtatcgtcgcgatacccgtcagtcccccgggtgatataccgttttccgaaaggaaaagcaggactgcggtggagtagataaatcccccggccatatagaataaaatatcggtcagaaatgtgaatatacgctttcttctcatataagcttcctccaaacgggatactatattcggcagacgcggggcttttctttattcttccccttttttgcgaaaaaacaaagcctctttaaatattctatcatgtttgcggcttgcgggcaactcgaagtcggcg

SEQ ID NO: 2206 - DNA, 32759 bp, Unknown
  16S sequences of unknown bacteria
accgcgcgttcgcgcagcgccgcccgcgcgcagggatacgtttccgccttgacgcaacaggcgcaataactcgcctcgccgcacagatccttgcccgccttttcgctcgcaagccacttgtcgatatcgatgatcttttgtaatttttccaattcttccgaaggtgcgctaaatccgtctttcatgggaccctccgttctttctgattaaaactattatagtacaaatcggctgcgaaagcaagttattcggatttttttatcgcgaatttataaagtgtgcggaacgttacgatcgatcctgtttgtcgctatcctcgggattctttgcaattttgacgattttgacgatctgcatgatcgcgatgctcactgcgacgagcacgacgagcagcaacagccagttttcaagtttggtgaaaaagccgatgatcttgccccaaaagacggagtgcccgacttccacgcccgtaaagttttccgcccgtacgggatctggatcgacgggcgccccctctttcacgccctgtgtgcggagataaacgccctgttcgtcgtgaccgacctccacgactttgtgaatgatgcgctgccctttcagcattccgctaaggctgacaaagaccgcgttctgccctacctgaacgctttcgatgcccgtgctctcgatgacgacgagttcgcctacgccgatctcgggcgtcatggaatcggtgagcacgatgacgaacgagcgcccgaaaaattctaccggttcatttttgctctttgcgtccagcgaaacgaaaaaaacgtacagcgcaagcagaaagattacagccgcaagagtaaaacttacggctgacaaaatcttttttttcttatttttcggttcaatcaagcccatcgtatttttcccgtaattcttccaattttttgagttcccttttccgcttggtttcctcgcgtttccgacgctttgcctcttcgagttcttccgactttgcggcgtccttttcgcgcagcccctcttcgtacagttttgccttttgttccgcgagaagttttttcgctttgatcctttccaactgcgctttcttcttgcgcgcctgttccagcctgtcgcggcgtttacccttttccttatccagttcggctttcagtttctccaatttcagaagttcgcggctctcttttttgagcgacttttcgagttcctctctcctgaggcgcgaaatctgctgataacggcggtacgtgaactgcgcgtctttgaccgcctgttcttttttctgaatggcagtctttttcagcagatcttttttcgcggggatctgcgaggcgatcacctcgtacaacatggcgttgttgatcttttcgatcgccttaaaaaaacgctgaaaattcattttcagttgtttttcttccgccaacgtgccgagccctgtcgctttgacgagttcgttcttcatctgacggaaataaaactcgttgacggtatcctcgcccgccgtctttttatcctctgcaaaagacggcataaatttatatttcgtgacgactttataattttttcgtttcggctctccgaagggaatattttcatattcctcggcctttaaaagtttgttcgtaaacagcgactgcacgctcaaacccgcaagaaccgtgagatcgtcgaaataatcgccgtctacgggcaggtttttgtccttgacttccacgctgtaaccgacgaacgtgtacgacgaaatgtacagccacaatttgtagcagttctgataatcgacgttcatcttgatgagattggtcttcatgatgggcgggtgcacgggctttttgccgtttaactgacgcatgaaatccgtgctctgtaaaattttcagacggcggcgcagcgcctttaccttttccagcagtccgcggttgcgttcgagcagaactttgtcgtgcggcggttccttcatcttgacgaaaagtccgcattccacctcgctttcgccgtaatgaaaattcgatctcaaattcacgttggtgatatcgtacatgtgcattttgccgttgatatcgttgtagcgctgttcgacaaaagtcacgagcctctgtacgagtgcgcacacaaaacggttctcgtatatggcgagatcttcctgcatctcggtcgtcaaaagttttttggggcgcacctccccgctttcggaaatgctttgaatatttttcgtgttggaggcgagatgacgtatcgtctttgcgttggtgcgacgcgcgcgctccacgtcaacgatcagttcttcgtcgatgatgaatttgcggggattgcgcgcgatctgttcgatggaatgcagcgcgccttccagcgtcaggatccaactgtcgtcgagagtgaccgcctcggacacgacgttatggaatacttcgttcttcccgccgcgcagcgccttgtaaaaattgtcgtacaacaatccgccgccgcgcattttttccataaaattctgaagatattctttgtccatgcccgtttctccttcgcggtcagttcactttttgcaattcacgaatgtacgcgatggaatatttcatcgtgcccttgccgaactttcggtcgaagtaagcgataagttcctgcaactctttggtcagaaacggcaggttgagcgaattgaatttgcgtaagatcttgctcgtgacgatgaaatcgatgccgcccgactccgtaccgccgcaagccatgtaagcgggaacgaacagtttcaactgtttcatgatacggttgccgaaactgatcttgaatttcgactgtataaaggcgtccagatctttgatgagcgcaatattcttatcggaaatctcatattctttgtacgccctgtcgaacagggattccagataattgaacgtgcagttgaaactttcggtcatgggcgcatcgaagtaatcagctttctgattgagttcgagcgcgatggcgcggtcgtacaccttgtcggtgatggtaaaggtggaatcgtcgttgttcgccgtgcccacgaaccagacgttctgcggcaccaaaagttttccgtaaatgacgtttttcgggtcggtcggagagggcgacgagatgagatcgatcttccattccgctatatcgggcatttccataatggataaaaaatccgcgaagtagtattcgatacgcgcgaggttcatttcgtcgagtacgataaaattgggatcttcgcgcagcgtcgtttcgtaaaggctgttcaaaaagtccgtttcgttgaactttttggtaaattcgttgaaatatccgacaagttccgcgcggtcgcgccaggacggctgcacggaaacgatggacgtattgttgttgaaaaacttgcccattgcgtagggaaggcttgttttacccgtacccgagatgccctctaaaataatgattttggaagtcgcaaggcctgcgaaaaacagtcggatcgtatcttcggtatagtagagttggagttgcgacgcggcgaaatcgacaaatcttttcacgatatcctgcaaggagatcatgtcggtatccgacataaagatgatattgggattgcgcccgtacttttcgtcgaggttgatcagtttcgtaaatcggctcgcttcccgattgccgcccgtcccctcgtccgaggtgacggcgagcgcgtcgttcgggacatagccttcggaaatctgattgcccactttgagcgcgaaaatctgatttttttctttgacgagttcttccgcctgttcgtgcaagcgggcgatctcctccatcagtttgtctttttccacttctttgccgcggtaaacgatatatcggcggatgagttggaccaagcgatatacgataaaaaagacgagcgcgatattgacgagagaaaccaaaataaggcagatccaaccgagtacgtcgaaattgcctacaactgcgcccagcgccttgaaataattgatcgtatcgagaacgacgatcttgtaaaacgcgtagagaatggaatagataaagttccagatattttgcagcgcgttccacaaaaaatccacgtagtatttcgcaaattcagccataccagacggcgcctccctacgggcggacgcatgccgccccgatgtcgttaatcctgatccttgttatccggttccgaaatttcgtcgtcatttccgacagatagtttaccttccgcgcgaagttcctctaagagttcttgccgcagtcgttcttttttcgtttcgtcgctgactttgttcctctcgcgaagcaccatgaccagattgaacgcaaaatacgccacgatcaaaaacgcggggagcacgatgcacacaaaaaagcccgtggaagagtgaaaccaggaaacgacgttgccaagtccgccgatcttgccctcgtagataccgacgatggttacgtcgggtataagcattttatcggcatcgagattattgtcgcccttggtttcgtatcttaccgagccatccgactgcttctcgaccttgataatcctatgcgaattcagtaccagttgattatccacgatggtattgtcccaaaaagtgatcacatcgcccggctgcaaatttttcttttcttcttcatcgaggatcttgattttcagaagatcgcccttctggaagttatcggctttatcgcccttcatcgaattgctttccaccgatacgtaagcggtgccgaaaatcgaagtgtaacctttatcccccgacagaatgatattgagcgtgagaataaaaacgaacaccagaataatggctacgatgacgtttacgacgatattgattacttttttgttacgcataatacacctttgttacttttttcgcgcgtgaaataaacacaaccgcaatgatcgcaatcacaaaaggcggacgaacatcgcccgctttttgtgattgcctggttttgtaaatatttagatttacgaaccggacttcataatacccgtaagatttaacataacagtcattttgtcttcgaagatggaattaaggcaatcgccgtccgtgccttccagccaaactttcacagttacggtgccgtaataaatacttgcagtttcagccgcgggtttttcaagaatcaagatctcactcgtagaagcatatgtactgtcattcgtcaacggcaatattacatttttagcaactgtctgagctattgattcggagacgcctaacgaataattatagtacgccgcggcaaggttgcccttatagaacccggcttgcgtcgtatcgttaccgccgtttgccgtcgtttcgaaaggcgcccaaacttttcccgtcgcagagtccccgctgcccgtaacgaacgcgatacgcgatgcgtgcgcggctctcgcctcgattctcgcaccttttgcaacggcttgcccataggttgcttccgtaatcgaatcgtcccaggcgaaaatctgatgcgcttgcacggctgtgtctttaacagcaacctcggcagtatttccgagcaatacgctcaagcctttatttgaataaaatgagaggtcgaattccaaataagaaccctcaccagccgcagagttctctttatctttcaattccacgccgttgtgatccgtatcggcgctcgtcaaagcgtcgagcgaaatcgttttatccttcaaaacatccgcagataaaattttacgcccgaacttcaaattcgaccaatccgtagcgctcgtcggtttgcccaacgcgatttgcagatcgtcgttaccggaagtaacctgtaagtccaaactttccaccgtaactttctgatttgtcgtgaaccaggcgaaagtggagcccgtggctacggcgatcgctatgaccaacgccgccaaagcgccgatcagtttttttgttgctttcataagatatctctcctttgatcatttcataatatttttacgggcgtcgcccgtagcaaccttaatacgcgtaaaagtccagtttcattttaatacggtcttgcagccgctcgtcggtgcagtccatatcccaaccttccacccagatgacgatcgtgtatttcactttgtcttcgggctgaaaatcggtcacccgcttcgccatcagttgtttttcggaaataaatgcgatcgtttcgtatgaagtgtgctgtttcagccagttttcgccctcttcgctcgcttcgggattggcgtatatatcgccgccttccgcgtcgccttcgatgatcatgacgcgcatgatatcgatcgccctgccgacgctgtcgacgacgttcaggctcatgtcgtaatccaccgagcgttcggtcttgttgaccagataaaaactgaatgccatataggtctgatatacggtgtcgctcttgtttccgatccccctggcgatcgagcggggaatatcttcatatgtggtggcgccctgcccttccagtcccgaaacggacaggcgggaggacagatcggacagatcctctttcatggtcgcggcaatatgcgcgccgtcgttggaaacattgatgataaaattgccgactttgttcccgtagatcgtaaagcccgcaaaaataacggaaagtgcaagcgaaacggctattacgatttttgatatgcgcatcatttgcagacgctttaaccatttcatagcacgactccccgaatgatcaaatgattttatgaaaaaaaaattgccaaaacatcatagaatgttttggcaactgacaaccatatcttgcgacttaggctcttagctttgcgtcatacccttttggatactttgcttttaacttattctaattatagaatattattataaaattgtcaagtacttttaaattttattcgaaaaaactcaaatatcgtattccgcgggcgccttgggcttgccgaaataatagccctgcccgtacgggatcgaaagttccttgataaaatccagcgttacgtcgtcctcgatcccctcggcgatgatacggaaatcgttcttttccgcgtagccgaccagcgagtttgccacgcctccgatcaaaaggtcgtctttcgcttcgtcgataaacgagcggtcgagttttacccagttgacctgcagattttccaaccgcttcaaagaactcatttccagtccgaaatcgtcgagcgcgatctgaaagccgcactgtacgagtttttgaatattttcgtgcacctcaggcattttgtcgaacatggcgaattccacgatctccatacacacttcgtttgcaggcactttatattttttgagcacgcggcggaaatcgtcggtaagattgggattcattaactgtttgggcgaaaggttcatggaaaaagtgacgtttttatcgggatttttctgcttataacgctgctgcgcgatgagcagttgttcgaacgcccacgctccgacccagttgatgtcgcccgattgctccaagatattcagaaattttcccggagcgagcacgccgagcgtcttgtgattccagcgcaacaggctttcgtaggcgaaaataacattgttctttaaatcatacacgggctgatagtataaagtaaactcgttcgcctcgatcgccgattttatctcctgataatatttatattcttcgctctcgctgttggagatttccgaagagtagatcgtatatttattgagtccgtttcttttggatacggcgagcgcgagttcgagattctgcttgaacgcgttaaaattggcgctgaacgcattgtaactgttgacgccgatgctcagatcgagttccagccgcacgcgcgtgatcaaactgacggttttacgcccttccaacaggcagaacaacgccagatcggagagcgcttttttatccaggtcctcgtcgacgagaaccgccaaaaggtcgtattcgtacaggcagaccttgctgcctttgggaaggagcctgtacaggcgttcgacgagtgtattgaccgcgcctgcgaattgtttttcaccgaacgattcgcggatatttttcgcatcgttgatctcgatgaaaaagacgctgaaatgcgtatttttgcccgcggaatgaaagcggcgcagaatcaaatcgtcaaaggaatccttgttaagttcgccgatcttcaacttatccgcgatatagcggtttcggtccttgcggataccgcgatagaggaaaaacatcgccgccgctgcaacgaggacgaacaggacgaccaacagaatggcgactccgggtttcaattctgcgcctgcgagcagttgacggatcatgtctttgcctccttttcttattcattatatgtgcattatacacccgatcgggcaaatatacaacacaattttcgacaaatatttctcaaatttaaatttcgggtttgaaatttcgcaacatttccaacgcggcgtcttcctttacggagcgtccgatcaagtacccctgaatgacgtcgcagcccatttcctgcaagatctgaagttgttctttggtttcgatcccctcggaaatactcaaaagtttcagttccttggtaatattgagcaccatgcgcgtgatcgcgcggctgtactcgttggccgcgatatcgctgataaattcgcggtcgatcttaatggcggcaatgggcagttttttcagatataacagcgaagaatattgggtaccgaagtcgtccagatggatagaaatgccctgctcgcacagaatctgcaattttttgagcgtttcgtcgaaagtgtgcatgagaaaggattcggtgatctccaccgagatcgtacccgctttcagatcgtatttatgatatattttcaaaaagttctcgacaaagcccgcctgcatcagttgaattggcgaaacgttcaaagaaaccgtgacgcccctgccttcgatgatcttggcaaaacgcatgcttgtatcgaagacaaaatctcccagcatgaccatgtttcccgtacgctcggcataggaaatgatctcatacgcgctcacgttcattttcgggttgcgcacgcggaagagagcctcgaatcccgtaatgcggttttctttcagactgtactgcggctgatattccatgtaaaaatcgccgtcgtcgagcattttacggatatcgtattgcacgaaaaatttggcgtactgttttttctgggattcgtgatagatgaaataatcgttcatcttgtcttccgcagcgcgctttaacgcggcgtccgccgcaatcgccgcgtactcgaaatcgcgccgttccatgaccgcgtcgcagacggcgaatccgaatttcgcgccgatattgacgaggttgccgtcgatcataacgggctgatcgataaaattcaccgcgtctttgatatcctgcaataaattatcaagttttttcccctcgggatacagaataccgatgtgactgtcgtctatctcgtaggcgtaagtaaattcctgctcggtctttgcaaagatcttcgcatagactttttgggcgaattccgtgccgaacatcgccttgaaattggcgagattgccgataaagatcgtgcctatcagaacgcgcccgcccttggctgtaaaaacgtcgtacacgtttttcatcagatctttattttcaagatccgattcgtacgggagcgcgagttcgctcgcggaaaggcggatcctgccgttcgtctgttttttcgcgacgcacgcgagcaggcgctcggcgccgaacgcggaaatcttgacggcgttgaaagtcttttcttcgaaccgcgccacgttctctttgatctccaccgtctgggggaaatcctgtttgaatttcgcgttggctctgataattttcccgtccgcgtcggtaacgatacggtaggaatagcggaacgaattttcgttgagccctacccagaaagaatataaaaggaacagtacgccgaccaccgcgcccgtcacgataagaatgaccgcgatctcccgcgcaagggaatcggaaattttctgctgtcccgtgaaatccacgaacgcgccgagataatagcccgtagcgcccagaactctgacagaacaggcgtagtgcccttcgccctcgttcacgatgcgcacggacgacgcttccgacggctgcaattcgaaaccgtaatcctgaaaatagccgtcgaagacacccgtcgcaaagacgacgcggccgctgccgctcgcgagcgcgatcccttcgaaccccgccatggaaagttgtttcacggcctcttcaaaggggcgcaggcgcagtgccgtttcgccgtttacagattttgtataaacggtatatagcgtttcatcgccgattcctttgcacatatcgcttaaagaatagaagagcacggggcgctcctgcaggttatgggcaatcgtctgcgattgcacggcataactttgccccccgatctcgatctccgcgcccgcggcgtcgagcgagcctgaaagagcgaacccgtcctcttcgtcgaaatttccgacgtcttcggaaaaaatttcattcagttcgcgctcgatgcccgaaagcgacgcggcgtactgacggaaagtaccgtcgtatgcggacgtgacggcgttgtgatacagagaaaagcccgcgatgagttccacggatataaggaccaccgcgacgacgatggtcttgatccacatggttttattgaatttggcagaatgctttttcacgccgtacgcttgctccgtttattttccgttgcataaaagaatttcttttttcttttcgtcggataagccgaactcggtaaaactcggcttgtgcagatagtagccctggatatagtcgacgcccaactcgatgactttcttcatctccccgaacgtttccacgccctcggcgatcaccctgatattgcggcggtgcatataattgaccatattttccaccatcagcatcttatcggaagaggcgtcaatgccctgtatgatggcgcgttcgaatttgatgtactgaggctgggtgatcaaaagcaccgcgtcggtattgtaggcggaaccgaaatcgtctatggcaagttccgcattccagcgccccagataacttattttcttttccaatgtggaagaagaactgatcggctcgttttccatgatctccaaaaccacgttgccgagaagttcgccgtacgccgtttccaacgcgcggatatcgtcgggcggaataatacagtcgctgatggaattgatgaacagcctggctttcttttccaaaagcccctcgccgaaacgggtctgatacgtttccagcgccccattccaggtgagttgttcgatcacgttgagtttggcgcacttcttggcgatctcgaggatctgcacgggggatttgatggtttccccctgcgggcgcatgagagcctcgtatccgtaggtctcgcccgtgcgcgcgtccacgatcatctgaaaagcgtatctgactttgcggctctctacgatatggaaaaattcttcctgcccgctcatgataaattcgttcttgcggtagtcttcgatatcgaaatcgccgaggcgccccttatccgtatgcttgaccgaatacatggcgtaatcggagtaacggaacagttcttcgggcgtggcggcgttgcgcggatacagcgcatagccgcccgaggcgcgcagtttgaaattttcaccgctcggcagcggcagaaagcaccgttccatacgcgaccatacgccctgcacttctgcaagcagttccgcttcgctcgcgtagccgtagagaaagacggcaaactcgtcgcccgaaagtcttgcgatgagcgcattgctgcggggaaaacccttgatgagttcgcccatcaactgaatatacttatcgccgtaagaatgcccgtaggtatcgttgacgtatttgagttcgtccagatcgatcatcaccatggcgccgatacggacgagttcgggcgtttcgcacagttcgtacaatttatcgttataatagcggcggttgttgagccccgtcagaacgtcgaaatcgcgctcgaattcgatgcgcctcttttcgatgacgtcgagggtgatatcggtgatcgtgccgatgatctttttaccgtcgtccacgacggagatctggatccacgcttcttcttcggggatcttataggtgactgtttcgtccctttcgtttaaaggatcgatcttggacatgaggcggcggaaacgatcgatgccgatataatcgtttatgcgttcgtcctgccagcgcatgagcgtatagacgttgcggctgacgaaaactttcttttccccgtacacgtattcgaacacgccgatctgcgtgcgcgaattggagatgatgcccgaaactttctgcgcgatgttttcggcggtttcgctcttttccaaaaatgcttcggctaaaaggtctatttccttgatatacgtcttgcgcaaaggctgctcattcgccgcgctgtaattctgcgtatcctccgcaagttccgcaatgggcttgctgatactgcgcacgacgagcgtgaccgccacgagcgcgagcgccaccgccgccagcgccgaggctgacatcgcgatgagaatggtattgtaaaaggtcatcagaacgccctcgtcgaccatgccgaccaccgcccatacgtcgccgctgaacgggccgttccgattgtaaatatccaacgtcttgacgttgcatacgactttggaagaagggatcttataaaaattcgtatagccgtccggcaaggcggaaacactgcttacggaaccgaaaacgctctgtcccagactgcccgaatgtacgatgcgttccagatccacgctgccgtcctcgttgtttttcacgaggcataccgcggcgccgtattctcccgacgtgtttccgatattgacttgcccgctcagataagcgacggaaaggccgatgcccagcactccgaacacgtcgcctttcgaagagataagcgggatcgaatacgatacgatcgtttcgccgtactgattcattttatatgaaggcgaccaataagcataatttttcgtatcggatacttttttcgcttctttcgccgcattcagcggtttgaaaaagaatgcctcgttatcgttggagcattcttcggaaaattcaaaggtggaataggttttgtttcccgtcacgtgcagttgatcccggatctcgatactgccgtaagtcatttcgatatcggcgttatccgaactcgcggaggtaggatccatgtccctcagacagatgcctcccttataatagtcctgcggctggttgcgcgttccggggccgtcgagcacgataaacgcgtcggtgaccagatttttgcgcagcatatacaggatatcgtccgcgatttcggataatataatttcgttgatgtgataggtacgggggccttccgtggccttttcctcttcggtaaaaggttttgcaatatcttcgtacgattttccttgttcttgaagaatcgtttccacgcggcttacgacgtcgttctccgtttcgctgatgttcgaccatacgcggatcatgttgttggtgagcgaatcggaaacattaatcactttgccgttgaacatttcgaaactgttgttgcgaaggttcgtaaaggtatccgacgcaaaaagagcgcaaaaaaagaacaccgtctgaaacacgatcaccaaaacgatcgggatcagggttttccgtaaaatagatttggtacgtttgttctttttcccttccatctcttatccgttgtctttcagattttccaaactcgcgcccagcgctttgagccactcttcgaaatgaccgacggtcaggcactgctgcagagtaacttttccgttctcgatcgcggcgaaatcttcgaccgccttatcgatcatcgaagtattgacgatctcccgcgcctcggtaccgcaatcgaagggaagcgtggtgtacagcgtataattattgacgatttcgatgcccgtatagagcgtgcttttcatcagcgcggaaatttcgatattgtccgtaaaatattctttggcggcttcttcggtgttgagatcttttttgacgggaagatagcccgaaccgagcgaatattttaagttgttgtccttttcgctgaaccaacgcaaaaagacggtcgaagcatattcagttttttcgtcggaacgcacgaccgccatgcccgcgccctgctgcacggcgtatttttccgtacccgcaaagttggggagcggcaaaatcatgccctggatcgcgtattcgggatccttattgttatctacgttctcgggaaagtacgtgacgcccgaagtcgaaccgacgcaggcaacgatcgcgccgctcttgatatcgtcggtgcggaattttccgccgtgtttgaaccagcccttgacgtacggtacataatagttatcccacaatttccgcatgacttcggaatcgagttgaaaagtcacctgcccgttttccacttcgaaaacaggtttaccgagttgtttactgcctacgagcatataattggcgaaggcgtcccttccgaaaaaggctttaccgccgctccatgcgtaatactgttcagacaactccgtaatgccttcccatgtggcaaactttttaacgtcggcgcccgttttttcggaaaatttatcccagtcggtcttgttgatcgccaaaacctccgtcgatttcgcgatggggaacattttgatctccccttccttttcgaaaccgccttcctctatgtaactgggcacgaattctttgatttgcgacgcggtaagataatttgacagatccgcgatcttatccttgaccgaataggcggtgtcggaatacacggaaaagatctgaggcagcgcttccgcgccgatctctccatctatcgaggcgcggatggcctcctccacgccggcgatgctccctttggatttggcggatacgacgatccccttttcctttcccagcgtgttattgaaatcggtgaccatttcgtcgaaagtggaaccgagcgcgccgttgtagtaatgccatatcgtgacgggcgtgggcgaaccgggattaagcccgtgatcgttgccgcccgaacaggcgacgcaggcgatgagcatagaacaaactgctacagacatcaacagatttttgaaaattttcacgttttctccttccaaacaggaattgtgcgcttttgcagaaagcgcacagccccccactgcggggggcaaacgtaaattcacggcccgcgtagtttttcggcacgccgctcgggcgcactgtcaatttcgttcattataacattaaaaaacggtaaagtcaatgtatatgagaaaatgtcgaaaaaagagaccgttgatcaaaacggcctctttttgttattgatttgcgttctttgcctcgatcatatccttgactttcatcaaccgcgtcaaccccgcgcgctcgttttcttccagtttcatggaaatatagcggatggtttcctccagatcgggaatgagcacgtactccagcgcgttgacgcgccgcttgctccgttcgatctccacggcgagcatgcgcaggatcttttcctgttccgcgagccgcacgagtttatcgagtacttcgccggcaagttccacggcgtagtccgcctcgctggtgacgtccacataggaataaggcagcggagaagatgcgtctttgcgctcttccagaacgatcttcggcacttccagattcatgaagttgccgaggccgcacccgggctcgacggaaacggagggcatggaaaacaaaagttcgatgtcctttttgggcatcagtccgcgcgccagcgaaaactgtttcagaacgcgcacgacgtccccttccgtttcggcgcgaagttttttgatctcgcgcgcgagcacggaaaagcgccgcaccatttcgtcggtcttgtctttcaataacttgtgtccgcgctgcgccgttttgagccgtgctttcagtttcttcaactccatgcgcgtgggatttttattgagccttgccaaaattttactcccgatagtacttttcgatatattgttctttgatgcgtttgagttccgatttcggcagcccgctcaaaagtttccacccgagatcaagcgtttcttcgatggaacggttggcagaaaaaccttgcgaaacatattctttttcgaacttttcggcaaaatccgcgtacaacttgtcgatcttggagaggaccgcctcgcccaagatcgcggaaagttccttcgcttccttgccgcgcgcatacgccgaaaacagttggttcatcgtgtccgcgtggtcttcgcgcgtcttgcccgcgccgatgcccttatcctttaaacgggagagggaaggcagcacgtcgacgggcgggttcacgccctttttatacagttcgcgcgacaagatgatctgcccctcggtgatatagcccgtaagatcgggaatggggtgcgtcttgtcgtcctcgggcatggtgagaatggggatctgcgtaatggagccttgtttgccgcggatgcgccccgcgcgctcatagagcgaggcgaggtcggtatacagataccccgggtagccgcgccgccccggcacttccttgcgcgccgccgaaacttcgcgcagcgcctcgcagtagttggtgatatcggtgagaatgacgagaacgtgcatccccagttcgtaagcgaggtattccgccgcggtgagcgccatgcgcggcgtggcgatacgctcgatggcgggatcgttggcaagattggtaaagagcaccgtgcgcgagatcgcgcccgtctttttgaaatcctgcacgaaatattctgcctcttcgtacgtgatgccgatggcggcgaacacgacggcgaatttttcgtcgcctttcagcacgcgagcctgccgcgcgatctgcgccgcaaattctgcgtgcggcagaccgctcatgctgaacacgggcagtttctgtccgcgcacgagcgtattcagtccgtcgatggcggaaacgcccgtctggataaactcgttgggataatcgcgcgccgcgggattgagcggttccccgttcacgtccatgcgcttatctgcaatgacgggcgcgctcccgtcgcgcgggcgccccatgccgtcgaacacgcggccgagcatatcttcggaaacggaaagttccaggctgcgccccagaaatttggcgcggctggttgagatctgcaagccctgcgaactttcgaacaactgcacgagcgccttgtcgcggtgcacttccagcacttttccgtgacggacttcgccgtccttttgcacgatctccacgagttcgttgtacttcacgccctcgacgccctccaccagaaggagaggcccgacgacttctttgatggtcttgtactctttaaacatgttcccctccgccgagcccgtgcatggcttcgttcatttctttggatatctcgtcgaaacgggcaagatccttttcctcgatgtatttcgcgcggccgatcttttcgcggacgggaagttccagaacgtcgtcgaggcgcgcgcccttttccacggcttccagccccaagcggttgaaatcatagatgagccgcagcattttacactgtttggcgatggaagtataggtatccgtttcgtgaaaggcgttctgatggagaaagtcttcgcggatgatcttcgccgtttccatggtcatgcggtcgcgtcccgagagcgagtccgcgccgatgaggcgcacgatctcgtcgagttccgcctcttcctgcaatacgtgcatggcgaacgcgcgcagtttgatgaaatcgttggacgcgtgcaatgtataccagtcagacagtcggtcggcgtacagagagtaactcaccagccagtcgatggcagggaagtggcgcttataggcgagattcgccgaaagcccccaaaagaccttaacgatgcgcagcgtcgcctgcgacacgggttcggaaagatcgccgcccgcgggcgagaccgcgccgatcgccgtgaccgagccgacgcgcccgtcttttcccagcgtgcggacgatgcccgcgcgctcgtaaaattccgccagacggctggaaagataggcgggatagccctcctcgccgggcatctcctccaatcttccgctcatttcgcgcagagcctccgcccagcgggaagtcgaatccgccatgatggcgacgttcatgcccatatcgcggaaatattccgcgatggtgatgcccgtataaatggacgcctcgcgcgccgccacgggcatatcggaagtattcgcgatgaggaccgtgcgtttcatcagcggctcgcccgttttgggatctttgagggcgggaaactcgttgagaacgtcagtcatctcgttgccgcgctcgccgcatccgatatagacgatgatatccgcgtccgcccatttcgccaactgatgctgcaccaccgtcttgccgctgccgaacggcccggggacggcggcgacgccgcccttggcgatgggaaagagcgtgtctatgacgcgctgccccgtgatcatgggcatatcgggcgtcattttttcgcggtaaggccgcccctttctgacgggccagcgttgcagcatacagatctcgcgctcgcccttttcggtagaaacgacggcgatcgtctcggtaatattgaaatcgcctttttcgattctgacgatcttaccctgcacgccgtaaggcaccatgatcttatgcgcgacgatggacgtttcctgtacggtacccaaaaaatcgccgctttgcacttcgtcgccggcctctacgcacggctcgaaccgccagatcttctcgtgatcgagattggtcatggaaatgccgcgggtgatgcggtcgccgtacgattcaaaaatgcgttccaaaggcctttgtatcccgtcgaaaatttcgccgatgacgcccggcgcgagttccaccgacagcggcgcgcccgtgctctccacttcttccccgggacctaagcccgaagtttcttcatagacctgaatggacgcctgatcgccgcgcagttcgatgatctcgccgatcagtttcttttcgctgacgcgcacgacgtcgtacatcttgctgtccgccatgttttccgccacgatcagcgggcccgatactttaatgatctttcctttcattgctcgttcttcttctcctcttgcgaaaggatatctatccccaacgcgcgctcggtctccctctttaatatttcgaatccgtagccgttgctcccgttcatggacggaacggggatcacgactggatacgggctttccacaaaacgcgagatcgtatcgtcgatctcttttgccaaaacgtccgtgacgtagatgatctgatattctttggaaagggtatgcagcaattcccgcgctttctcgggcgatgccgcgctgtacgcgtccatgccgatcgccttaaaaaccagaatgctgtccccgtccccgatgatcgccgttttacccttcatacgtttccctgatcctcgccctaacggcatttttttcgatctgattgttcagccccgacaagatgatgcgcacgttggaaagttccgcttgtttataaaaacaatagcggacgaaaggctgtacgccctccgcttcgtatcgctcttttttcaaagaggagagcgcggcgccgtccgcgagccgctcgaacccgacgagcggtcttccctcggcaaaatcatcgagcgcggcgccgatcagtttgcccaaagccgaaaaacggctgttttcgcgtatcttttcgggcgtctcctccgccagaacgcgcaaattttcgtccgtcaaagagccgccttcgacgcgcattttcatcgtcttcgcaaagttccgcgcgcggagcgccacggcgatattcgccgcgtccgcttttcggcggttgatcttaccgagcgtcttttcctttttgctcaaagccgcgcggtcggcatacagcgcacggcggaacaggatcgcgatattctgcccgttcgcctgccccgaaaggaaaagcgcgtccgcctccctgcacgccgcggaaagcggcgcggggaaaagatcgtatttatccgcataaatattgtcccgcattttatcggcgcggtaaaacccgtccgcgcccagcatgggcgcgcagtctgttttcagatacttgctccgcacgatcgcttcggcgttgtggtaatcgtattccgccagaagataacggcacagcgcctcgctcggcgccgtttcgcgcacgaacgcggtataacgccgctcttccgcctcgatgagaaggtcggcttcaagcgcggatgcaacggtaacgccgttcccgaaattcacttccgacagtattttcagcgcgtcgtcccccgaggcgcagtctaccattcggttgagccgatccgcgcccagaagcgacgcttgcagcgcagacgcccgcgcgttggcaaagatagcgttcgtcattctttactccgttttgcgcccgtcggaaaataaaatttccacgacgtcggattccagcgaaacgcggtcggcggcgatgagcgcctcgaaagaaagatccttatcgcacgtttcgttggaaagaaacagtccgcccgcgaatgcgccgtctgcgccgccgaaacgcagtttgcgcgcgcgaaagacgggcaacgcctcggtttcgctttgactgagcggcgcgaaacgggacaatacgacggtatcgccctcctcggcgttctcttccaaaaggcgggatacgatctcggcgtagcgcgccttggggaaattttgcgccttttcaagcgcgcgggcgaatacctcgtcgataagttctcgcttggcgccgagcacctttttgcgtccgtccagccgcgcgacggtttcccgtcgctccacggttgcgtccgcctcgtccgcgagcgctttgcgggaagacgtcaaaagttcttccgcccatttctgcgcggcgctgatccgcgttgcctgttccgcctccgccgccgcgcgcatttcactcgcttttttctccgcatcttcgaggatgcgggagatcatggccgcttttccttccatagcgccaccttatgccgccaacgtaaagagaagcgagatgaccaacccgaaaatggcgtaagtttcgaccatcgcggggaacatgatcagtttacccgacagtttttcgtccttcgccaccgcatagatacaactggtcgccgctttgccctgaaagatcgcggaaacgagccccgtaatcgccaaaggcatgacggacgcgaataccagccagccgcttccgacgctcatgcccgcagtcacagcgccctgtccgaccagcgccatgacaaagccgtagatgccctgcgtcgcgggcaaaaggacaaggatcatcaccttgctgaactttttcgcgtcctccgcgagcacgcccgcagccgcgctgcccgtcttgtacaggccgacggcggaacctacgccgcacagccccgcgcagatcgccaatcctaaaattgcaatcgcttcaccgctcataattttgttacctccgatagtttactgttggatatggatatattgcacacgggagccgatgggcgtaaataatttgccctcgcccgtataaaacttggaaaagaattcgatatattgcagcctgcaatcgtgaatatacgcgcccagaacgcccatagcgatattgaacgcgtgccccacgagcatgaccaaaggtccgaagacgtacccgatcgcgccgcccgcgatgaggtcgagcccgatgccgttgaactgctgggcgatgatcatgcccgagagcatgagcccgaacagacgggcataactcaaaacgtcggacaagaggttgatgacgccgtacagcgcgccgaaccctttcgtaaacttgcccaatattttttccttgcgccccgcggtgagcatcgcgcccaaaagccctacgcccagcatcacgacgccaggcagcgtcatcgtttcgaaaaaggcgtgcacgttatctgcaacggggatctcgaaatactccgtgaggaaattgaacaccgcgaaaaacagaccgacgttgaacaggatccaggtaaacgcatcgcacagcgcgtcgaggacacgcccgtcgcgcaggtcgttgaccgctttgagcgcgtacccgaccgtgatctggaacagccccagcgcaaggcagcccaaaagtatcgtcagaacgtccgtacggttgcccgacgagggatcgggcagaaaggtgtagagagaaaagccgaaaagcgagccgaacaaagcgccgaatacgatggtgaacagcccgccgtacatcattatcttcgtcagttttttaaaaccgttgtcgattttcagcctcgcagacagcaaaaacccgcccgcaaagagtaaaataccgtagccgatatccgccatgatcagcccgaaaaaaatcataaagaaccagaacacgacgccgttgggatcgtattcgcggtagtcgggcgcggaatacatatttgtgacgaattccgcgcttttcgcgggcccgcggtttttcaaaagcgttggcggcgtatcttcctcggtcggttcggtaaattccgtcaccgcggcgggcgtgaccgcatcgattgccgcgcgcacgaaatcgcattcctcccggggcacgtagccgtgcagggtaaaggtgctcgccgtcttgaaaaaactgtcgtacgcctccgctttttccaactgcaaggataaatagtcggaaaagatcttccagtctttcaagtaaggcgcgagcgcgcaggcgtccgatttgagcgcctcttcccgcgcgtcgaaactcttcgtctgcgccgcgagttcttctatcttttccgcggcggtttccggaaaggtaaacgcgcatttggaaaaggacaatccgttcaaaagggccgctatttcttccgcacagtcgttatgcgccacaacgcatacggcggaaggcttgccgcgcgaatagatcgtgagcgctgcgggcgattccgccagattttcttccagtttcgggatcgccgcctcgtcgatcagtccgaaaaaacagcgcgtgcatttcgtgtcggaaaaatccgaaaagcgctcgttcacttcgcggtaagccgagagttgttcgatgaggtttttcgcctttacgcgttcggcgcggagcgcggacagttctttctccaacgtttcggctttttccatcgccgcggtaagttccgcttcgcgccccgaaatctgcatgaaatcgtcgtaggaaagcaagatatcgtccttgagcccctcggtattttcggggaaatattcctgttttttgctctccgcgatgcggtcggatacgaaggcgatgccctttcgcacccgcgaaacgcgcgactgcaattccgatgaaggggcgttttcttcttcccaatcgctcagttccacccgctgcgttctatgcagtgcatcgagcagcgcgtccttttccgaggcaagtcccgtcagcgagaattttgacatttttacgacagacatcagccgaataacctccgaagcaccgcgtccgcggccggatccacccgcgtacggctgcggcttttgagcgcctgcgccgccgcgccgccttccgcggcaaggctgtcgtatgccgcctgcgccctgcgttcggcgtctttttcgctctgttcacgttcggcagccaaaagggcgatcgcgtcctctttgacctttgccgcgcgctcggcgccctccaaagagatgcgtctgcaatcgcttgccgctttcgccacgatttcttccgccttttgttccgcgtccaatatggacgcgatgatctcgttcataccgcttctcctttcgactttccgacatacttatgttgtttcggttttccgcaaaaattccgactccctgcgaatttttccgacacgcgccgaaaaaatccgtatatgcaaatattatacgcccgcttttaacctttgtcaaccgagagacgaaaaaaagcgcgcccgaagacgcgcctgtttatagccgcgtatcgggataaacgtccacgaatttcgtgtagccgtacaggcgaagtttgtccttctgcgcgtaaaaattcttattgcgcatggaaacgagcacgcaaacgcccgcctcccgcaacgccgccgctttctgcaaaacttccctctttttttcgaggggcgcttcgcgcgtgatgagataggcgatcttttcttcatcgcccgctccgatcggcgtttcgttgttcttcatgatatctatgatacgttcgaacccgatggaaaaaccgcaggcgggcgtgctgccgccgctgtattttccgatcatttcgtcgtacctgccgccgcccgcgacggacagtttatacgaggaaagttctatttcgaagatcgggcccgtgtaataggacataccgcgcaccagcgtgggatcgaatacgacctgtcctttgcccgaaaggatatcgcgcgaagtcgcgatgatgtcttcgagattggagatgacgttttcgggcacgacgtttgcccattcgtccctgaaataatcgcggcaggaaaaaaggtccgtgctgccgttgaagaatttgcagtacgactccacgccgctctcttccagtccgagttccagaagggactttttgacaccctccaacccgatcttatcgtatttatccaaaatgatgaaaatgacgctgtgcttttcttcggggaaaccgcaaaacgacgccatggcttttaaaatccttctgtcgttgacgcgcaccttgctgccgcccagccccaattcgtagagcatattcgcggtagcggtgatcaattccatttcggcgaggttggtggcgtcgcccaaaatatcgatatcgcactgcgtaaactggcggtagcgccctttttgcggactgtccgcgcgccagacgggccctgtttgcagagccttgaaagggtttggaagatcgttgctgttattcgcgtaaaagcgcgccagcggaacagtcagatcgtatcttaatccgcagtcgcacagatcgtcgaaattttccgacttctgcaatttttcgccgcgttttaaaattttgaagatcaactgttcgttttcgccgccctgcttgctcgtcagattttcgatatgctcgacggcaggcgtttctatctgcgtaaagccgtattttttataggtgctcttgatcttacccagcgcgtattcgcgtaactccatgtcgcgcggcgtctgttcgggcattccgcgcacgggcgtcttgacaaaactcattttcgttcactccgtcgtttaaccaatcattgatattcaatatatcatatcggggaatttttgtcaaataaaacggggatacggcaacagacgctccgcgcctctttttcggacagccgcgaaaaatcgggcacgttcgtcagcgttttgccgtctacggtacagcggacgcattcttgcgttgccccgcagggctcgacgagcagaagatcgccgtaaaagtacagaccgttttccgtatgtacgtcgatctcgaaggaaagtttgcccgttccctccgcgagcgcccaatcgccctcgcgcgtgatccgcacgccctcggcgcggatattctgcacatacgaaggcagatacagatataatttgcgcccgcccgtttccacctcttcgagcgcgatctcccgtttataaaagagatcgcccgcaacgcggatacgcgcgttatcggaaatgtattcaaaatcgtcgtaaaagagaacgcgtacggcgtcccgctcttcgcgcacgaaatgcgagccgagttcataaagcccctcggacaggcggagcgtacagcaaagatacgcctcgaacgtatcgttatagggttttacaaaagggaaatcctttgtcgcgcagaggtcgcaccccgcgccgccgttgccgcgctggctcatgcgcagcgcgttataataaacgcggtaggcgcaggcgagatattcatccttgcccgtgcaggcgtgcagtttcagagcgagtatgagcgaatcgacgatggcgcaaggctccgtccaggtatcttcccttccgtaccaattaaagttggcgtaggtgagcgtcatgccctgttctctgtaaaatccgaattcgcggacggcctgttgtaaacagcgatcgtctttcgtacattcatacagacgcagaatgccgcgcgccgccgaaagagaagcgtgcgtctgcgtgcgcagggcgagtttgtcgatttcaagaaagcggcgcagcatgacgttcagaagttctctgagcgccgcgtcgcgcgtaatttcgtagacggctgaaataccgtccatcgcgatgaaggcgcagcccgtgtcggaagaaagtttccaaccgtttaaaacgtcgagcgtatgaccgaacacgcccccctcttcgcttttttctctttcaatgggatagcgttcgaaaaactcggtgagttttgccagatagttgcgcgcgatcgtgcgaatacggcaaagcgacttttcgtctttggtcgccttatagtattcggtgagcccgcgaagataccaactgttgcccgaaagttgctgttcgagcgcgactttgccgtcgaacagaggaccgaaatagccgtcgcggttgcaatgtccgtccagcccgtccgccaatgcgcgcagcgaagcgggttcggttcccgtcgccttccataaagaaacgagcgcgagcaaagttctgccctcgaaatcgccgtgccagtcgtactccgcggggcggaacacgtttggcgcgcagtacagcggctcgcccactctcgccgcgttcagccgcagtcttcttcccaattctccctgaaaccgtatcatcgctttttcctttatttatgatatgcctttgattataacataagtttcggaaaaaaaccacattttggatcaatgtgtaaaatcaattttcccctgccactcggtaaggttttgcggcgacgacgttcgtcccctccccgtccacgtcggcaaggatcaccgtcccgatctccgtgtcggaatccacgtaggcggcgcggattttttccatgacgagaaaaatattcgatttcaacacttcgcggtcggtcttgacgggcacgcgcccgaactttgcccgcacggtgctcgtaaccgtgcgccgcggcgagatcatttccgaaagcgcgtacgccttgcccttgggacagaaatttcccgaaacgctccacgcgccgttctccccctccacgtgcagagcgcagccgcgcggacattcgatacagacaaaatcttttcccatgtcaaccctcccttaccacggaaatttccacattctccgcgccgtcgaagagcgcgggcggcagcgaaacgtgctccatttctcccggcgccacggcgatgcggcggaattctttcaccgtatcccccgcgcgcacgataattttggcattcgggaacgccgaacgcacgcggaaatacaacttctgcgcgtctttttcgccgcggcataatttttgcggcaggacgtatgaaacgttttcgcccgcacgcgtcggcacgtaacttttttgcgtatgcccgcccaaaagatatttcgcagccgctctgcccgcgatctccgcctcttcggatacgaaatcgaccagatcgtgcacgtgcagcacgttgccgcaggcgaatattccctcgatctcggtctcgcggtcgctgtccacgagcgcgccgcgcgtccccgcgtgcagggagatgcccgcctttttcgtcagttcgttttcggggatcagccccacggaaaaaagaatggtgtcgcagtcgaaacggatctccgtgcccgcgatcggaagcctgttttcgtccacttcggcgacgagcgcgccgctcacgcgatcgtcgccctcgatctccacgacggtatgccgcaaatacagcgggatcccgaaatcgtcgaggcactgcgcgatgttgcgtttgagtccgctcgaacagggcatgatctcgacaacgccgagcacttccgcgccttcgagcgtgagcctgcgcgccatgatgagacctatgtcccccgagccgaggatcaggacgcgtttcccgggcagcaatccgtaaatattgacgaacttttgcgcggtgcccgcgctgaacagccccgcggggcgcgtgcccgcgatgttcaaggcgcccttgctgcgttcgcggcagcccatggcgaggatcacagcccccgcccgcacggtgaaaacgccctttccgttcatatacgtgacggttttctcggaagagaggtcgacgacgaatgcgcccgtcagtatctcgatattccgcgcccgcgcctcgtccagaaaacgctgtgcgtattcgggccccgtcatgttctcccgaaagcgcgtcagcccgaacccgttgtggatacactgtttcagaacgccgcccgcctcttcttcgcgttccagaacgagaacgtcttttacgcccgcgtcgtacgccgcgaccgccgccgcaagtcccgcggggccgccgccgatgatcaccagatcccgtttcataattctcctcccgtgatcacgaaggaatttttgccctttttcgtgatctcttgcgcgcggtatccgtattcttgcatgagcgtattgaatacggatggctggcagaatccgccctggcaccgtcccatacccgcgcgcgtgcggaatttcacgccgtccagcgtgcgtgcgggcgggttttgtctgagcgcgtccaaaatttcgcccagcgtcacgttttcgcagcggcacacgacttttccgtaatcgggacgccgcgcgatgatctcgtttttttcttctgcggaaagatctttgaaacggtttctttgccgcatcggatcgaaattttcgttgcgccttgcatggaatttttccgcgcacaatgccgcgacatattcgccgatcgcgggcgcggaagtaagccccggcgattcgatgcccgctacgttgataaggttttccgtttcgtcgctctcctctatgataaaatcgtgcctgtcgctgtacgcgcgcacgcccgcgaacgacgagatcgtttccccgaaaggaatgtttttcagcatagacgatgcctttttcgtgatttcatcgaacccgttgcggcggacggacgtatcgaattccccctccgccgaggtcggtccaataagcacgtttccgtccgtcgtgggcgtgacgagaacgcccttgcccgccgccgtcggcacggcgaacaccgtatgccgcacgaatggcggcgcgatcttatccaataatatgtattcgccctttctcgccccgatgcgaaaggaatcatcgccgaacatcgccgcgactttcgccgcgttcagccccgcgcagttgacgacgcaccgcgcctccacgcgcttatgatcggaagagacgagcgaccagccgccgtctgttttttccgccgcggcgacttcgaaaccgcagtaaagggacgctccgttgtccatcgcgttgcccatcgcggcgatcgtcagctgaaagggacagacgatcccgcccgtcggcgcgtacagcgccgcggcgacgccgtcgcccaaatgcggttcgagagcgagcgcccgcgcgcggccgatgacttccagcccctttacgccgttcttttcgccgcgctctttgagttgggacaagacgccgacccgatcccgttccgcgagcacgagcgagccgttgttacgatagccgacgcccaattcttcgcacaccttgggcatcagtttgtttcctgccacgttgaacttcgctttcagcgtgccgttttccgcgtcgtaccccgcgtgcacgatgccgctgtttgccttgctcgcgcccgctgccacgtcctccgcgccctctaaaacggcaacggaaatcgcatatttccgcagttcccgcgcgcagaatgcgccgatgacgccgccgccgatgatcgccacgtccaccatttcgttctcctatcggaataaaaagagccgacaaaacggacaaacttgtgtttgtctccgttttgtcggcttctccatatctccgcctgtattgatttctcctcgattataccttgctttgccgcatttgtcaatgtatttttaaaaattgccgaaaaaaatccccgcacgattcgcgcggggatcaaaaaatcaattattttttgcggaagagaacgacgattgctcccgccacgaggagcgcgcccaatgcggacgccgtcgcggcgacggcggaaccgcatccgcccgacgcaggttcttccttttcctccgccttgacggtgaccgtgcacgttgcggtctttccgtttttggtcgtgaccgtgatcgtagcggtgcccgctttcacggcggtcacttttccgttttcatctacggtagcgacgctttcgtcggaagtcgtccattcgaccgcgtcatccgcgcccgacggcgcgatcgtggcggtcagcgtttcgctcgcgccgacggaaagttcaatcgccgtcttattgagcgtgacggacgtcgcggcctctttgacggtcaacgtaaacgtcgcagtcttgtcgccgtcgagcgccttcgcggtgatggtcgccgtgcccgctttgagagcggtcactttcccgttttcgtctacggtggcgacgctttcgtcggaggaagaccattcgaccattctattggtcgcgcctgcgggcgcgatcgtcgcgaccagcgtttccgtatccccgacggcgagcgtgccttcggtcttgttcaacgtaatatccgtcacagacgtcgtggacagtttctgcgtcgccgcgctgtaagtgaacaccatatcctgttccacgtaatagcccgtggggaataccatgcccgccttgatggtgatgacgtgatcctcatcgagcgcgatcagccctgcgggaatatagatttgcgctttgtttttgttgtagtgcagcatgacggcggtcgattttgccgcgtcgccctcgatgcccgcctgaatggtgcggatatcctgtccgtctaccaaaattttggtgagagccgcctcatacgcgcccgaggacaccgctttatccacgctctccaccgttctgcccgtcgcattgctcaaaatccatctgggcaggctggcgtagaaattcgcgttgcccgcgcccgcgttggtctcgtcgcagatatcttcataaaattcaaacgtgatgctcttgttcgtcgcgtcgccgccgatgctccagtcgttgccgagcgtcttgaaatgcaagaccttatcgccctctgcgggaatgacggggctgacggtcgtgacccagtaatcgtacgtcgcatagtaggtgcgggtatacgcctctttgagttccagacccgagggcgtcgtcatcacgtcggcggagaaagtcgtaagatccgcaagcacttcttcgccgttcacttcggcacggtcgtcgatggtaaagacgagcgcgctgcccgtagaatcgatgcggatcgcgtcgacgggctgagaaagtttattttccagcgtattcgcggcgttgatctccgtgaccgtcttgccgccgaatttgattttgcccgcaacgtccgcatccttttgcagatcgttcagaacgtcgcccgagaacaaactttcaaactttaaagtgagttgtttggaagcataatctttgaggttttcctcgatcgcgacgagcggttccagaccgctgatcttgatcgcgccgtcggcaggcaggaccgcccagttgccgtcaagagccatgatgaccttgtaatcttccgcgagggtagcgtcgatcttgggagaatccgccacgcacacagcgtcgccctcgcccgcctttacaaatcccatgccggcgaggaattccaccgtatctcctttcttgaattgataacccgaagtatagatccagaacatattggagcgctgatggatctgtacctgcgacgcgggatcgctttcctcggcctcgctgaccaatacaccgttgactttgatatgatcgccgatccccgtcaccttatccgcgcgctggcagtttgccgataacccttcgatggaaaaggtcacggataactgggagccgccttctttaccgtttgccgttgcaacgaacgtcttttgttcgctttccgcggcaaagacggctgcaaaactcatcgacagaacgagcatgaccgcaagcgcggcaagcagaacttttttgaatcctttcatatttcctcctgatgattatttattttgcgcccgtccggaaacgggcgcattttacacagttattttttgcgacgcagtgcgaacgccgcgcctgcaatcgcgagcgccgccgcggggagcgagatcgctgcggctacgccgccgcagccctttccgccgccgttcccttgatcgccgtccccgtcgtcgggtttgccgccctcgtcgggaagtttatccacgatattgacgtaaaacacgtcggtgtacgtttccccgtaaatatcgacggtatagacggtgaatttcagttcgccgtaatctttaccgctcaaaaacttttcgcctgaaatcacgatcgtgccgaccgtcgaatccccttcgggcgcaacgaaggtgtagcgcgaggaagagagcccgccgccgttcactttctggaacgttccgttgtggatatccactttgatctccagatcggcggtatcgcctttcttgtaataataggtttctttttccacttcgggaggtacggtcgcctcgcccgcgtcgcggacgagtatattaatctgctcgctccctccgtcgtttttggcgaacaacgtgttctgacccgcagagaaagaggcgaacgcgcccgatttcaccgtcagttttttctccgcagcgtcatattcgtactgcgaggcgtcgaccgcctgcgtgcacgcgccgtcgtaatagagcgcgagcgcgccgttcgcattttcgta

SEQ ID NO: 2207 - DNA, 4717 bp, Unknown
  16S sequences of unknown bacteria
tacccggacgtttgcgtaccgcttccagtccttccaggacctgaatgtcgtccgcggtataggaatgatccacatggatgttttccatctccagaatctcagctgatttctcttcacgcatagccttacctccttaaaatcctgccgccttccacttcataaaaactgaccggacgcccggtctcgttcaggcggagatgatccgtcgtgctgatgaagatctgcatctgcgcaggcaggatggaaagcagacgctgtcttcttccctcatccagctccgagaacacatcatccagcagcagtatcggatattccttgatcttttcttttatcatcacgcacagcgccgccttcatcgaaagcagcagcgtgcgtttctgtccctggctcgcaaagctgttcacattctgtccgtctacggtgaatgtgacatcgtccttatgcacgccgatattcgtctgaccgctcagcagatcccgctgacggcctttctcgtatttctgcaagagcatctcacggtcatccagatgatcgctgtccagacaagtatgatacgtaaagccgatctctgtgtcatcctgagccaggctgcggtaaaacggcctgcacagcgcgaagagctcctgcaggaacgtctgacgctgcttcatgatgatgatctcacaatcggccatctgctcgctcagcacgcgcagatagacctcatccagcgcattctgcttgagcagggcattgcgctctttcaacagcttctggaacagccccagcgtctgcgtatagcgccgcgacagcttgctcagctcgatgtcgatgaacctccgtctaatccgcggcgaagaagtgaacaggttcatatcgtccggacaaaacagcaccgcgttgacctcgccgatgaaatcagatactctgcggaccggattgccatgcaggaaaaggtttttccccctctcgttcacgcatacgcgcagctgttcgctgcggccgcgccgatacagggaaaggtcaatcagaaaggaagattcctcattctgaatcagatcccgatcctgtgccgtccgatgcgaacgcaccgtggaacagaaatagagcgcctccagaagattcgtcttcccctgtgcattgctcccgcagatcagctggatgccatcatcgaaactgacacgctcatccgtatagtttcgaaaatggaccagcctcatccgagtgattctcatttcagttcgatcgtcgtctcttcgatgactgccgtatccccgggatacagctttcttccccgccgtgcttccggctcgccgttgaccgtgatcttcatttccttcacggcagattttgcctccgcaccgctggagatcaagtcacatgccttgagcagctggcccagggtgatatacccgttttttacatgaaattccataatgaaagaccctttccgcatctataatattatagcataaaaagggccttttttgttatatttcggtcaatttctcaagaatacgtacgcagcggaacgaccagcatcgtcacgctttcctcatcggcagactggatcgtaaacggcttcatctccccgcacagacggatgacgatctccccttgtttcagggccttcagcgcttcgaacacataacgtccgttgcagctgatctccagatgagtgccggtaaatgccgcgttggacagcacctcgatggaagaaccgacttccgctgaattggaagtcagcacacactcctgttcatccagacggaaacggatgatgtaaacgccgtcatttttgatgaagctggcacggtcgatcgcgctgagcagctcatgagaatcgatgcgcagctcgtagctgaaagatgaagggatcagccggctcgtttccggataagcgccgtcgatcaatcgcgtctgaatgatcgtattgtcgatcagaaactgcacttttttgttatcgacagaaatcacgacggatttttcaccgctgatgctcttatatacttcctgcaggctctttgccgggatcgtgatgttgaactgcagcgcagactccagcgggatcatcttacgcgccagccggtaggaatccgtggccacgcactgaagctgattgtcatggcaggagaagttcacgccggtcaggaccggacgggtctctcggtcgctggtcgcaaagcaggtctgcgtgatgatctccttgagcgtatcggcttcgatctcaaaggtatcctttggccgggagaaatcgatggcaggataatcggtcgatttcatgccgttgatcttgaactgagaacgatcgccggaaatcctggtctgcgtatcatccagcacttcaaattcgatgatgtcgccttcgatcttacggacgacctccaagatatatttggcttcgatgacgatgcagcctacatcattgatcgtcagcgcgttgtcttcactcggcgtgatcgtcgaaaggatagagatatctgaatcacttccggtcaatacgatgtcggtcgcgctgacatcgatcttgatcccggagaatgccggcagcggtgaaaagacagagatggctctggaaacgattgaaagcctgtcatagaaaaaacgcttgttgattgtgaaattcatcatggacctcctgtttctgtttatttatatttttttatataataacaataataagggtgtggaaaactgtggaaaagtagagaatattcctgatttatcgcgatatccttcattttgccctatggaaaacatgtggaagaaatgtggaaggatgcggaaaactactgtatgccgagcttggattcgatctgccgcacggccgtattgaacgcattatccttcttcatcagctttttcgccttctcaaaagaagacatgatcgtcgaatgatcgcggttgccgaattcgatgccgatcttgacaaaggggatctgcagatgttccctgcacagatagacggcgatatgccgcgcattcgcgatctgcttggtccgcgatttggattcgatctgtgtctgagtcaggccataatactcacagacgcactttttgatccggctgacattcagctcttcctccatgacgatgatcggctcatcttcgaatacgctgcgggcgaagttcaggtcgatgatcccgggattatccaggattgccttgaagaacagctcattcagcgaaccttccagcttgcgcacgtcgctggagaacttggtggcgataaaatcgaggacctcatcctcgatcatgaccgtctcatctcttccttcgatcttcttcttcaagatggccttcgccgtctcaaattccggagaagccacccggaccttcagaccgctcagaaagcgcgagatcaagcggttttcgatgcctttgagctcgctgggatggatatcgctggtgatgatgatctgcttgtttgcggagatcagcttgttatacagattgaagaagatctcctgagaagcagactgcttcatgcgctggatatcgtcgatgagcaggaaatcgcattccatgaatcgctccttgatctcttccacggagttgccatgcacgttcttggtcttcatggcgtcgatcagcagcgtgacgatatcttcgctgtatatgtagatgaccctggcatccgggcggttgactttcaggtaattgccgatcgcatgcagcagatgggtctttcccagaccggagttgccatagatcatcagcggattgttgaactgtccgggataattgcagcaggcgatcgatgccgcataggcttcccggttgtttttgccgacgacgaaattgtcgaatgtgtacagcttattgaaatgatcttcaaaaagcgtatccgtgcgctgccgcatcacctgctgcggaaccatcttttccacatctttgttcaggatgacctgcagcgtatagtcgccaccggctgtctgggcgaaggcagaacgccagatgtccaggctgccagagaagatcgaactggaaattttatttgggacagaaatcagcgccacatcatcattgatgcggaacagtctggtcggtttgatataggtgttgaatatggcatcatcgtaagtattgctgtctttgatgatctggagagtggaattccacagctcctggtaatctttttccgatattcccataacagacccctttctacgcatccattttacactaatttgtggggaaatactatgtcaactttgtgagcggaagggcgttcgaaggagttttccacaatgagagaacgataaattgggatatatacaagggttttccactttttccacatttatccacgtggataaactggggaaaagtggacagtggaaaagcaaaattgtggaaaagtggagaaccattcttttccacaccggtgaaagtggaaaaggtgaggagaaaaatttctgataaataaaggacatacagcgcttttccgcattttcaacagtatgtggaaaagtggagaatctacgatgtggattaatggtggaaaacattcggaaaatgcggaaatctccacttttccaccatggagacgatcaaatcggccagatctgatgtggaaaagcagatcgatgcatgcggaaagaaaggaatgatcgttcacattgaatcgatttcccccggttgacttataccgccattttatgtataactcaagttttgaacgaaaacgccagaaagcctttatctataggctatctggcgttttctctgtgtagtg

SEQ ID NO: 2208 - DNA, 1616 bp, Unknown
  16S sequences of unknown bacteria
gagaagcgcgcgcacgcatcggtcgagctggcggacaagatcttctacgtgtgctcgatgagcgcgcgcaccatcgtctacaagggcatgctcgtcgccacgcagatgcgcgggttcttccccgacctcgacgacgcatccaccgagacggccatcgcgctcgtccactcgcgctactccaccaacacgacgccgtcgtgggagcgcgcgcatcccaaccgctacatcgtccacaacggagagatcaacaccctgcgcggcaacgtgaactggatccacgcgcgcgagcccgagctgttcagccccgtcatgggcgacgacctgcagcgcgtcttgcctgtgatcgacaacgagggctccgacagcgccatggtcgacaacgtgctcgagttcctcaccatgaacgggcgcagcctgccgcgcgcggtgacgatgatgctgcccgagccgtgggacaagaacgaggcgctgcccgagaagcgccgcgcgtgggacgcgtaccaatctatgctcatggaggcgtgggatggcccggccgccatcgcgttttccgacgggcacgtgatgggcgccgcgctcgaccgcaacggcctgcgcccggcgcgctactacgtgaccaacgacgatcgtctcatcctgtcgagcgagatcggcgcgctcgacgtcgacccggccatggtgctcgtatcgggcagcctcggccccgggcagatgctgctcgtggaccccgacaaggaccgtgtcttgttcgacgacgagatcaaggacgccttcgccaacgagaagccgtaccgcacgtgggtcgaatccggcatgctaaccttggacgacctggcggagggcacgccgtgcgcaaaggacgagccgcgcgacggtgccgtcgggctgccgctgcgccaggcactgcacggcttcttcttcgacgacgtcgaggaggccatcatacctatggccaacaagggctccgcaccgctcgcgtccatgggcgccgacgtgccgctcgcgtgcctctccgagcatccgcgcagcttcttcgactacttcaaccagctgttcgcgcaggtcacgaacccgcccatcgatgcgctgcgcgagtcgttcatcacctcgacgctgctgtatgtgggcaaccacggcaacctgctcgaagacgcgcgctccaactgccgcgtcgtgcgtctggacgcgccgctgctcaccgaggaggagtacacatcgctcgcgtacctggaccgacagggcttccacgcgacgcgccttgccgcggtctacgactacggacgtgccgacaacgcgctcgagcgcgcactcgatgaactgtgcgtgcgtgcggaagaggccgtgcgtgcgggcagcaacatcatcgccatctccgaccgcgcgcgtgccggcgaagtgccgattccatcgcttctggccgttgcgagcgttcacaaccatctgctcaaggctggcatccgcacgtctgccgacctcatcgtcgaatgcggagatgccattacgccgcatgacttcgcgctgctcgtggggtattccgcctgcggcatctacccttacctggcgcacgacacgatccgctcgctcgcggcaaaaggcgagctcggcgtggatgcggc

SEQ ID NO: 2209 - DNA, 32759 bp, Unknown
  16S sequences of unknown bacteria
gcgttccggcttcgccggaacgccctgcgggcggtttgccctgcgggtgccctaccccctcccccttcgcaagccccccgcaaggcccaaaaaggagagcccgcaagggaaacactccgcaaggaagtcgtttccctttttgcttttgtaagtcgtcaaaatgactggtttgcggaaaaatcattttatgatataataattttcagatagcaaataactatttgctatctgaaggagggaaagactgtgccacaacataagtttattacaaagcaactaatagataaaggttggtcagaagataaaaaatactgtcttactgacaaacaaggaaaaagatttttgcttcgtgtttctccgattgaacagtatgacagaaagaaaagtgaatatgaacttatgagtcaggtagcaactctcggtgtgccaatgtgcaaacctttagagttcggtacatctgatgaaggagtttattctattcaaacttggatagatggcgttgatgtagaagaaaatgtacataatttaacatgcgaagaacaatattcttatggttttgaagcgggaagaatactgaaggagattcacaaaatcccagctcccaaaggaatagaagattgggaaatttactttaatcgtaaagcagaccgcaaaatcaaaatgtatgaagaatgtcctatcaagtacgaaaatgggcaagccttcattgattacattaatgctcacagatatttactcagcggtcgccctcgaacttatcagcacggagattatcatatcggcaatatgatgatagggaatgataagcaactttacattattgattttaacagaaatgactttggagatccgtgggaagaatttaaccgcattgtgtggtgtgctcaagctgctcctttatttgcaaccggaatggtaaacgggtacttcgataatgatgtgccggttcagttttgggagttgctcgcactttatatcagcagtaatactttatcttctgtgccttgggcaattccttttgggcagagccaaattcaagtaatgataaatcaagcaaaagatgtactaagctggtatgagaatatgacgaaatccattccgacttggtacaaaggagttattataaataaataatacgaagcatttgccgtcgtgtccacagggatagcaagcatcggattatgacaccacaatccgaaaaggagtcaaatataaagcagttggggcgccttccttacggagggtgccccaaggctctccctttttgtttacttgtcactgaagcagtccctcagccgttccgtaaagctcttgcgtttctggtagttcttgtcgctcagcgccgcatcaaattcccgcagcttatccttctgggccttggtcatgctcttgggcacttccaccaccacacgcacatactggtcgccgcggccgcggccattcagggcagggatgcccttatcccgcagacggaataccgtcccgctttgggtgccctccggcacatggtagctcactttgccatctacggtggggactacaatgtcatcacccatagccgcctgggcaaaggtaatggggatctcgcaccagatatcatagccgtcacgctcaaagagcggatcgggccggacgctgactgtcacccgcagatcaccggcgggaccgccgttgcggccgctatcgccctggccgcgcaccgctacggtctggccgtcatcaatgccggcagggatattgacggtcacggtcttgctgaccttgacacggcccttgccgccgcacttggggcagggctccttgatgatgcgtccccggccgccgcagcgggcgcagggctgctgcatctgcattacgccgatggcggtctgacgccgcacggtcacctggccggtgccgtggcaatcggggcaggtttcggggctggtacccttcttggcgccgctgccgccgcattcactgcagttttccaggcgggagaccttaatatccctggtgcagccctttaccgcctccataaaggagatggtaacctgcgcttcccggtgctcgccgcggatgggcccattggggtcccttacccggccgctgccaaagccgccaaagccgcctccgccgaagatatctccgaacaggtcgcccaaatcgccaaagccactgaagccgccgccaaaaccgcctgctccaccggtcgcaccgccgccatagctggggtccactccggcaaagccgaactgatcataccgctggcgcttctccttatcggagagcacctcgtacgcctcgttgacctccttgaacttagcctcggcttccttatcgccggggttcaggtcggggtggtacttcttcgccagctggcgaaaggccttttttatttcatcctcgctggcgcccttttgcaggcccagcacctcatagtaatctcttttctctgccattcatctcaccctttattacaggatcatgcagagaaaatggttttatcctctgcaagcaggacagcgcagcggcaaaactgcctctgcgcgccccattacaatttgtttttcggttagttatcgtctacctcacggtaatcggcgtctaccacaccgtcatcgggggcagcgcccgcaccggccgcaccgcccatatcggggccggcggcaccggcggcaccggcattggactgatataccttaccgaagatctccatggaaaccttggccaggtcatcggtcgcggccttgatcatctcgtcatcggtgcccttcagcgcttcctttacggcctcggtctttttctcgatggtggccttatcgtcagcggagatcttatcgcccagatcctttacggtcttctcggtctggtacacgatctgatcggcgttattgcgggtatcaatggcctcacggcgcttcttatcctcagcagcgtactgctcggcttccttcacggcacgctccacatcgtccttgttcatattggtagaggaggtgatggtgatgccggtctccttgccggagcccagatccttggcagatacatggacaatgccgttggcatcaatatcgaaggtcacttcgatctgcggaacgccgcggggagcggcggggatgccggtgagctggaagttgcccagagtcttattatcggcagccatttcacgctcgccctgcagtacatggacctcaacggtggtctggccatcggcaggggtggtgaagatctgagttttcttggtggggatggtggtattgcgctcgatgaccttggtcatgacgccgcccagggtctccacacccagggacagaggagtaacatccaggagcagcaggcccttcacatcgccggtgagaacaccgccctgcagggcagcgcccagggccacacactcatcggggttgatgcccttgaagggctccttgcccatgaagctcttgacagcttcctggacagcggggatacgggtggagccgcctaccagcagcaccttgccgatatcggagggcttgaggcccgcatcggaaagggcattgcgtaccgggcccatggtggcttccaccagatcggcggtcagctcattgaatttcgcacgggtgatggtcatatcaaagtgcttggggccggtggcatccgcggtgatgaagggcaggttcacattggtctgggtcatgccggaaaggtcgcatttcgccttctcagcagcctctttcagacgctggtgcgccatcttatccttgcgcagatcaatgccgttggtcttctggaagtcatcggccatgtagttgagcaggcgctcatcaaagtcatcgccgcccaggtggttgttgccggcagtggccagtacctcctgtacgccgtcgcccatttcgatgatggaaacatcgaaggtgccgccgcccaggtcgtaaaccatgatcttctgctcgttttccttatcgatgccgtaggcgagagcagccgcggtcggctcattgatgatacgcttgacctccagaccggcaatcttgccggcgtccttggtggcctggcgctgggcatcggtgaagtaggcaggaacggtaatgactgcttcggtgaccttttcgcccaggtagccctcggcatcggtcttcagcttctgcaggatcatagcggaaatttcctgaggggtgtactgcttgccatcgatgttcaccttgtaatcggtgcccatgtgacgcttgatggaagagatggtcttttcggggttggtgatagcctggcgcttagccacctggcctaccagacgctcattgtctttgaatgctacaacagaaggggtcgtgcgggcgccctcgctattggggatgacgacggcttcgccgccttccataactgctacgcaggaattggtggtaccaaggtcgatgccgatgatcttactcataatctattcctcctaaaaactactgtgaattggtttgatttatgtgaatttgaattgctgacttaatttaattggcctgctgcaccatggcgtgcctcaggatgcggtctccgcggcggtagccgctctggaagacctgcgccaccacatttttgccgagggattcatcctcgatgtgcatgacggcattgtgcaggttggggtcgaagggctctccggccttgccgaaggtctccacgcccatcttcttgagatattcctcgaagcccgtctggatcatcttgatgccggtgagataattttcatcggcacagggggtatccagcgcccgctggaggttatccagcagcggcagcagctcctttagggtattcgctactgcatcgggatagacattttcgcgttccttttgggtgcggcggcggtagttatcgtactcggccatcaggcgcaggtatcgatcctccagctcctttttttcggcctcgcacttttccagcgcttccgcttcccggctctttttctttttgccctttttctgctccggggcggcttcctcggcgggctcggcggcttcaacagcttcggccgtttcctccgtcatcagctcttcctcgggggtggtatttttgttttcctgatccacagggtctctctcctttcgcggtttacaaaccgttattcagtgtatcgctcagcatccggctcagcatgttggcgaaatattccacatgggggatgagtcgggcgtaatccatgcggacgggaccaaccagccccagggcgccgatggaatcctcaccgatgcggtaacgggcaacgatcatggaggaattctccatttcggggcgggcattttcccgccccacgctgacaaacaggtcattttcccggctgccaataatccgcagcatttcctcgcgggaatctagcaggcggtacagccggtcggccacatttttcagctctgggtgttccagcagattccccgtgccgctgcggtacagggcaccttcgcaggcttcccggcacagctcgtaaatagcggccagaagcggcgcaaagatatcggtgtgctcacccagggtaaaggccatcgaattgatgtactgggcggtgatctcattgaggctgcgcccggccaggcggccattggcgaagctctggaagaagtccaccacattgggggtcagattgaaattgacccggcagaccttgtttttcaccatgccattgctgcacagcagcaggataacgacggtatgcgccgtagccggaatgatctcaatgcgcttgacaaagaggctctggcgggagatggtggtggaaatggcgaagcagccggtttccttggccagcatccgggtggcgccttccagcacgcggtcggggtcggggtcgcagtaattgaacagggcgtcaatctcgccgcgggcggcgtcctccagcggctgcggcttcatcaggtgatcgaggtagtagcgcaaaccgcggtgagtggggatgcgtccggcggaggtatggggctgctcgatgtagccctgctcgctgaggtaggccaggtcattgcggacggtagcggaggagacagtctcctccagcatggcggcgatcatcttggagccgatgggctcgccggtgcggatgtagctttccaccacgcaggtaaggatcctgctttttctgggatccagctccatattgctccctcctttttagcactcactcacttcgagtgctaacgattattattgtactcactttttcgcggttgtcaatagggttcacaaataatttacaactatttttcgcagtcaccgttgcagagtgctaagcgcatgctataatgagaaaaagctgcccggcgggcttcccgcgcgggtttagcgcacacgggcgcgcgtacgcacacgcacgagggagccaataaagtataaccgatgagccgggacgagtggagaaaggcggggcgcagcccggagcctgcacttacttgctaaaggagagaatgcaaaccatgttccaaaacaaatggttttatctgttctgcatatccatgctgcctattgtggagctgcggggtggcatcccggccggagcggcgatggggctgcccttttggccggtgtacctgacctgcgtactgggcaacctgttgccggtaccgttccttatcttatttgcaaaaaagatactggagtttctctctactttgccccgtatcggcgggttcttccagaaaatcatccgccgggcggaccaaaaagcggccgaaatcggtcattacgaaaaatgggggctgttcctctttgtagccattccgctgccgggcaccggcgcctggaccggttcactggtggcggcggtgctgcggatgcgtatctggcaggcattcctggtcatcacggtcggggtactggtcagcggattcatcaccggcgggatcgcctacgggctgttcaccgcgctggcataatacaataatatatataaacggagaagaccccctgctttcgcagagggccttttccgtttagagagaaaatgaaagaagaataaagaggaaggctgatttattccgccatgccttcacggatgatcgcttccgcctgggctgcttccgctttggaaagctgtggggtgcccagcaggggatactcgatccccaggctatcgtactttaccttacccatggaatggtaaggcagcacctccagcttttccatattggtcagcgtcttcaggtagcgcccaagggccagcagctcctcccgctggaaggtgatacccggcacaacgacatgacggatccataccggcttgccgatttttttaaggtattccgcgaaggcaaagacccgcgcgttgctgtggccagtcagctttttgtgctcttcatcaaacatatgcttgatatcgaggagcaccaggtcggtaacggccatcagcttttcgactttttcggtatggtcgggatcgaacaggatgccgcaggtatccagcgccgtgtggatcccgttctgcttggctttggtaaaaagctcggtgagaaaatcaatttggagcatcggttcgccgccggtggcggtgatgccgccggaggtataaaactcccggttgcgggtgatcttctcgatgatctcatcggcggtcatctgggtgccgcccgccatttcccaggtatcgggattgtggcagtagaggcaccgcatgggacagccctggaaaaacaccacatagcggattccggggccatccaccgtgccaaagctctcaagggaatggatgcgtccagtcagttctgacatggtaatcacattctttcgtggaaggtgcgggagatgacctcatcctgctgggcacgggtcagcttgataaagttgacggcgtagccggaaacacggatggtcagctgcggatacagctcgggatgagcctgcgcatccagcagagtctcgcggttgagcacattgacattgaggtggtgcgcatgcttgccaaagtagccatccatgaggccgacgaggttggtcacgcgctggtcatcgttcttgcccagggcatcgggaacgatggagaaggtattggagataccgtcctgggaatccatgaaggggatcttggcaacagaagccagggaagcaacagcaccgtggctatcgcggccgtgcatggggttggcaccgggcgcgaagggctcgccgcccttacggccatccggggtggaaccggtattcttaccatagctgacattggaggtgatggtaaggatagaggtggtatggataccgttacggtaggtgggatactcacggatgtagttgatgaagcggtgcaggatatccttggcgatctcgtctacacggtcatcatcgttgccgtacttgggatagtcgccctcgacctcgtagtcaacggccaggccctgctcgttgcggatgaccttgaccttggcatacttgatggcggagagggaatcggccactacggagaagccggcgatgccggtagcgaaccagcgggtaacttccttatcgtgcagcgccatttccagggactcatagcagtacttatcgtgcatgtagtggatgatgttaagggcattgacataaacgccggccagccacttcatcatatccatatacttctccatgacctcatcatagtcgaggtactcggaggtgatgggacggtacttggggccgacctgatggccgttcatctcatccacgccgccgttgatggcgtacagcaggcacttggccaggttggcgcgggcgccgaagaactgcatctccttgccgatacgcatggaggatacgcagcaggcaatgccgtagtcatcgccgtgaacgggacgcatgacatcatcgttctcgtactggatggcagagtgcttaatggagatctcggcacaatacttcttccagttggcgggcaggttgtggctccacagaacggtgaggttgggctcgggggaagcacccaggttatccagggtgtgcagatagcggtagctcatcttggtgaccatgtgacggccatcggtgctcataccgcccaggctttcggtgacccaggtgggatcgccggcgaagatgttgttgtaatcgggggtacgggcaaacttgaccagacgcagcttcataacaaagtggtccacaaactcctggatctgctcttcggtgaatacgccgttgcgcaggtcgcgctcggcatagatatccaggaaggtggaggtacggccaaggctcatggcggcgccgttctgctgcttgacagcggcgagataggcaaaatagacggcctggatggcctcctgcacattggcggcgggcttggagatatcgcagccgtagatgccggccatcgccttgagctccttcagggcgcggatctgctcggagagctcctcacggtcacggataacatcggccagcataacgctgggggtggtggctttctggaactccttatcctcgataaggcggtctacgccgtacagggccacgcggcgatagtcgccgatgatgcggccgcggccgtaggcatcgggcaggccggtgatgacatggctgctgcggcaggcgcgcatctcgggagtgtaggcatcaaacacgccggcattgtgggtcttgcggtgggtggtgaagaactcctccacctcaggatccaggtgatagccgttatcctcgcaggcctgcttggccatgcggatgccgccgtagggcatgagggcgcgcttaaagggcttatcggtctggaagccgacgatggtctccttctccttatccaggtaaccggggccatggctgaggatggtggaaacgaccttggtatccatgtccagtacgccgccggcctcgcgttccttcttggagagctccagcacttcgttccacagggcggtggtatcggcggtagggcccttcaggaagctgtcatcaccatcgtagggggtgtagttgttcatgataaagtcacgaacatcgatctcggtttcccaacggccgcctttgaattctttccattcgttacgcataatttcgttacctcccagttcattttctcttattggttcgggcttttgctgtgctttatgccgtcttggacacatttttcacaagacttgtggactgtgcacaggccaggccttttttgtcatgcttattgtattctacttctcacaagttgtcaagagtttaacaagagtttattccggaaatgtattgcacttattcctgaatgtttatactataccattttagtacagtttatgcaagcagcaaatcgccaaaattgcaaagaaaagcggcatgctttttacacataccgccaaagagcctactattttgccgccggattcatcacaaaagaactatcttgcggcattatttccctgtaagaccggtggggatcaccggggtacgggggcgcttctgctcccgcaccagctgccaaatgagctccggactgatcgctggattgatggtggtgcgggcctgcaaagccgccagcgccgcacccatggcaaagtccatggtatcccccagccagtagcgctgcgccgcgctgtacagcagccccgccatgaagctatcgcccgcgccggtggcgttttccacctgctgcaggggacgggtacggctccacagccgctggcccatgttatcggcatagtagcagccccgggaaccggcgctgatgataacccggcgcaccccctgcgccaaaatgccctccgctgcccggaagtagtccgcctcgcagcggatagaacggccggaaagaatctcggcctccaaacggttgggcttcagggtatcgatgccccgcagcaccggacgcatccggcgggcgtaggctgtagaaacgggatcggcgaagatggggacactgcccccgaaggtgcggataatatagcgcagcgtttcctgcggcaggcagccatccaccacgatagcagccgccgctgagagcttgtcccgcatgggttccagccgggcaggggtcagctcctgcagaatgcgcatatcgctgagggcgacggccatttcgccgtcattgcggtggatagagacataagaggagctgtttttccccggcagggtgacaaagctatcggtggcgatgccgcattcccggcaccaggagcggatcttttcgccgtacatgtcctcccccaccgtggtgataaggcgggtaggcagccccaatcgggccgtattctcacagacattgcgggtgacgccccccacggaaaccgaaagggtgccggggttgctgtcctccatcaccagtctggcggcgctttcgcccatgatatccacattggccgcgccgataccgacgatctcttttggcaaggcggtatcctcctttggatttactgccctatattatacaccaaaaggagggtttttcaaggggtggaaatcctggcgggtacgcgcgtgccggatgggaaagtccggtacagagggagggcggcgcagccgcgcgccctctgctcaatcccagaaatggcagagcagctcctcggcggttttttggctggtgcgggtatagcgcgggatgcggatgagacaggcgggatcccgggtaaggcagcagggcttgccctccacaccgagggaagcggcaaagcccagctgctccagcagttcctggctgtggcggctgtaggagccaaacggataggtaaaggtattgggccgccagctggtcatctcctcgatgcggtcctgggctttttgcagatcggcgcccacggcggcaaaatactgttcagtggtttcatccttgcgctgggcggcgccgcggcggggattcccggtcttgtgcagattataggtgtggttctggatctcaatgaggccgctttccatcatttcgttgatcatatcccaagtaatgtgggagtaattttccttattttcatccagctcactgtatttatcggtttcccccacgatgatggagatgacggctttcatctgatatttttgcagcagcgggtaggcattcaggtaattattatagtagccgtcatcaaaggtgatcatcactggcttttccggcaggggtgtaccctgctgcacataggcgatgagatcactcatcaccacggtggtgcagccctgccgctgtaaataaaggaggtcctcctccaaggcctgcggcgtaatgacataatcccctgcctttttaggattggagtggacgccgtggtacatcagcaccggaaggcgcacctcctgcgagaccgacagtctgcgcattgccggaatgatgcgtccactgccccaccacaccgcacttatcagcagtactgccgtcagcaccatcaccaaaagccgcttccaccatgtcatgggccatgcctccttctgccgcttcttctgctatttgtatgcgccggggcttgacggtatcaccgcccggcgggtatactggaaaaaataaaggagtgtgattttatatggtacggcatatcgtaatgtaccgcctaaaggacgaaaacaaagaggaaaacgcccggcagatgaaggaaaagctggagggactcaatggaaaaatagaggggctgcatgggctgcgcatcgaccgggactgcaacagccaccagtacgatgtgtgcctgaccgcggattttgacgacctggcggcgctgaagagctataaaaatcatccgctgcatgtagcggcttccgactttgtgcatgaggtaatgaccgagcgttcggccttcgattttgaggtgtaatgcccctttgcaaccgtcggttgcggaaaatccaacgaaaagcggtggcctgccaccgcattttcctctatgataggattacaagataagccactatcccgaaaggagaaaaatatgacactgggagagcgtattgcatactaccgtaaaaaagcgggttattcgcaggaggggctggcggagcggctgggggtcagccggcaggccatcagcaaatgggagaccggcgaagccacccccgatgccgaacgcatcatcgtgttggcggcggcactgggtatttccaccgataccctgctgctgagcaaagaagagccggaacgcccttacacggaagcggaaacggtacggcagcccgcccccaccccggaatggctggatcatctgccccggcatatcgggcggctgttccgggagaaaggctatattgccgggtatattgtggcggcgcaggggctggggatcctgctggtggggctgctggcgcgcttcggctttggcagtattctttccatgcagaacagtgcgtggggcatgcagggcttctgggacaacatgagcggtatgggcggcatgtccgccgccttccggttcccgatcatctttgctgatatcctctgtatcctcggcggcatcgttatcatcggtggggtggcgctggcgatcatctggaaaaagcggggacaacaataaaggagtggcagcatgcactatgtaatggctaaggggatcctttccgccgggggaaatataaacctgtaccggggctgcacccatgggtgtatctactgtgattcccgcagccggtgctatcacatcgaccatgcatttgaggatgtggaggtaaagcagaacgccgtggaactgctggaggacgccctgcggcgccgccgggccccctgcatggtggggaccggctccatgaccgacccctacctgccgctggaggcggagctaaggctgacccgccgggcgatggaggtggtggagcgctatggctgcggctttaccgttatcaccaaaagtgacctgatcctacgggatcttgacctgctgagccgcatccaacagaacgccaaatgcgtggtacagatgaccctaaccacagctgatgagacgctgtgccgcaagctggaaccgaatgtgtgcactaccgcccgccgctgtgaggtactgcgggagctgcaaaaggccggcattcccacggtggtgtggctttcccccattttgccttttatcaacgataccgaggagaatatctccaccctgttggaccgctgtgaagaagccggtgtacgggggattctctgctttggcatggggctgacgctgcgggagggcaaccgggaatacttttacacccgactggatgagctgttccctggcctgagcgagtgttaccgccgcacctacggcgaccgttatgaggtgaccagtccccacaacgaccggctgatgcggctattccatgcacagtgcgaagccgccgggatcctgcacaataacaacgccatccttcaatatctgcatgagtacgaaacgccgctgcagcagcttagcctatggtgagccgctgcggcggttttttgcgaattggtgggtttcgcaagccgcccgcagggcaagccgtcctgcggacggcttcggcggcacagccgccgggttcggcttcgccgaaccgccctgcgggcggcgcccctgtttctgctggaattatagcagaagcagcatccgcagcggcaaacccgcagaaggtgtaagggcaaaaaacgcagaaaaccgggcagccattccgctgcccggtatgcttttggcgtgggacaatcccgcaccgctgatttaccactgatggaacgactccaggtgcttggcattttcacgagccttagcggccagcttggtgtagaggccgtgctttttctcctccaccagctcctgatagcccttatcgatcgcaagaaacttttcgtttctcggcagtggaacatcctgttccaccaggatatcctgaactcgccggatatccacaccacgcaggctggtgccctgagaaagcgccaccgtcgcggctacgccggcggcctggccagtaccaacgcactgggggatcagattcagccagtcgatggccacatcatccgccgaaatatgtctgccggggcacagcaagccttccaccttctgcggaacaatggtccggtaggggatctcgaccggtccgcaatcattgatggagcagatggtgctgtgccaggcgataacatcctcaaactcatgcgcaaaggcccagtcattcgcggacatcacatactcaccggtcagcctgcggctgcacctggcacccagctgcggcgcaatatcataaagatatgcattgcggaacgccatggggacagcttccttcagataggccaacacctcccgcatactggcgcgggtcgccatctcggtctcggtttgatccttgatcttggtacagtccttttcggcgtgccagttattgatccagcacatctcattggaattggtgggcagcggcatggcccggaatccggcgaccttgctgatgctgccgcgcagcgccgcaaaggcctcaggccgggtacgcttccattcctcaaagagatcccaattgatgcccgcgatgcgccaaaccagcgccatggtgctggaacgggtctccgcatccgccaaactggcgaagggcgcgccggtttgggagaagatatctccatcgccggttgcatcgataaccgccttggcaaagatagcctgacggccctccttactctcaaatactacaccctttacagtgttcccatccataatgggacatacgccagtactgtggtacagcacccggatagactgccgctcctccagcagcatcttatccagttcaattttcagctggttcggttcaaaatagaccgagcgtaccagccggtgaggggaatcctctccacggctccagcagtcgtggattgccttccagctatcgcaaagaaggggatcggtgctgcccatttgggcgccctccgggccgcgcacggcaccggggatgtgcttcatgcgctggaaccactcctcctgcagaccctttacaaactgtttatcgtaccaggaaagatccggaaccataatgacatatccaccggtcacatcgccgccggaatagccatagcgatccatcaggatgatattcctacagccggcccgggccgcagcaattgccgcggaatgtccggccgcgccgctgccgataatgagtagctcgcacccatcgtagaccttcagccagcgggcctcttcgtaatattgtttatccattggttgctccttttgtgttttttcaagagcgttcctccgccgtttcctcatagaacgctctggcaaaatcgatcacggttttgacagcggaagtctccgcccggcgcttattccatatcagcgccagcgataccggcagcgtcggttcaaaggggatccccaccacatttggggaagaaaagctgccccggatctgcactgcacaggccaggtcacgctccacaatgctttgcagggcgctgatttgggaaagccgcatcacgatattaggcgggcagcctattgaatccagccgggaagtaagctcccgttcccgctggaggtatttgctgagcatagccagcggcagcaggcgcaggtcctctgttttgatgctttttcgctgggccagtgggttttgcttggaaacataaagcacctgctccgcccgtcccagtgacagaatatcacagttttcggtatcgtagcagatatccgttgtaaagatgacatcgatcgaaccttccgccagcagggcccttgcttccagattatttttctcggtggccgccagcgtgatattggggtaattttcgtggaacttttgatagaaatccgggaaaattctttgcgaggtaaagggggtcaggccgacattcacgatttggcgcttcgggccctccgccaactgttgggctacctgctcgatggcgcagatgcggcccagcacctcattgatccgctcatagatgatctttccatcatccgtcagctccaggcctgtggtggtgtgtgtaaaaagcacaatacccaattcctgctccagcgcattgatggagcgggaaatggctgtacgggagatgaaaagctcatccgccgccttggtcacgctgtggaattcgcataccgccttgaaataccgtagttgtagcaatgtcattgtctgcccatcctttccccgctgtacagcagggggccaagccccctgctatacatcaagtctatcagataatcctccgtccggcaaccgccaggactgttgtcatctgtcgttcttgctcagaacagcatcccacagataaccggcagccagattgccgaaagcaggcaaaggatcacttggatgattgcattggattttggcatatccgccatttcatagtagccatagccgtaggtcagcagcggcactacatcaatggggaacaggaagcagcaggtggcgcacattacggtagtgcagatgagcataacagggctcatattggccgcagcagcaaccgccaccagcggaactgccagggtagtgaccagcgtagggcctaccggcatgacaataaggatgaggaagccgatgagcgccagaacaaagacaaatacgaagtcggaggtggcaatggagctcagatccataatgctggtgagccactttaccacgccgttggtacgcagcaggccggtaaggccgatgagggtacccagcatgaagaaggcggtccagttgacttccttaacgaaatccttccaaccaaagacgccaatgccgggcagcatcatgatgccaacacctaccatggcgaccaccatgatattgaagaagctgaaccaggtgcctaggatccagcagatgagcatagcagcgatgatcacacagacacgaatctcatccttgccgatcttctccggaatctccagcttgctgaggtaatgatggatggcatcctgggtgagctctgcgggcttaaagaccgcgcggatgatgaagtaagccgcaataaatgccacaatggcgataggcccaaagatagcgacccaatccaggaaggtgacattcacgccagccaggttctccagataggtgatggcaatgacattcaccgcaccgccggcgggagtgatcataccaccgatcatggaagcggtgggcagggcgatgagcatgcagcggccggtgcgcttgcgctcgtcctcattttcatagatgctgaggaaatccagcaccagcgggatgaacgccgagcaggcggcgatattggaaacgatggaagaaagcaggccgcagcacagcatgatggccagcagaacagtattgacatttctgcccgctttggtgatgatgccgcgcatcaagcggcgggaaaggggcactctggtcacggcacaggtcaggccaaagcttgccagcataaagaaggcactttggttctggaagccagccagcgcagccgcaggcgtttccacacagccgcagatatacataagcggaatgaccagcatgcacagtacgccgatgggcagaccgccggtgagcatacagacgatggtagccagcagcaggcccagcgaattgcggcccgccgcagtcaaggtctcagaggtggggataaagaacattgccacgaggatcaggataaaaagcgctaaaccaatattattttttacagatctggtttcttttgcgttagccatttatttttcctccctttcattggaatgtatatcaaatgattcgatcaaaggcagagattttcaaacaatgcggtcaggtttgccgcgttttccagctgggccgtttcggctattaccttttcggccttatagtcgggcaggatgcagttagcgcccaggcggaaacggtcctggatctcctcatcggtcaggcggtagccatccttattggtgccgcgggaataatccaccgattcggtgtatacctgaccgcctacggtcacctctacccggccgtaccagctcaggggatccttgcggcgcagctcggcatactcaggggccacatgcatggtcacctttttggcaaaggccagcagccgcgggtcattcagtgcaattttatcctgccaggctgggccgggcttgtacccaaaggcctccagcgccatagcgatgggtccgctgaactgcacatctacctgattagccacggaatactgatcgggattcgccacaaaggccgcggtatggcagtcgatcgcctcgatctgctccggggagaagtggtatttttcctgcaggatcgcaaaggcatccagcacgctgtggaggtagcggcacacagggtatggtttatagtgatactcggtaaagaaccagcgggagcccagttcctccactaccttttcggggtcccatacatccggctcccggcagtaaatatgcgggaagccgtattcactatccagggtatactcatttccggtgtagcccagctcggccatttcggccgcctgcaccgcgccctgggccatccaggaaaccggcacatatttgatcatggacttgggggaggtagattcccagtcgcggcagacgcccagcgagcagtaataggccgcgatgccgatggcattgcgcatctgcttctcgttcagcttcatcagcataccgcagcccaccgcggcgccaatgatgtgctcattgctgttgccgaagaaatcgggggtcttgccgtatttcataatggactttgtcataatgctaagcagcacgcgggaaagccgccgggctacctcctggccgacacacagtgccgccagcagctccttgccggtggagccgcgctcctccgccactgccagaatggcagggatcacgatgggcggcacatggggcacagggtccatatccaggccgttccacagctccgcattgcagaaagccgccacagccgcggaagattttccgcctacgccgatcaagctcgccgcaccattgctcccctgccggcgtgcaaacattataccgatcttgcccttatcggaagcaatgccgcccagcgcgtttcccaggccatccagcagtacccgcttggattcatggatcacttccgccgggatcttatcataatcggcatattccaacgcaaattttacaaattcatcggtgacattcctcatattgcagtcgcctttctttcttatgttctatccatggacaaatatattgtatcttgtcaaagttcataaaatcaagaagaagaaatgatacaaacttgtgtagtttttgtttcatggctataaaaaagactctcccctgcggaagagtctcctatttttattcaatttaacggttaccggctggaataattggtgtagctgacaaagccgtcatacagcttacccagatactcaaagctcttaccggtaccgatggccaccgcctcgatggggttttcggccaaatgcgcccggatgcgcacccggctggtgataagcttatccaaaccatccagcatagcgccgccgccggtcatcagcaggccgtttttctcaatatccgccaccagctcgggcggggtctgctccatcaccgattgcagcgccgtgatgatgcgctccacctcgatgcgcagcggcatctccagctcgtagctggaaagggtgatcttctgcggcaggccggtcaccaggttgcggcccttcacctctacggtcttttcaggctggccctcggtccacacggtaccgatctcccgcttgacacggtcggcggtggaatcaccgatgagaacattataggtgctgcgcacataccgcacaatggccgcgttcatcttgttgccggccatcttcaccgagctcttgcaaacaataccgtttagggaaagcactgcgatatcgctggtgccgccgccgatatccagcaccacgatgccgccgggacgggtgatatccatccccgcgccaatggccgctgcgaccggctcctcaatgaggtaaacattacgggcgccgctggacatcaccgtatcaatgacggaacgggattccacctcggtaatggcgctgggcacgcagacgcagacacggggcttaaagacccggctggggttcaccttggcaaagaagtgcttgagcatctgctcggtcacctcataatcactgatgacgccatcctccagggggcgcaccacccggatatccgaagcagtcttgcccagcatcgtgtaggcttcatcgcccacggccagcacctgcccgttgcgctcatccatcgccactatggaaggctcccgcagaacaatgccttttccggctatatagatcagggtcgtagcggtacccaggtcaattccgatatcatttgcaaacaccttgatattccctcatttcgctgtagctttggccgccggggcgacctttcccatttatgaatttatcataccattatcatctgataatgtcaaagccggggcggcacatttcgcagtaaattcacaatttaccctttattgccctctagttttttgccctccggccggggggtacgcagcaccgccgcagcagtcacgctttcggcgccctgcgccagcaggagcgcggcgcagttttccagcgttgccccggtggtaataatgtcgtcaatgagcagaatatgctcaccgggcggcagcttcctttccccggcccggtagctttccttcgccagcgtgatgcgggccgcccggcccgccgccgcgtgggcggtcgctcggccatcccgggccagcaccccctcccgcagcggcagtcccagctccccggccaggtactgcgccagcagtttggattgattatacccccggtggcgttccctctccggcggcatgggcacataggtcacagccgtcagccgcggcagcaggtcgctttgccgcaccgcttccgtcagcatcccgccaaaaagcggcaggctttcccgcacgccctcaaatttcagctgctccatcccggcgcgaaaggccccctcataccgggcgcaccatagtattccccggcagccgaatacccccggctcccagaaaaattcccctgcctgcggctgttgcttctggcagctctcacacagcagttcctcccagccgcacagcgtcccgcacagcaggcaccgcggcgggtacagcaggttggtcactatttcccgcagcgtcacatggtcactcatcgcacatctcctgcagcatctctttttgattggtatagcgcagggtgcggcggttattctgcaccatggcatacaccgtttccttttgtccggtcataataagcagctttctcgcccttgttacggcggtatacagcaaattgcggtaatgcagcttggggtggcggcgctccagcggcatcaccacagcctcaaattcgctgccctggcttttatgcaccgtcacggcataggcgtgctccagctggtcctggttctcaaaggaataggtcgccagcttttcctcaaaccgtacctgaatggtcttgctgccggggtccagcatctcaataatgcccatatctccattaaaaataccggtcccggcggtaccatccggctgctgccatatgatatcgtagttattgcggatctgcatcaccttatcgccctcccgcagcgtgcggcccatcagggtggcttcgcctttgccgcgttcgggcggattcagttttccttgcaaaaggcgattcaattcccgggtgcccagcgggccctgcttggccggggtaatgacctggatatcccgcagcggatcgtatccatagctttttggcaggcggcggctgacaagatccaccaccagccgctgctgggcaaaggcatccggctgctccaggaagaagaaatccccagtacggcagccaaggtccggcatctcgccccgtacaatggcgtgagcgttggtaacgatcagactttccgccgcctggcggaatacccgctccagatgaatacagggcaccagcccgctttggataagatcccgcagaacattgccggcggaaacggaaggcagttggtcgctgtcccccaccataataagccgggcgcccagccgcatcccgcgcagcaggtgctccatcagcagggtatccaccatcgacatttcatccacgatgaccgcatcggcgggcagggggttcttttccccgcgcttaaaggtcagcacctcggtttttggctccacctccagcagccggtggatggtactggcctcccgcccggtgatctccgccatgcgcttggcggcacggccggtgggagccgccagcgccaccttttcgccccgctgctccagcagcgccaggatgccccgcagagtggtggtcttgccggtgccggggccgccggtcaggataaacagacggctctgcaccgcttcggcaatggcgcggcgctgcaccgggtcgtaggtaatgccctgtgcctgctccagctcgtccagctcgtcctccattggctccagccggggcggctgtaattgcagcgcaatgcacacccggctggccacatagctttccgcccggtacagcggctgcaggtagatgtattccttctcccccacggcataggccgccagggtgttgtcttctatcagtgttgccagggtattctccagcccctccggcgccgcctgcaaaaattccgtggcaagagaaagcagctttcctttgggcagacaggtgtggccactgcggctattgacccgcagaatgtactgcaagcccgcccccaggcggcaggggtcctcccccgccacaccaaagtgcgccgccatgcggtccgcctcctcaaattccaccccgatctcctcgcagcagagagcgtaagggtcacttttcagcacatcggcggtattggcgccccagcgccgccaggcctttatcgccgtcgcggccggcagccccagcgaagccagcaggctcatcacactgcggatgccgaactgccgctggtattcctcccctatttttcgggccttttcagccgagatgccccgcaccttagtcagccgttccggttccttttctatgatggtgagggtatcatcaccgaagcgtgccacaatgcgccccgccagcgcggggcccagaccctttaccgccccggaggataagtacttgcggatggccccggccgttgcgggcagggtacgctctataagctccgcgcggaactgcaccccgtaggtgccgtgcaccttatagctgccagttgcggtaatttcttccccctcggcgatctccggcacctcgcccaccactgtcacagggtcaccgtccacatccaccagcagcacggtaaagccgctttcttcgttgtggtaggtcacatcctccaccgtcccggagatcttttccagctcctgttccattgctttgcggctcaccgtcctttccttttggtatgcgcaaatccgcttttggcggctaaaatcggcgctggctgcgtcgccgccccttgacaggcatcagcccatctgcgccgggcataagcctgcctgcgggcgccttcttgccatcatccggtttccccgccaaaaagcatccctgcgcttatcaatcattttcctttatcatacaccatttttctgcctggggcaaatccaaagtatcaatattccggtcccggcagtaccgccggcagatctcccgtgcctccggctccagcggcagcagcacggtgcagggcagcccgcccgtttctccgcggtgcagcaggcggcagcagcctatcaagctgctttcggtatagtcggcgtcctccggcacccgcaggtacagtcggcaaccctgtggcgctttgggcgggacgatcagatccaccagcaccgccactacccgcaccagcccgatgattgccaaatatcctgccaacagccataaaatttccttcagcacaatggatcacctcccgccatcctatgcccgcggttgatttttgccccgattgcgggtataataaaagaactattctgcattttatcctataaaaagacaggagcttacgctatggccagtaataaatacaaaaaacgccggatcgggttcgtcatcctgctgctcctcctgctgctcattgcggtgggggtcatcacggtgacgggcgagataaacggcggtaaaaagaccggcgagaccgttaccgtttccattgcgcagggcagcggtacctccgccatcgcccaagagctgaaggacgccggcctgatcggcaataccaccctctttaagctgtacagccgcacccatggtggggacggccggtaccagtacggcgacttcacgctggaaaagggcagcagctatcaggagctcatcgatgccctctgctccactgtcagctaccgggaaacggtgaccctcaccctgccggagggctggaattccttccagatggcaaaggcggcggaggcggccgggctttgcaccgaggcggagtatctggaggcggccaatgccctcgattatgactttgactggatgaaggacatcagtaccgaccccgataagctgaccgtcctggagggcttcctctatccggaaacctactccttctacaccgatgccaccgcacgggatatcgtcaccacccagctgcgggagttcgagaaaaaggtgctgaccgaggaaaacaaaacggctctgaaggacagcggctttaccctggaggaatgggtcatcttcgcctccatcgtgcagaaggaaagcgccagcgtggaggagatgtacaatgtttcctcggtattccacaaccgcctttccaatgccagcgaataccccatgctgcaaagctgcaccaccaataatttcatctgggactatgtggagccctactacaatgacaatgtgccacaggcggtgctggatgcctacgatacctatgaccgcaacggtctgcccatcggcgccatcgccaatgcgggcctcgatgccttcgatgcctccctgcaccccaatgataccccctattatttctttgtcaccgatgtggaatacacccactactacgccgtcacctatcagcagcaccttgccaatatcgaaaaggccaaggccgtgaatgccaagcatggcatcaatgggctggtaaccggctaaaaaaataaaataatttgcggcatttttgtttttcccgcagtccgtgcaggaaattcacagaaatgccgcactttatttacagaaccttgttctactgtttttcccgcccctgttataatgatgatgccgggctttctcttgcaggggaaggcccccgacagcaaagtgcccgaaaagagccgaccccgccggccggaaaaaccgcgggctgccgtttccatttcgggcagcaaaaaagaaggaggaccccatgaaaaaatcacttcgttccctactggcctttctcattgcggccacagtgctgtgctgcatcgccatggcggataccggtcccaagcccagcgccagcttcacctttaccggtatgcccgatgaggattactatgtcaccatgctggccgaggtggatgcctatggccctcaccgggtccatcagccgggaagcgagatccccggttatgtactggagcagggcgagcaggaccccgcctatcccgcatggcagaaattcgtggactacaaggacccggacggctactatttcctcgaggatctgttcgagcagtgccacggcgatgatgaagccggatggcgctatttccccccggagcagttcaagctgctgctctacttccccgaaagcgacaccttcctttgcagcactgtcaccgagcgctatgccttcgatagcgtctaccgtttggatctgggcggcaaatcccccgccgaagttgctgcgcttactctcactgatcccaacggcgaccctctccccaccggcaccgtcacgctggataaagccgacggcacacatcagcagatcgtcggtttcttcgggcggttgggcatcaccctcgtcatcgagctggcgctggcgtggggctggaaataccgcaagggcagccagcttttgtttatcggcgtcgccaatctcgtcacccagtgcctgctgaacgcctccctgctgtactggggcgcccgggaaaccagccgcggggccatcatcttctggtacatcctgctggagctggccgtcaccggcattgaggctgccgcctatgcctacctgctgcccggcaccgaccgcaaggaccctgccgtgcgccgccatgccgccctttacgccctctctgccaatctgctttccttcctcggcgggctggtcctctccgaggtcttccccatcctgttctaaactgaatccctctccaaaagaggagccgcccggctcctctttttcggtgcttgacaaatccctccccctgcattacaatagcactaatttgagaataagtttcaaattcaaattctccgataggaggaacctccatgaaagaaagctatcaaacccgccagggcgctttgattctgcaaaccatgcagaatcttgccggccccgtcaccgccgaggccctttgtgccatcctgcgggagcaaagggtcagcaaggccaccgtttaccgccatctggagcgactgaccgcctccggacaggtgcgccgctttttccctgccgaaggagctgccgcctgctatcagtatgtcggcgaccaccacgactgccacctgcacccccacatggtgtgcgagtgctgcgggcggctgttccacttggattgcagccaactggaggcactctcggaacacatccgggagcaccacggctttttgctggattataaaaataccattctctacggtgtatgcgccgcctgcctggcaaaggaggaaaccccatgaccctgattcaatgctgcgatctttcgctggggtacgagggcaaatgcgtcctctcccatctggagctttcggtgcaggagggggattaccttgccatcgtgggcgaaaacggtgcgggcaaatccaccctgctcaaaggcatcctgggactgatccgccccaccggcgggcatattcacttccacctgccgcctaaggagattggttatctgccccagcaaacgcccatccagcgggatttccccgcctcggtcatggaggtcgtcctcagcggtctgctggcggcaaagggctttgcccctttttacacccgcgccgaccgcgaaacagcccttgccaaattgcgcctgctgggcgcggaggacctggcaaaccgctgctaccgggagctttccggcgggcagcagcagcgggtgctgctggcacgggccctgtgcgccgccggccgcctgctgcttatggatgagccctttaccgggctggaccccaccgtcaccaatgagctgtacgatgtggtggacaagctgaaccacgagcagggcgtcacagtcatcatggtcacccatgatgtcccggaggccctgcgccatgtcagccgtatcctgcacctgggggcagagcattttgacggcacagcggaggaataccgccaaagccccctctaccgccgtctgatgggaggtgacagccatgcatgatctcctttccggcctgttttcctatccctttatccagcgggcgctcatcgccggtacactggtggcgctctgctcggcgctcttaggggtcagcctggtcctcaagcgctattccatgatcggagatggcctttcccatgtaggcttcggcgctatggcggtggcaatggcactgggggctgccccattggccgttgccttgccggtcgttatcctggccgcgtttttcctgctgcgtctcagccgcggcagccgtctggccggggatagcgccattgcgctggtttccagcggagcgctggccattggtgtggtggctacctccctcagcagcggcagcaatgtggatgtaatgaactacctcttcggcagcatccttaccatgaccgccgccgatgtaaagctggctgtcctgctttcgctggctgtattgctgctgttcctgctgctgtaccaccgcatctttgccgtcaccttcgatgagaccttcgcacgcgccaccggcatccgcgccaatctctacaatatggtactggccctgctcactgccgttaccattgtcatcggcatgcgcctgatgggtaccctgctcatctccagtcttatcatcttcccggccctttcggccatgcgcatcagccgcagctttctcggcgtgacggtcggggcggccgtgctttcggtggtctgcttctgggtgggggtactggcctcttttctgctttccacccccaccggcgccagcgtcgtcctggtggatctggctgtctttttgctgctttccctctacggtctgctgcgccgccgcaaataacgcaaagtgagtgctgcatttttgcagccggtatagtataatatagcttagagcctgcttatggggcccgcagggcaccgctccgcggtgcgacgggcttcgcccgtccccggcggctgcgccgccggccctgcgggcccccaccctgccccctgcatctatcctcccaccccgaaaggagccacccccatgaccgatatcaaccgccgcgataccagcgagatcagcgagctttcccgcgccgtctttgaaaatccgcaggtctttgtcgaccgtgccgagagccgcttccgtgaccagctgcgcggcatgaccgaaaaagtagcgaccagcggcagtcacatcgtgctgctgtgcggcccctcctcctccggcaaaaccaccaccgccaatcttctcgtctccgatctttccgccctgggacggcgggcggtgcgtatctcgctggatgatttttaccgtaaccgggatgtgatgcccctgtgggaggacggcaccaagaattttgaatccatcgagggcttggatctggaatgcttttctaccagtgtcaataccctgatgcgggagggccacgccgaattccccatcttcgatttttccgccggcaagcgctcccccctctcccgccccatggagtacgatgaaaacaccatcctcatttttgagggcatccatgccctccagccgcagctgcggcagggcctggccagcagcaatttcggcatctacatccaccccaataccagctatgtggatcaggacggccacaccctgctggatgcccgcgaccttcgcctgacccgccgcatcatccgggataacctgcaccgcggcaccccaccgctgggcaccatgcaaatgtggaaggatgtgctgcgcggcgagctgctgtacatgaagcccagcagcggcaccgccgatgtcttcgtcaataccagccacgactacgagccgtttttgtacgccgctgtcattaccggtctgctggagcagatcgaggacgccggcgagaaccgtgagacggtggagcgcctgctggaaagctaccgccacttcttccccatcggcgccgagctcatcccgcagggctccctcatccgggagttcatcggcgaggacggcgaatgatccccctgcccccggctccgccgggggccttttgcgcccctgccggccgcagggacctggggcgccctccggcggccctgcgggccctccccctgcaccatccccttcctaactcccccacaaaaaaatcctccgccggatcaccacgatccgacggaggaattattttttatttagttacggcatccccgcaaaaatactctcaaacgggccataggccggctcattgtaagccacggtgccgttcttcgccatctctatggcgtccttcaccgaaagcctctgcccctgcgccttgtactgctgaatcagcgaccacgccacattcaggtaccagtcggcatattccaccccgcactcggcggcggtcatgcctaccagcggcacgccgtagctgctgccgtagttatggtagctgcacacctgcgggatattggaattcttataccagccggtggcggtatcggagcacccaggcccggccagcataccggtcagcttgcagtactggtagctggtcacattgttgctggtctcaaagctctgcccgctggccccctcatgcacctggctcattatggccttccagatcttcgggggcgggtagctggaatagcggatggaattggggatagccacgccgtatttattatactggatgttccccgcctcatcggtcttatagcgggaatcgtaacccagccagcacacacccacatagtatggggtaacacccacaaaccactggtccacgctgtcgtcggtggtaccggtcttgcccgccacggggatgttcatcccaccgaggttggcggcagcgccggtgccctcccacccggtgacctcctgcagcaggcggttcatcacggtggcggtctcagcgctgatgacccggaccggaacggtgttcttctccaggatcacattgccgtaggtatcctccacacgggtgtagctgtacggctcggtgcgcacgccgccgttgccgaacatctgataggcgcccgccagcttcaccagcgtcatgcccttggaaagggagcccagcgccatggggctgtagctgttgtccccggcggtcagggtatccacgttcagcgaatacttgaggaaatcgtagctggtggtggtgcccagcatctgggtgatctgcaccgccacggtattgatggagcgaatgagggcagtacgcaccgtcacaaagcccttgaagctgttatactcgttcttgggcacccacagcggctggctgtagctcacctcatcggggttgatgacgacctgccggtcctcgatgacggtggaataggtgatgaggtctttttcaatgcccagcacataggaggtgatgggcttgatggtggagccgatctgacgggtagtatcactggcccggttccagatgcggttgccctccttgccgcggttgccccccacaatgcccttcagggcgccattggtatcagtgatgacaaaagccgactggggatattcctcgttattcacaggcgggaagttatcgggactggaatagtagtcctccaggatctcctgtacccgctcctcgcaggtggtgtaaatgcggtagccgccgccgatgaggttctggtacgcctccgcctcggtaatgccctgcttttcggccaggtcacggcacacctcatcggtcacatagtccacaaaccaggtctggatggtggcattgctgttggtgccggtggccagcacgatctcctgcgccatagcggcgttatactcttccttggtcagcttgccctgctccagcatcagccccaggatatactccttgcgctcctggttttcctcccagtgggtaaagggatcataggcgtagggatttttggtggtgcccacgatggtggcgcactccgccacggtcagctcgctgacatccttattgaagaaaacattggcagccgcttgaatgccggagcagttctgcgaaaagctggccaggttcagataggtctcaatgatctgcgtcttggtgtagtatttttccacattcagcgcccggaagatctcacgcagcttacgcgcccagcccgccgcgccatccacggcacggtcattggtgatattacgcaccacctgctgggtgatggtggaagcgccgggggtggccccgccgtagaagccggtcagaccgatcttctgcaaaatggcgctgaggcccgccttggaggtggtgaggaagtccacgccgttgtgctcccaaaagcgcttgtcctccaccgccacggtggcatccagcaggcacttcggcatctggtcatagtccacccagatgcggttgcccgcgtctggatcgtaagcgcgcgccagctcggtcacaccgtcatcggcataaaagatggtggtgtacttggccttctgcatgctcaggtccagcatctgctggtcggtattcagggtatcaaaggcccataccgtcaggacgcacccggccacgcacatcagcataatgcccaccaggcataccgctgcgatggcccgcagcaccttatggccgccgggctttttc

SEQ ID NO: 2210 - DNA, 32759 bp, Unknown
  16S sequences of unknown bacteria
ccggtggattattgttcctcgcactctgtgctcggaacctccgctaaagcgacaaacaaaaatcccgtcttaacttctaagacaggatttccgttatgctataaacagggatataatctacctgaatattgatatgttcatctcggctccactataagtttgattgctgttctttcctcaccgtctatctgtatatcagtaaacgcaggaacacagaccagatcaatgccgcccggtgccacaaagcctcttgctatggcaattgcttttatggcctggttaagtgccccggcacctattgcctgaatttctgctccgcccttttctctcaacactcctgcaagcgcgcctgcaaccgaattagggtttgattttgctgatacttttaaaacttccattgtcaatctccttttctatatctttcgatattctgttattagaattctttctttatttacattgtattgataaatcacagcactttgggtgacttttttcttactttttcatacaaattaattttttttaagactttttttgacttttgcttgcagttttctacatttttatgtataatcaacgtgtggttatccccctgataacctcattaatctctaatcccaataccccttttgagccaaagtagattgcaccccttgcaatctactttgattttacggagaaatttatgaaaatattctgcacatcagaaaaaggacatagatacagttcggaaatattcgacacctatttcgacaatatgcggataggtttttttgatatagagacaacagggctttcacccgacagatgtaagctcatcctcgcggggcttgcatattatgaggacaatatgcttgtcgcaaaacagatctttgccgatgacccgtcggaggagcctgaagtaatcgcaaccattttaaatgaactcaaagactttgatatggtagtcacctacaacggcaagagatttgatatgccgtttcttttaaaacgggcgtacaaaaacaaaatacatatgaatgaagcactgccctacaatcttgatctttatccggcagtcagaagcttctcgcccctcagggctatgcttcccgatttaaagcagaaaacagtcgagagctttgtcggtctgtgggaaacaagaaccgatgagatatcgggagccgaaagtgtggagctttactattactatgcaggcaccaaagacgaaaaaataagggacgtgatactgctgcacaacagagatgacataatgcagctttcaaaacttctcacagttctggacaagtgcgatttgaacggatatatatatgcaaacggactgcccgcaggcaggctgattatagataagattacggcaggcaggcagtatcttgatataatcggaacacagagaaacgcccctgctgattttctcagctatgatgatttctgctccggctacaaagtctggttcaaggcaaaggactcatcttttgttataagggtgcctgttatagaaaattccgggttaaggttagtggatttgaagaagatgaatattgactacagcggcctgctgatgtatcctaatgttgaagaggactacctgatagtttcaatcagcggaaaggttaatcacagggaagtcaatcttttcagtcagatagtcgtaaaggaaacagagagattactattacagggggtagattaatgaaacataagataaaacgcaatctgaaattatcggcgctgattttttcggtaatatcgcttatcgtgcttttcagcaatgcggatcagcaccgcacttacagggacagaagccggtagatatttaacagcacattaatcagcagctgcgaagtatacttctacagctgcttattttatttggtttaaactgcttcccggacaaaatcgctgtttttatttctgcattttactgcaaaatcgctgttttcatcaatattttagctaaaatattatacattaatatggtggagcggttcaaacaccttactccaccataaaacttataaccctcaacagttttttatttaataaccaatatacatatcagctatttttccggctcatatttgaagcagtccataaatttaagtttaaacaggttcgccttgtgcttcctgtctatcttctcttttatctctttatcctcgcaaactcctgtacggatatatctgtctaaaaccgcataggtaaagccaaggttatcctcgtctgtcttgccgcagagtccgtctataggcgttttttcaacaaacatatcagggagtcccagcactctgcctacagcctttacctcctgaactgtcaggaacgacagcgggctgaaatctcctgcggcatctccgtatctggttgagtagcccacccagtcctctgaaagattgcaggtgtttgcaaccctgccgttatggcactgcgccaccgcatatattgctgacattctaagtctcggcgcaaggtttgtataagcctgcgtgctcacctcatctaaaaccgactcaagctccttaaccattccgttgtaggagtccttgatatttaccacatagtttttaataccaagatgctcgcacagagcctttgaaacgtctatatcaaactgctctccgttcggaagaagcacccctataaccttatctctgcccagagcctctgcgcaaagggccgccgtaactgagctgtccttgcctccggatatgccaagcactgcgttgcagcccggtccgttttcttcaaaccatgctcttatccattcaactatttcatttttcactttttcagcattaaaagccataatccacctccagatattcgtatctgttttcttcgtctatagtagtatacactaaatatatgtttttaaaaagccctacttaccgcctctgtaatttctaacggcaacggctattctctcaaggcctgtccgaacaacatctctcggcattgcaaggttgagtctgatatatccgcccgcatttcctgcaaacagtctgtcgccgccctcaagcagcacgccggcgttttcggcaaagaacagcggcaggtcctctatatcgggcagcagactgttcatatttatccatgcaaaatatgtagcctccggaatttcaaattcagcacccggcaggttttccccaatgaactccttaacaaatctgaagttaccgtcaatgtattcctgaagctgcaaaagccagtccgcgcccttttcgtatgcggccttatgggctgcaagtgagagaggattaactgagcctgtcattttgtcacgccttttaaatcttgttctttcctctttgtcccgtataattatgtttgactgtaatagtcctgcaatattaaaagtcttgcttgccgacatggcagttacaaggcgtggatattccggcattatcctgcccataggtatatgcctgtttccgcgccttagcaggtcgcagtgtatttcatctgaaataacccacagattgtttttctctgcaatctccgctatgcgtttaagctctgcttccgtccacatgcgccctgtaggattgtggggattgcacagcagcagtatggctgctgacggatcgccggctttgctctccaggtcgtcaaagtctatatcaaatctgccgttaatttttttaagcggcgaggctgcaagctccactccgttgtattcacaggcatgcaggaagtagccgtaggccggagtcatcgtaattacttttgctcccgcaggctttgccagatcctctataagctgatagagagccggcaccacgcccggagaaaacacaagctcctcgcgtttaaagctccagtcatatctgtctttgcaccatttctcaaaggcttcgtaatagcctgtgtcggataccatagtgtacccgaaaatctgccggtcaacccgctctttgattgcctcctgtatttcagacgccaccgcaaaatccatatcggcaacccacattcgtatgaactcatcgtctgcatatgggaatttccagtcgggaccgcatctgaaaatgtatgagcgccacccatcggtattcattgagttggtgttttttctgtctataatttcatcaaaattgtatttcataactaatcccctgtattctgaagcaccatatagtccttaatattctgcgcaaagacagctgctctttctctcactccctctgaaacgagaatttctcccggattgtttgctgtttccattattgcaaatctgcccggaagcgcaaaggtcttgttcatattaagtccgcttatgagctgctccgccactatatcactgccgctgtagcccgacactataactccaaacagcagcttgtcataaaatcggtgctttgtaaacagcgcagtcattctgttgataaaggctgtcagattgccgcccagcgcatcgttgtagtttgggcctatcataaccagtgcatcgcactcaaggattgcaggatacacctgctcaactatagggccgccgtaaaagcagcttccctcctctccaaagtgcaggcaggtctgataggagcatcctctgcagtctgtaatctgaccgtttcgcagtgatatctctttaatatcgcacatatcaagattgcttttaaccatgtcccacaaagccattgtatttgacctgtgctggttgcctgcggagagcgccaggattttcggtcttgcctttttttcaaagctgtactctgtaatattgtttacaaggactcttgcagcctccatatatgcgcccatattgtccgtatttaaattctgggcctgtatgttgtagtttttgagggttcttgtgccctctacaagaggcctgcccggaaatgtgcagcctgctctgttggcggtaaatacaaggcttcttgccgttgattttgtatagaattcgcagttgccgtcaatcagcactcccgccacactgccctcaagcgccgtcctgttaagtctgagatatttcataatctcaaacaggtgcatattgatgcccgattctcccagggacacggtaaacagtatccggctgcctcttaaatcaatctgcgccatttcctctgccgtacctatctctgtgcagctgtatccgtcaagagcatagcttaatatcttttcaagccgctccctttttgaaaattcgggacagtagggatttatcagtaccagttttctcatagcctgcctcctttaaagtacgcataggttatcgtatgcattttttattctttcaaaaagtctttcgtcaagctctctgttttcaattataatgctgcctgcctctgcccgtctgtttctgcagcctaagaatgctccgctgttctcatcgcccaagaatacagaggaatagttccattcttttctgagcatctgaagaatagagattgctcccgatgaaagcgcaggcgctatatacggcttgaagccgtctgctcttgtttcaaggtttgactttaccgtaagctccgtaagctctctagacagttcatcgttatagcttgtgatgctgtctgcaattacaagatcctcgccgtgaggtccgtaggctctgccctcatctttgtatgccgcaaatctgttatctctgtctgcgtaatatgcggctctggcattcataactccaagaccgaagccctgaacctgtgtaaatccaagtccctggcgcaccgccgccctgcaaagcgggtcaaccgggtcagaaacaaccgcaaatattcctgtgaattgctctgccaccgcttttgcggcatactgtgaaacaagttttttgttagcgtcaagctgagccatacgcacatcgcctgccgctcccacaggaggcactccaagggatgcgcagaatacaaatacatcgcattcaaagagcttatcctctgtgagaatttctatctttggcatagatcttctgtcaggatagcctatctgatttatctctctttcatatcttctcaacagtttttcattaaggtcataaatccctatatccgctacggtttctccgcccaaaagacgcagtcccataacaagcgtgccgcccacatctcccattgcaagcacgtttactttaaatccgtcagccttattgatatattcctgcccggacagaagttcctcgccctctgcgcagtctgccctttttctgctctggcatataatttcggatatttttctcatttcagtgcactctccagtctttcaagtctttgcatatagtcttccatatataccgacggcgccagattgaagtctaccgctacacggtttgacccgtttggcattctcggtgatttgattacgtcagaaagcctcttgattgtaagctttctttcaaacatattctgatattcctcttcaagccctctgaatatctttgccgcatttttaaggcatgtaaccgacaggtcatagaccgctcccctcggcgcgtctgcaagaaatcccggagctgcaaacggcagtatcagatttatggagtttataaggttggcttctgttttttcttcgcttctgacctcatctccccctatgaacggacacagggttgactctacgaaccacgctttcatattaggcaggaaatatacgcttttggcgtttctgccctgaattgtcatcaggtccttgcctctgcccgaaagcactccgactacaacctctttgatatcaacattgttacgcttgagcgcagggtctatggctttaattctgtagcccttgtgaagcaggtcgtctaccagtataatcggtctgtcaaaggatttgatggttttaatctggttgcctatcttggcatacatcggatactctttaattatgaagctgtccagtgtaggcgagaacattttctctgtgtgcagggttttggtaactgtgttaggtaccgcaacgcctctgaatatcttgccgaaaggcacgcacatatattcgcccagaactctttctttgagctggcggttaggcacgccgttgatatctgtaactatatcgacaatccgctggttcataagctccgcgttaaacgaaagcaccagtccgcccggatttatctctgtaagggctctctgcatttcctcgtgggtttctttcaggatttcctgcattttaggacttttgttaaacggttctttgagcgcggtgttcatattttcaattaccaccacaggctctttcatatcaacctcatagataccgcagcccttgccgcctatgctgatttccacaaagccctgcctctgcagcgccgaaacaatatcctgctgaggtttcctgtcaaacggatgatatacggcatacaccagttcctcttcaagagcctttgacagtatctcacccataagaagcctgataagctggctcctgtccgctctgcggctgcagtatatggcttttataaccagcatcttgcctacagctctgtttctgatatattccgctattgatatgtcgccgaattcttcatacaggtttttggtttccagtatgcctgccgccgcaaaggcatatatctgtccgtttttgtttctgattaccgctgttctgacatcagggtcttctatatatctctctaccgccgccgcatcagcgccgcgttttctgatttcctcgtgaagccctttgagtatgctcctgtctgcctgcattgcaggctcaaccagaagcttctgttcttcgaggaagctcttgtcctgcggttctctgagatacaggctgttttcgtatatgaagttctgggcaaccgagtctataaggtttgatatatctctgcctttgtctatgttttctcttattctcgtcgaacttatatcctcaaggtataccggtagcttcagctcctgtatttttcccgatatatatttgtagtttgctttaagcttttcgtagtttctgctgtcctcaccgccgattgcgcgtctgaacactatatggttcatagtatgaatggagttttcctccggcggttttctgtaggaggaggcgttgagtataacgtcgcttcccacaaccatatatggctcgttctcaccgaaaatctctttaagctttttgaggtccttaggatttgctatatttacaggcatatcgtcagggaacaggaacacgttcattctgtctgcaacagacattgatattatctgtctccttatcattctcggctgtgtttttttagaccaggagaattcgtctatcgcaaggtagacttcaaagcctgccgcggctatagcctctacaattcccttgtgactaagcgaaaacgggtcgaacgtgcccgggaagaatgcgatttttctctccgctttaaattcctcttcaagtcctttagtatttaaggacgatataaaacggtagatatggttcagcgccgccgcatttgtgaagaagttcatatcgtagcttttctctgcggcaatcagtgtaagcatttttttgtgtatgtgcatgaatatatctgtcttctgctcatcggacatgcggctgcttccgaatatatgctgacctatcaccataaacgcttcctggcttaccgcctctctgtagttggaaagtcccttgagaagcattcccagcattgtggtttttctctgttcatagccggcctcagtctctttgcctctgtgtctgtaggaggaatactgctctatgatttctcccagagtatcaagggcaacagagcctatcttgtcattggtggcttcgataagacctctaagggctgccacaaattcgtccagttcccccggaggaagcagcagcaccagacttccaaggtagtcgggtatatattttgaaaactggtattcccctatttcaaggcctttcataagctctacggcgatttcgtttatctgctctgacggcaggttttctgccactgcaatcagactttctcccgctctgtgacgcactgtaactctttcgcttaccttgagcagatttgagaagtgagccgcaaagtagaatttacggctggtgtcctctgaattgagggcaatatccaaaagcagctctatgttgataatcttgagtacccatggtctgcccaccttcagattatctctgagcatatttgaaacagcctcttcatcggccataaatttatctattgcaggcgcgccgccgccgtttatgttgtttctgattttgtctgtaaggtaggccacactgcaatagtttatcctcacgtttttgattgcagacataatttcctctgccgcatgctgtgaaatgtccataacggaaatatgctccgcagctctaagcgccgcgattttcagcggaaccgatgcttttttggacattctgcatgcaaactccgccacctctgtctgtatttcctcagtaatcagctcgtgcggtatcataagaaatgagtccagcagtacaaatgctgatttctcgcttattctgtttctgtgaaacaggtcaaagaagcaccttagaaattctgaggttttgtccctgtcgctgctccgtattatctctgccagcactatcttgagtgtataccctatccagctcttgtgctggtctgtcatacggtaatccggaaatactattttgttaaggtaggtttcccacagtgaaacggcatcgcttctgctacttaaatccacccactccggcagttccttgcggtacacatcatcatactgcgcgattataaggccgataaggcgggcagcctgtcttctgatatcaccctccctgtgagaaagcagttcatagaggaagcttacggtcataagcttctcggtctttgtcatatatgtgcagtattctgtcagtatattgaggtaggttctctgttttttccactgtctttcacttcgcgcagcttctatgaggctgccgaaggctgactcgttattgaataccgacatcagctttatattatggtcgatggctgtatatttaaggcgctgtaccacttcatttccaaacagaagcgatgcgtccttctgtgccgtttcgctaaggcagctttctcttgagtctatatctgtctgtactccgagatttttaagatagttttcaaagtccagcagcttggcgtatactttctcatatctgaggcgcttggcatcatcaacattgtccagcttgcccagaataacgtcaaaggcttcctccagcgtatagaatttaatacgctctctgccgccggttctgtagtttttgactctgaaatcggcatatatgagtataagggactctaccgacaggttctcaagttctaaatcccatgtggagtggttgctggctatatgggcaatcataggcatattcagtcttttgagaagttcgtccgtatagtaatagtgcaggtacggaattcttgctgactctctttcactgcatccgaatttgccaagatcatggcctgccgcagctcccgacatcagcgccatatccacagggagtcccttttctgcaagctgactgcctatgtgcattgcaatatagtgaaccccgcttatatgctctgatatgttaaacggtgttatctcgctgtatatgcgcataaattcaaatatatatctgctgcgccagaattctttaaatctgatatattccgcttccgatacgcagcctgccgtagcctcgctgtcaagcaggcgcagacttgtttttgctgcatcggggtaagccgcgcgctctgcttctatagctgctctgcagctttccataagaataatcagcgcctttttttcatcttcatattccgaatcaagagcaaagttttcggggtaaagtccggctcttgacactttgcatgcaaattccagccagccctccgcaggctccgctgcaaattcgttcataagcggttttactgctttgagtatatctgccgctttaaatctgctttcatcaagacagttaagcatcttctttttccagcctgtttttgacatcagcgccggcatctccgattttctgacgcccagcttttttaatacggttttacctgtaagagcagcctctgctctgtttataatgttgcctgtcatagccttatcctctcgtaatgaatatatctttaatatatattttaacttatacgcctgaaacattcaataatttacggctttgcagaaaattttcatatcagcatcattctttgattatttatcaaagaaaaattgatttattatcggtttactcaatacacttgtttggattatactcaatttgtaaggaaatcgtattgaaaatgttgtagaatatattctgtatttgttttgggaggagctaagatgaacaaaaagacaaaagcaatgcttctgatgatagtatgcgctgttttgtggagcaccgcaggaatatttataaagctgataagctggaacccttttatcatttcgggacttagaggccttatttccgccgccgtgcttgccatatatatggaatctcagggcatacatataaaggtgcagagaaactcaataatggccgcaataggacttggcggctccgctactctgtttaccgttgcaaacaagctgacaactgccgcaaatgcaatagttttgcagtttaccaaccctgtattcatacttattatttttgctgtgtttttcggacgcaaactgaaaagatatgacatcataaccgtaatagttataatggcgggaattgcgctgtttttcttcgaccagcttacaccgggcaggctggcgggcaatctgcttggcatagccgcaggcgtactgctggctgtaatgtacgtatttacaggtgagtcgggggaagatgatgacctgagaatgacgggcgtactgtttgcgcatctgctgtgctttgtaatcggcataccgtttatggtgatatatactccggaagcagtcactatgactgaaatccttgcaatactggcactgggaatattccagcttggtcttgcatatgtgctgtactgcatagcctcaaaggactgcaagcctcttgcctgctctcttatcggcgcactggagccgcttttaaatcctgtatgggtgttcatatttgacggggaagcgccgggaatattcgccctgacaggcggagctgtagtaatagctacaatatgtatctggtgcgtacttgacagcagaaatgaagcaaaagcccaatagaaaacagacaggacagaaaatcgtattaagataatctgtcctgtctgtttcttgcttcactcttggttatgccattggctctaaaaggaacggcaagacgcaaaaataaccgccacgtcctgagaaaactattggttatttttataacatagcccgctccgctttatatgagcctacagatagtatatcatctttatctgcaataatcaatacttttgcaatatttattatatatttaatatatcaaggatattcttctgcaatttctttcgcactatgcgtactggctgttatacaggtccgcatagaagcctcctgccgcaagcagctcgctatgagttccctgctctatgatgtcaccatggttcattacgagtatcatatccgcgtctctgatggttgacagcctgtgggcgattatgaaactggttcttccctgcatcaggttacccatggctttctgaataagcatttcggttctcgtatctaccgagcttgtagcttcatccagtatcattataggggcatctgaaagtatggctcttgctattgtaagcagctgtttttcaccctgtgagatgttttccgcatcctcgtttacaggagtgtcatagcccttgggctgcgatctgatgaagtgatctatgttggcggctttggccgctgccctcacttccttgtctgaagcgtccattctgccgtacctgatattatccataatactgccgctgtaaagccatgtatcctgcagcaccattccgaacatttttcttaaatcctctctggagtagtctgtaatgtcggtgccgtctatatatatatgcccgctgttaagctcataaaacctcataagcagctttacaattgtagtctttcctgctcctgtcggccctacgattgcaactctctgtccctgctttatctccgccgagaagtcctttattattatattctcagggtcatatccaaaggatacgtggtcaaatgtcacatcccccctgtgctgatttatatcaggctttttgagaagcgcaaggtcagtcttttcggtttcttcctcttcatttataaattcgaatacacgctctgctgccgccgctgtagactgcagcatattggcaacattggcaagctgggctataggctggttgaagtttcttatatactggataaacgcctgtatatcgcctattgacactctgccgcctattgcaaatattcctccgagaatacataccagcacataggctatgtttccgaacaggtttgaaataggatgcataagtcccgacaggaactgcgatttccacgctgactcacaaaggtgctcgtttatctcatcaaaggtttcaatggcagcttcctcgccgttaaacgcctttacaacctgatgacctgtgtacatttcctcaacgtgaccgttggcatctcccagatatctctgctggtcctggaaatacccttgtgtcttttttactacagctttaatgaaaagtgccgacattggtattactattaccgccatcagactcatccagatatttatcgacaccatcattaccagtatgccgattacagtggtaacactggttataatctgggtcatagactggttcagcgactggtttacagtctccacgtcattggttaccctgcttaatatctcgccatgtgttttagtatcgaaatatttaagcggcattctgtccattttttctgaaatttcctttctcagtctgtaggttatcctctgggatactcccgacataacgtaaccctgcaggaatgaaagcagtgagcttgccgcatatattgcgcataagaatatgataatatcaagaagcgcatcaaagtctatgcccattccggacatcagtccctctacaaccttatctgtcgcctttcccagtattttgggagaaacaattgtgaatactgtgcttcctactgcaaatatgaacactgctgttatatgccatttaaagtcttttacatatttccagagcgcaagcattgtgcctttgaaattcttggctttctcaccgggcatcatacctgccgatcctctgcctgaccttgctctcgggcctcttctctgctctgccatttacatttccccctttccgctgtcaagctgtgagcttgctatttctctatataccccgcatgtctgcataagctctttgtgagttcccttacctgcaatccggccctcatttaatacgataatctggtcggcatcggctatggtgcttattctctgcgcaactataaggagggtgctttcgcctgccgattttttaagctcctttcgcagcgccgcatcggttttgaaatccagcgccgagaagctgtcatcaaatatatatatcggagctttctttgccagagctctcgctatggaaagtctctgcttctgacctcccgacacattggtgccgccctgtgcaaccggcgcatcgaagccctcttccttttccattatgaagtcctctgcctgtgcaacttcggccgccctctttatattctcaaagctcttatcctctgcgccataggcaatattgctctttatatcacctgaaaacagcatgcccttttgaggcacatagcctatcatttctctaagctcatgctgcttcatatctctgatatcaacaccgtctattgtgatgcttccctctgtcacatcaaagaatctcggtatcaggttcacaagagtcgtcttgccgctaccggtagagccaataaaggctgttgtttctccaggtcttgcggtaaaggatatatcggataaaacagcgtcttctgcatctgcatatctgaagcttacgtttttaaattccacaacaccgcatttgtctctgatttcctgagtgttttctttgtctgttattgatatttcttttttgagtatttctcccactctgcccattgatactgcggctcttggcaggaatatgaacatcatggctatgaacaggaatgatattattatctgcatagcgtactgtataaacgcaagcatactgcctatttcaaggttccccgcatcaatatagtgagcgcccgcccacacgataagtatcgaggtcaggttcattatcagcatcattacaggcatcattaccgacattgctctgtttacaaacagattcagcttggtaaggtcattgttggcatggtcaaatctgtcctcttcgtatttctgagtgttaaaggctctgattaccagaattcctctcaatctctcgttcattacaaggttcagcttatcgaccttttcctgcacaaccttgaactttggaagtgtaatgataaacataaatgccataagaattactatcgcgccaaaggctatgccgatggtccatgcaagcgacacactggttctcagtgctttgattattgcgcctatacccattaccggcgcaaacatgccaagcctcagggtcattaccgcagccatctgtatctgctgtatgtcattggtggatcttgtaataagcgaggctgtggagaagtcctccatttcctcatttgcaaagtacattacctttcggaacacagcctttctgatatctcttgcagatcttgccgccgtctttgaagcaaaaaggctgactcctgtcgcgcacaaaactatagcggcggatattcctatcatcagtatgcctattttgtaaatctgcttcatatcaccggctataatgccgtcatcaataatatctgccatatatcccggaagcgccagctccagcattgcttcggcaaagagcagcacaactgccgcaagtatatacggaatatacggtttgaaatatttcattgtttctttcaaagctatctctcctctctcaatattcttctgatattcttactgattttttcttcaatcatagcctcgtgcgccctgagctcgcagtcccctgaaactgcattcacgaggttttctgccattttcttaagaagcatactgcacatctgtatctcttcttcagacataccctcagtaagaactttttctagtttttctcttgcctcttcattcttcttgtttaattctttcattttttccgtagggtaaagctgatatcctctcttgtcgtcaggattatgcctgcgctctactatccctgcgtcaagcattgcttttacgattctcgcaactgcacccttgtctatttttagattttttgcaatctgctcctgtgatattcccggatgcgcgcatatctccataaaatacggaacagctctccccggtatgttatattccataagcagttttgacatatatactctgctgtatctgtggattatggaaaactctttaccaaaatcattcatagcgacctccaaaattagttgccaagacaaccgttgctttgacaactattatacccgcataaaggggtaagtcaaccgccttttctgagatttcacataatcttcattttaataattttttaaaaatcacacacaaaaaacagcctgatatcaaaaccagactgtttcatattacgtattaaactccctcacttattacaagctccttgagtctctggatgtgtatatccgccgcttctcttgcggcatccgcgtcaccggcaacaatagcctcatagatggcttcgtgctctgaaggcatatcatctgctctcttgaaatcgctgtaatacagatatctgaaccttaatacaagctcctgaagctgttctatcatctgaagaagtacgtgattgttgcttgcttcaacgattatcctgtgaaatctcgtgtcgcttttaatcatggctgccatatcgccatcggcaacagcctgatcataattctcggataccctgtgaagctcctcctgaacgtcctttgtcattctctgtgctgcaaagaatgccgcaagaccctcaaggttctgtcggacctcgagtatatcaaccatatcttttacagaaatctgcgacgcatatgcaccgcgccttggttcaatggtaacaaggccttctttttcaagctgtctgatagcctcccttataggcgttctgcttacgcccatatcgtctgcaagttctacttccatcattcttgttccaggaacaattttgcctgtgagtatctgcattttcagttcttcgtacacaatttcccgaagaggcctgtgattttgaatgtcaaaattcagcataatatacctcctaacatatatttaaatttaaagagtcgttcttgtcaggaaagtctctctatttacttgtttcatgcggcttgcagccgcctgtgcgcacgcttccgactccgctatacatataacggtcggaccgctgccgctcataagaactgtgtctacaccatcgcattgtattgccatgtcttttgtattcataatgcaattgtacttttttaacgtgtaaaattcaagtacatttatcatattttttttaataaaatggctgttttcttgttcaagccctctgataagctctgcaatatcaggtcttttgctgatttcaacctcgtcgatgccctgatatacctcttttgtagatactcccacaggtggcttgctcaaaacaatattgctgtgcaaggcaggaagcggtctcagttttgtaccgtcataataggcataggcgcacgatgctgccatagggtcttttctgacagccttatcaagtacgctgttgcatcttgcctgtcccattattgtaaacggcacgtctgcgcctaaggccttgccgtcctccataagctgctcaagggaaagccccaaattccacagcttgttcaaagcgtgaattacagcgcctgcattgccgctgcctcctgcaagtcccgccgccacaggtatgttcttcctgatatcaattctaatggtaccgtttttttcctgtccgtatttttgcgccataagagcggccgctctgtaggcaaggtttctctcatcctttggcagataggctctgtttgtattaagcagtatatccgtaccgccgccttttctttcaaaccatctgacaagcacctcatcgtgaagctccacctgctgcattatcatctcgacctcgtgatatccattttcaagaagccccttgacatctatggccagatttattttggcatacgatttaatccttatacttttcatctgatgctctccatttaaaaacgggcgataatcaaaccgcccgatgttttaatctattttttctttttgctcttatgcttaggatttgttgttcccgccgctctctttgccgcttcttctttagctttctgctctgcaagagcttttctgcctgtcacataagtgcttccgccttctgaaataggtcttggacgtgaaactctttttcttcctgccgcggcaatcctggcttcctcttctgctattcttgcttcttctttttctctttcttttgcctcttcctcggctatcttggcttctttggcagcctttttggcttttgccttttcgtcctttgcaactatttcttcaacagacttgcctgttctctttgcttctttgtatgggtttactttttcttcttttttagggttcttttctgcttcttttttgttgcccctcattgtgaagaatatcataaccacaatcattgcaaccatcataagcatattgactgtatttgtcttgctctgatttactgttgtaaagctgatatcgctctctgcaagagccttgtcagaaagagtatctcccgatgcggataccagattttcgtctatgtgcagtgtatatgtcatttcctgctgaacttcatacttggaagttgtatcctcaagaacaagcacctggttttcgtatcctttctcgctgttgaacactacgataatcggaatttctttgcctttttcgtctgtaatgctgaagcatttctcgtttgccttgttgtattttttggagtacatatcctgattgaaatacagcttcacaccaagattgtccttggccataccggtatccccgtcctttggatttgacagatccacctgcagattaccggcaaagcccggtactgcagacaacattatcaccagcaggcaaacactcaaaattgcacttattcttttcattactacaagtcctccgatttcttctttctcttttctctgaaaaaattcctgattatgctctggcattcgtcctgcataattcctgtttccatttctatataatggttaagtcgctcctcctgaatcacattcattacagatccgcaggcgcctgctttgggatccatagcgcctatatagaccttctctatccttgagagcaccatcgctccggcacacatggcgcagggttctatcgtgacataaagatcacaccctataagtctccaacctcctatcgcctgggctgcggctctcagcgccacaatctccgcatgagccgtagggtccttgagctgtcccaccatattgtgacctctcgctatgatttgtccatcttttactatgactgcaccgatgggaacctcgccctcccgatacgctttttttgcttcattcagagcttctgacataaacttttccatacactgattaatcgtatcatatttcttgctcaagtgcaatctcaaatcatctatatttcttcaatttctccattgtttttgtttattgcgcatatccagtatccgtaagcctctttttcatctgcaatatcctctgcgcctgcaaccggctgccacagtgaaaatcccgacctgccctgctccggctgctctgttttcagctttcttcccggtatgcctatgtaatagtagttttctgtttccgcaaagataaaatgtctgtatctgctgcaaagccccgccgcctgagccgacagaaccggcattctcgccgtattgacaatctttttccacgagcagtcaagaacacttcttgaaaaaggtctgatgtcctcgtaaaaggatatgttatccgctattttgccgcagctttcggtgagaaattctctgtaatagctgctgtaggcttttttcttctcattttttaatacctgcgagggcttttcacccgtaaaggttcctcttgccacaggtcttaaaggctccctgccgtcatcaagagaaaccgcggcaatcaccgctatcgaatagtctttcagttcatttcccgctccgtcagcattttcgggagtaaatctgaaatatcctctgccctctccggcttccgtaacgcttatgtcccccactaccgtatatattgttttttctttttttcttccgaaaaatatgagcttgtaggcgtatatgctgctgtaaagcagattgcttatatctgcctttatggctcccttgccgttgcctgtttcgatttttataaccccgccgaccctgccggcttcatcatttgcaaaggaatggttttcctcctccatcatcacatatgtcttttcatattttatatagtccatttttaccccgccttgctttatatatgtttttttagtattatgtatatgtttacagacccttacatattctaaaaggagatatctatatggctttggatatttttttcgggctaatacttctgtgctctgtattgctcggcatcagaagcggatttctggctgcggtttttcatacctgcggctggcttattgccgtaatctgcgcttttgtttttaattcaaaaatccgcgggctgctttcagagcatacacatatatatgaaagtattaaagagaatatatcgcagaaattcagcgaaaaggtgacgcagcctatagcagacgccctgcctgttcctgacggtttttcaggtcttctcggaaacgccgcggagaaagcggcagatcctgcggttaccgccgtttcaaatgctgtttactgcgccgtatgctttgtgcttacggttattgctgttatgcttgttctgtacatatttctccgccttttttcaaaaaaatatacggacggacttctcggcttcactgacggagttctcggcggactcatcggggtaataagaggaattgtgctggtgctgctcgcatcggtgctgctgtttcctgcggtttcgcttatgtcaccggagctttccgagtcgctggcttcctgccttgaaaattcgcattttgcgctgtatatatatgaaaacaatccttttgctgaaatactggataatatgactgatatgtatatcggagaccttcttaacagataatatatagaaaagacaggaggtaaatatatatgtttgaacttgcaccgttccggaaaagagataatgagctttcatcgtggtttggcgatttcagtttttcgggcagccacttcaagaccgacattaaggataacggcaaagaaatagtgctgaaatcagacctgccgggatttaaaaaggaagatatcgaggtaaagacagataacaatttccttacggtcacagccgaaagatgctacggcaatgacaaccgaagcagcgagggcgaatacgtcagaagagaaagatcctacggcaaattctcaagaagctttaatatttcaggcattgacagagaaaaaatatcaggctcctacaaagacggggttctgacgcttactctgcctaagcttgactgtgaaagccagagctcaaccagagtggaaattaattagggttaataaaatacaccatctgcaaacacaggtggtgtattaatttatcactcagcaaacagcaaatttattttctgtgatattttgtccctcttccactgccagatatatatacaaatcctttttctgcaagggtatttaatatttctcttgttttactttttccaaaaggcagtctgtttaccaaatcgcttatcggtttgcctgtctctactgaaagcagtttgtatacgtccgcttcatcacctgcaaggtcattttttgatttcattaccggaagtacaacttttatagaattttcatacactctgaattccggcttgtttgcactgtctttgtaggcctcccttatcctgcgcacacctgtcccgaagatttccacaattcttaatctgtaaaaaacattacttattatagggtttctcagcttggaaaagttccccgcaagatattcttcttttgataactcttcaggcagacctcccggagaataaacttctatcctgtcttcgaacataaacactctgatttgttctctgacgtcccacaccctatgtataagtgcgttagcaaccgtttctctgaacgcttcttccgggataagttcttttgtctttcgaaggcttccctctataatttcatactgataatagtctctgaagatttcacaggctgcctcatactctgccaatatagatatattgtccagagttttccgttttctgataacacttattgactccccaaatctgccgatatctatacccgggtaattattactatcggcaagaagcgcagctgcaatattgtagccatctttatccgagtaaagattaagcgtttttaaaatatttatatcgcatctgtctattcctgtttctgcaatcagccttttttccagttcacgaaatgtaagtttctgattttccgccggaagttcttcataatgcatattgcttcctgcaagtatcagtcttgtaagctctgctctgtccacctcaacagttgcagtatcatttcttttatatgccttggatttatacatatatggttttttatctcctgaaaacacagtaagttcaatagtatttttttctcctatatccaaagtatactccggctgagggcttattgaatcattaattctgttttctatatcaagacatacactttcaggattttctatgcctgagaaatttccattatcgtcagctccgaagataataactccaccgtcgtaattggcaaaagcacttactgttttaagaaaagtattcgtaatcatctctttgaattccagatgtctgttctctttcatatagtacctccgtttgttacttattatacattatcgcccgatcgtaatcaaccgtatttattttacgctcgactttgcgcgtttattcacgcgtaaaataagttgcagcaaaaatcctgattagaagttaatggaagataaaatacaccatctgcaaacacaggtggtgtattgtgatatatttatgttattatgttcaccccgtttgagcctgaagcctaagcgtctactttctttccaacgaagtaaagcacaataccgataatagtgccgccgataccgcagtatcttgaggtatttaccatagccgtaaagttgctcagaagcccgcttccgtaagtttcaaggtaatatgcaggacctgtatctccctcataccacgctataacgaatgagcctgcaaacatcagcagaccgaatatgatgaagaatactccgaatctccacaggtcgccctttgccagttttgtcttaggattgataggatagttctccggatcgtccttgtaaagtccgccgtacagcagtttgaatattacatagaaaactatacccgacagaattaccaggaatcccagcaggaagaattctgtaccgtttaccatcattccgatgaagcctacaacgaataagcttacgattacataaatctctactgccttgccgccttttgcataccatactgttctgtcctttacaggatatttttttctcatcttcaggaatgcaaatccaaggcctacataaagtacaaacagtacaggtgagattattgatactatcattgagaagtcaaagtttacaaatatgatagtaactgctgccagtatcagtataggccagtaaggcatcttgctctttttagtcagctttgtcaggaagttagggcagaggttgtcttccgcaagtaccataaacagtcttgaaccgctggcaattactgagtttacaattgcgcactgagctatgattgcaacaatcataaaggctatgccaaagccgcttccgatgttctgagtcagaaccgatgaatagtttaatgttgagccgccaacgtctgaaccccattcagtccagttgcctattgatgcaattcctgcaattgtaggaagcacgtagcttaatgtaatcattacaattgagattttcattcctttaggaattacttcagggtttgcgatttcaccgcccagattggatatctgaatatatccgcagaacatccagatgcctatgcaaagtcctgtgccaagacttccaacgaagctctgtccttcaggtgtaaacggtgtcatagggttatagttccagtttgcaaagcctacaacagttacaagaccaaaagcaattaaaattatgattgtgaaaatagtgctgatgatgcttacttctttcagtcctataaggtttactgctgttaaaactactactatgcctaccttaataataagtgatgccacaggtgtaagcggtataaatttgtcaatatagcctactgcaagtactacatatgatgcctgtcccagatagattgccagcatcagccaccagttcatgcagaagccccacatttctccgtaggccatcttcatccatacatacgggcctgcatctacaggagctattgctccaagctctgctgtataaacaccgataggcgctgcccacaaaacaggaattaatacgagtaatatgattgtaagtcccggacctgagcttggtatcatttcttcaataccaaacgcaccgcctgcgcacatacaatagataagaaaagcaattcccattaccgagaacttattcttgtgcatttgcgacgagctctttaaagttacgtcattgttctgattgttgctcatttttttctcccttcatataaaatatattattaaatacgagctgctgttttagcagctgtatttaacatcaccgtttacaatagtcataaggacttttgtatctttaatctgatccgacggaacatcaagcaggtttctgtcaagaacaactatatctgcaatcattccctcgcccagcgtaccaagctggttttcaagaccctcaccataggctgctccgtatgtatatatctcaagcagttcttctattgtcagcttttcctgcggattccagccgccctcaggtgtgccgtcgtcgtggagtctttcaagtccggaataaatacctgcaaacgggcttccctcaacaaccgggcagtcactgccgcctgcaagaaccgcgcctgtatccagaagctgtctgaatacccatgtgtatttagttctttcaggtcctaaaatttcaggataattattatcagcgaatgaaggcattcccgataccacgtgttcaggctgtaccgaggccataatgcctgcctttgcaaatctctctatatccgccgggtctataacctctatatgttccacctgatgtcttgaagtacctctgccatgtctgattatggcgttttcgtagccgtcaagggctgcccttactgccgcatctccgcaggcgtgaagtcttaccgacataccgtgcagatgcgctgcctctatggcatcatttaatttgtcaaggtcaagaagcgctccgcctttttcgcccggtcgatcgctgtaatcttcaagcatcattgctgtatgatttcccggaactccgtctacaaactgcttgaggaaaggaattctgtaaaagccgtttccttctgcttctgcttttgctcttttggctgtaacgtctttaatgtccgcaaacagatcaagcgccgcatttattcttatcttcagcttgtcctcttttgccatcttgagatatgcgttcatgtatgacaggtctatgcccaggtaaggcgtcatgtccgtaattgaagtaataccgtatctcaatgccttttccatataggtgcttaccagttcttcaacctgctcgtccgtaaagtcaaaggcaattcttgcagctattgaaagcgctgtttcgtacaggaagcctgtggcctcaccgttttcgtctctctggatttccccgtagtcagggtcgggagtttcatttgtaattcccgcaatctcaagcgccgcagtgtttacccatgccgaatgaagctcatcgtccataagcattacaggtctgtcgcttattactgcatcgatgctttttttatttggaagtcctttgaatgcgtatttgctccagccaatccctataatccatttgtcatcagggtgcgcatcggcatattcctttgccattgccactgcttcctcttctgttctggcgctgtacagatcggcatatttgctgagcattcccgcctgaagcagatgcacatggttgtcatgtattcccggcataatcagccggtcttttgtaaattcatataccttggtgtcaggacctgtgaaatcggcgtcctcgccctctttaccaataccgacaattctgccgccctttacagcaacgaaattgatgtcctttactctgtagcctgcatcttttcttccgtaaaaaaatgtggcgcccttgagtatcatatcagccttgcattgtatcatacagcatactcctttcgatttttaaaatttaatatgtgcttttgctgcgttgatttctccccgcaacataataaagcttataccaatttttcagcaatatatatgtcttacttgtcgagttttttgtttttgtgtgatttttagctgtatattttaattttaaagctgtatttctttgttttatgttatcaaaaatcgcaactaaggcctgtttttgtgccgacagtatttttttgcttaattccgtttttatctccaaaaccgtaaatctgttatacaaacccagtttaaagctgcgtttttaagcctgttacacaataaatttgttttctcgttcaggctttttcaaattgaaataaatattctgttaatatataatggatatgcgatgacaacaaaaacagttatctggcattttcgaaagaaaggatatgtttgtatgctcaaaaaaatagattacgaggacgggttgcccgtaaagctggaggtctgcaccataggccagtatccgtggcatacccataatgatattcagatagtgtatgtacttgagggagagattgaaatcaaaatagcctatgcccgctatacccttgtcaaaaacaatattcatttcattcacaatgatgacgttcacggcttcaagggacttaccaaaaacaatctggtgctgttcataagctttaatatggaatactttctagagtttttccctgaccttaacactcaggtattcaccaccaaggtgggcgagaatgtaatcacctacaaaaaacatctggcaatcaaggctcatattttctctataatatccgagctgtattcaaaaggcatcagatacagagaaaacatacaggagatttcaagagatttaatatcggatctttatgccaatttcaggggcttcactctggatctgtccagcagaacctttgagcacaaggtgccccacgatatgcttcagatagacagaataggcagagtcgtaagctatatatataagaattatccctacaagctcaatctgtcggagattgccaaggcggagaatataaacagctattatctgtcgcatctgttccagcagtttataggagacagcttcagaaattttgtaagcatggcaaggtgtgaaatgtcagaggcagagcttctgtctacagatgtttcaatcactcagatttctcagaatgtgggcttttcaaatcttaaatactatacggacaggttcagggaatggttcggctgctctccaaaagaatacagacagctttacagaggcgagatactgggaaacgcaaggacagatgttaaattcctgcccctcaatactatagataataccatcagaacagactacggagagctgcctgtatttacgggagcttccagcagggttatgtccgccagcgttaatttcgcaagatttgaaaaccacgaggcagctttaaagaggcttcctcatatgtcctctgaaataggcaaaatgtacagggattacgatgctcatgcggactgcatcgcatttctcaaggaggcatttaaaaatccgctagctataaatccgctgatttcaaggtgctccctgtatgacagcgccgaaaatcctcacgggctgtttacctacaacgggctcaagaagcctctttactacctgtgtgagttcctaaaatcccagcatgagtttcttgtaaagcataccggctggtatatgattacttccgataccagagatattcagctcctgttttttaatgatgatgacgaaaacgagcaggactttgagttcaactttttcgatgctccgggtgcttatcagatgagaatttcaagaatgaacagagaaaattcgtgtataacgctgtggaagcagttaaatttcaaaccggatctaaccgctatagataaagagagcattgaaacaatctccgctcccgctatgagtatgaagcttcttaacacctcaggaagttttacatataacgagacgctcgctcccaatgaaatagtgtttgttcagatgagactgcttgagaaaaattaacacgttaatgattaaaagctgcccgcagtgagcagcttttaatttcttatcagttacagagcttttttgttttcctcaacaaatctttttatctttttggacgtatttttctcaaattcgtgatgtctgagatttatttttttaatcatcttgtaccctggattttcatcattaattttgtcaaccagtgaccacagatatttttcgacctctttgtcatcatcggccttatcgccgagagtttctttaatcaaagcccagtcaggatatatgcctgcaacaataagagtatcgtctttgccctcggcatctccctcaaataccatagactctgtgatttcagggaacagcgacagctggtattccagctcttcaggaaatacgttcttgccgtttttggtaataatgacgtttttctttctgcccgttattacaatatatccctcaccatctatatatccgagatcgcctgtatggaaccagccgtctctgattacctcggcagtagcctcaggatttctgtaatatcccagcatgatattatcacccttaaggcatatttctcctattccgtttggcgcagggtctgcaattttagcatcaaaacccggaagcgctatgccgcatgaatagctctttggtttgttttcaggattaagcgctcccataggcgcagcttccgacagcccatagccctgcagcgccataattccaaaggcctgcaggtcctctaaaatttcaggatttacggcagctcctccgcatatcatcattctcattcttccgccaaaggtatttttaatttctttaaagaacacatctgtaaggtttaatcgcacctttcctgccgctctgcatactttcattatctttcttacggctttttccttgcccttggcccttatattcttccatatagccttgtacagcgcttcaaacacggcaggaaccgccagcaggaatgtgggcttgacctcctgtatattccttattatatacttgagtccctcgcagtgcgctatggcgcttcccttgtagagaggcatgaggaaatcgcaggtacattcaaaagtatgatgtatcggcagcaccgagaagaaaatatcgctcggtttaaccttgagcagcgcaggcgcaaccataaggtctgcgacaatgtttctgtgagacagcataatgccctttgccatacctgtagtgcccgatgtgaatattattacgctcatttcgctgctgtctatctgcgcgtcaagaaagcgtctgtcaccctgctctatgagcttcctgccctctgtaacaagttcgcgctgtgatattattccttctgcagactcttttctgtcctgtgaaatcagaagctcaaggcctgtatcgccctcctccatcatcttcacaaaggttgcttctctttttttatcgaaaataacggctgaacattccgcctcatttataaggtgcttgagctcattgtatgaaagctccttatcaagagggacaaccacacctgtgccgcacacaactgacagatatcctatactccacatatagtttgtctctccgattacggcaattcttcgctctttcatgccgcgcgctataagggcggtacccatactgttgacatcatcaaacatttctctgtgcgtgattgttgtgtatggtcccttttcaaatttggtataaaaagcaataccgtccccgtaaagctcggcgcttgactcaagcatctgctttatatttattataggtctgttatcaaaatgctggactccgggccttttatcatcaagctggcactgtataatgcctttggcccattcccagtccttttcctgcatacgcatatattcttcatgtgaaaccggcttcatatctcttctccttttgttttatttcattaaaagctgccctttcttcagagcagctttcagatttttgtcagttataaggcttttttgttgtcttcaataaatcttcttatctttcttgaagtgtttttttcaaattcatgatgtctcagattgagtttttttatcattttgtagcccgggttctctgcgttgactttgtcaatcagagtccacagatatttttcgacttcactgtcgtcatcagccttatcaccgagaatatccttcatcacagcccagtcaggatatatacctgcaactataagggtgtcgctcttaccctctgcctctccttcaaataccattgattctgcaatttcatcaaatagtgagagctggtattccagttcttcagggaatacattcttgccgttcttggtaataattacgttcttcttcctgccggtgattactatatatccctcatcgtctatatatccgagatctcccgtatagaaccagccgtctctgataacctcagccgtagcttcggggttcttgtaatatcccagcataatattgtcgcctttgagacagatttcgcctataccgtctgcgcccggatctgcaattttggcatcaaatcccggaaatgctataccgcaggagttgctcttaggcttgttttcgggatttaacgctcccataggtgcagcctctgacagtccgtagccctgaagcgccataattccaaaggcctgaagatcctctaaaatctccggattgatagctgcgccgccgcatatcatcattctcattctgccgcccagtgtctgtttgatttccttgaagaatacgttggtaagatctatgccgactttctttgcggccttgcatatcttcatcgcttttcttacggttttttctttgcctttggctctgatacccttccatattgccttgtgcagcgcctcaaatattgcaggaaccgccagcaggaatgtagggtgaacctcctgtatgttcttaactatatatttaagtccctcgcagtgcgcaatggctccgcccttgtaaagcggcattatgaagttgcatgtacactcgaaagtgtgatgtatcggaagtaccgagaagaaaatatcgcttggcaggaagtcaaccagcgtcggtgataccataaggtctgcggcaatgtttctgtgggacagcataatgccctttgccataccggttgtacccgatgtgaatattattatgctcatttcctggctgtctatctgcgcgtcaagaaagcttctgtcgccctgttctatgagctttttcccctctgcaataagctcccactgggatacaattccgtctgcggactctcttctgtcctgtgaaatcagaagttcaaggcctgtttccccctcttccatcatcttcacaaatgtagcttctctttttttatcaaatattattgccgaacactcagcctcgtttataaggtttttgagttcattgtaggaaagctccttgtcaagaggtacaacaatacctgtaccgcagacagtacccagataacctatgccccacatatatgtggtttctccgattacggcaattctcttgtctttcataccgtgagcgataagggctgtacccattccgtttacgtcattaaacacttctctgtgagtaattgtagtgtaaggtcccttttcaaatttggtataaaatgcaataccgtcaccgtaaagctcggcgcttgactcaagcatctgcttgatgttgattataggtctgttggtaaggtgctgtacgcccggtcttttgtcgtcaatctggcactgtatgagcgctttggcccactcccagtcctttgcctgcatagccttgtattcttcctgtgaaactggcttcatattcgttctccttttatctgttattttttatgattagcattctccattgtgtctatacaatcttcaaacatctgattaagtctgcagaagcccttgtaaagcacctgcttctcctcgtctgtaaattcttcacatatccggctgatggcattatctctgtgagaagtctgcaatgctgtaacaagtctgccttttcttgtcagcgatacaattgtacttctttcatcagctttatctgtttttctcctgacgtaatcaaaggtttcaagttttttaatcagagccgttgcagatggtcttgaaattttaagatagtccgcaatctcgctgat

SEQ ID NO: 2211 - DNA, 19308 bp, Unknown
  16S sequences of unknown bacteria
cagcctcgaagaggcgattttgcgaatgtggctctgaataggtaaggtgcaggtttagaatcgtagcacgcaactataaaaaaacactggattttttacagcaggtagactaatataaacgtatacttgcgaggaaaacatagcaggaagcgtggtgaagcaccgaatggcatatgtatatatggtgcgatgtaaggacgattcgttgtataccgggattgcgaaggacctggggcatcggatgaacgagcactattataagaagaaaaacggtgcaaaatacacgaagagccgacagatccagactttggagatggtatgggagacagaggactggtcgctggcggcgagaattgaatatcggatcaagcgactgggcagagagcggaaattagaactcctgcagcagccggagcggcttttggaatatatttctctggaagatacagactcagaaaaatgccggccgcaccccgactggaagctggagatgtttatcggtcaatagaatctcggagcaggaagtaacggcagatagatctggaattcgcttccttttccgacagtggaattcagatggatcgtaccgccatgagccacaacgatacggcgcacaatggcaagacccagaccggttccatgttccttgtgtgtgacgaagggctggaagatggattcctgatcctcaggagggatgccgcagccattgtcacggactgccagcagcatccgtttgttgtgggtgaagatcttcaatgtgatccggccccgttcctcaatggagtcgatggcgttggtgagcagattgataaatacctgtttcaggcggacaggatctgcataaaaatcagggtaagtgttatcaagcttcaacagcagtggaatgtggtgagccagcagctcgggaaggagcgtatccttcaggtcacaggcaaattccacagggtcgatcttgcagatattcagtttgtctccgttattaaacgcagagatatcatcgagaaggacccgcatatattgcaggtcattttttatctggtcccagaattcaaaatgctctacttccggatgcattttctggatccactgtaccgaactgtcgatataggtcagcggattgcggatctcatgagagatctgcgacagagccatgtggtaatcgtcgcgaagtgcggtgatcagtttctgcgcattttcatcttttgcgaccagacgttcaattttttcctgttcttcgtatgtcatcatagtatcactccctgaatcagaatatagcagacatgtcaaaaaatggcaataaaattcgttcgacaaatgtcgacaaacaatgccattttatatagaaaagaaattataaaatttctttagaaagaacagaaaggatgttaggaaatgaaagactgtaattgtattttttgtaagatcgccaatggtgagattccgtccaccacactttatgaggatgaggactttcgtgtgatcctggatctgggtccggctacaagaggacatgcgcttctgctgccgaagaatcattttgcaaatctgtttgaactggatgatgagactgcacagaaggcaattctggtggcaaagaaaatggctggcaagatgaaggctgcgctgggagcagacggatttaatctggtacagaacaacggagaggctgccggtcagactgtatttcatttccatatgcatctgatcccgcgttatgagaatgacaatgctggtattctgtgggagccgggggagaccacgccagaggacatggctgaggtaaaacgtctggtggacggagagtaacggggatattagtagcgtgtataagaatgaaaaggatcggcgtcttacggaatcctttgtaaaatatggtacagtgatcttaaagcattgctgtgactacctgaaagataagcatgaggcagaggatgttcttcaggaaactttttataaattcggcgaaaactatgagaaggttcctgaagagaagaccagaacatggctgctggtgacagcgtcccatcagtgtctggatctgatgaagaagagtggaaggaagcgcacggttgtgggacttccggtgccggatgtggaagatctgatcgatcccattgatctgtcggatctgtttgtatcaagagaaaacatgacggaacaccttctggtgctggaacagcttcgggaggtgaatcccacatgatatcaggttattgtgttcagtacggtgtatgatctggacaacaatacgataggtgagctgctgggtcagaaaccggagctgatcagtaaatggaaaagccgtggaagagcatggctgcgaaagcggtacaaggaacagtacccaaatggataacataaaaaggaagttaccttaagcggtaacttcctcaagaagctgtaagatctttccaatggcatcggactgaggggatgcttccatggcatgaatataatctgcccggtgagtattcaattcagagactgcatggagaagactctctgttgtcagttcttcttcctccagaaccatggagaagccctgacgttcgaaggaacgggcattcagaatctgatcgccgcggcttgccttggcagagagcgggatcagaagagtcggcttcttcaatgccagaagctcgcagattgcattggctccggctctggagatgaccagatcgcacagggcaaagagatcaggcagctctttctgcacatattcgaactgcagatagcctggagtgcctttcagagattcgtccagttttcccttgccgcacagatggatgatctgccagtctttcagaagttcaggcagtgcatcgcggactgctttgttcactgcggtagcaccaagacttccgcccatgaccatcagaactggtctgtcagcggaaaatccagtgagcttcagggctgcttcgcggcttccttcagaaagctctttacggatgggacagccggtgaggactgctttcttcggtggaagatattgcagagtctccgggaagttgcagcataccttggcagcagacggcatggtcagcttgttggcaagacccggcgttaagtcggattcatggcagatgaccggaatatgcttgcgtcctgcagcgatcacgacaggaacggatacgaagccgcctttggaaaatacaacatcaggttttaactgtttcatcaggtgcattgcctgggtgaaacctttgatcacacggaacggatccgtgaaattttttaaatcaaaataccgccggagcttgccggtggcaataccatagtaagggatgccctgggcttcgatcagctttttctccattccatcaacggaaccgatgtagaaaacttcgtagccggcatctttcagacgggggagcagcgcaatattcggggtcacatgaccagcagtgccgcctccggtaagaataattcgtttcataaaaataccctccctgtgtaggaaatatcagaagtctgtaattattatatgtgatgggtgggaaaagtcaagaatagcgcgatgggagatatacgatgaatcacgacagcgaaaaatggctggatgaccggatcagcgaagacgtggaccgtatggccgataaacgaataaaagaactcatggaatcagaagagttaaaagatatagaagcaaccatggaccagctgcagagtatccgaaagcgactgggacttgtcgatgcagaagatgaacatgacatggagattgccagggagctgatgccggaagtgccgacgggcagtcatgtaaaggtagtttctgaagaagcgacgacgagtgaagcagctgctgcaaaagcagaagatgtggcatccgacgatgagagtaacgatgcgggtaacgtggtggagatccgtgcaactgagacatctacagcatcgaatcatgcgaaaactgtccgtcgtccgcatattcgcctgcgcgctgcccttgctgcagccttggtggcaattcttgcactgggagttggtatggtcggctccggtaaaaaagtgtatctgccggtggtgagccagagagaagatggggatgaaagtactacgaaggtgaataatagtgaggagggtatagcaagaagctattcagaggaagaagtttgtcaggagattgaggatcagctgggggtgttgccggttaggtttggatatcgacctagagatatgatcttacaggagtattggattaaggatgatcaggatgcgattttaagatatgcgtatggagcaaaacgattacatgtctatatcagtaaagactatgatgaatccagtattaattttaaggtggatggtgtcttaaaagatacggttcaagcagaagcaatgtctatagaagtgccggtatatgagtatgaggattcccagggaaatgtatatatgcagtcctcttttgagtatttgaatacttattattcaatttcaggaatgtttgaactggaagaatttgaaaaaatattggagaatatttggataaaaaatgcataaaggtgtcaaaaaataaaagtaatctcgttatatatatgtaggcctacaaaaagatacagaaaggaggagaccattggttaagagacaacttgcaatacttcttgcaggcatcggtatattgactgttggcatcagtactccggtatttgcagaagaatatgaaccggcaggctatcatgtatatgatgtacaggaagaggaagccactgatacctggtatggaatagccagaggcgattatcttcaggcaggaattgcaaaggtaaagaagggcagtaagtctggatatgcgaaggcttccggaagtacgttggcacattatgattgtgatcggttgtatgttcgcgtatatcttgacgagagtgagaatggtacagatggatggtggacattgaattattggacggcaaatgcctatgataattcagttgtaactgttagtagtggtgactataagattacgaaaggtgattactatagtgtgacaggtgtgcattctgttttccaggatgatatcgtggagacgacaggaacttgcacagatgccattccgatcaactaagcaccacaaacaaacttacaagatttccgaccacctataaccccattgctgcaaccgcctacacgcagcagcgaatgtctggttgctggtgcatttccccgaatgtgcaggcagacggacagatggatcggtgagagatcagtcactcgtagaccggcagatatgagaacttcgatggaagacgcgcgagccggaggagaacttatcatccgcctaggcaccgcggacgcagcccgctttgatgtgcgttcgtgacaactgaataaagaaaacaatagaataacgtaaaagtaaaatcatccaaatacaaaacatttacaggcaaacaaattgagagaggataccggcgccttcagcaagcgtcggaatatcctctctctctttatgccgtcatgtcatgctcagaccatgaccagttgatccggttaagctgcggtcaggattactgctgcgctttgatctctttcagcgctttggcaagctgatccggacaggaagttggtttgaagccacaggtggttccttccagtctggcaattacatcgtctactttcatgccagctaccagctgcgcgattcctttggtatttccattgcatccgcccacgaactgaacagattttaccgtatcgccgtcaacttctacttcaattgcctgtgaacagacaccttttgttttgtaaatcatcagaattcctccttgtaaaatagaactacggacatagtatagcagatatgtgtcaaaatgaccacactgtgatatttataattgcttaaacattcgaaggaacctttccggcaacaatagctgccacatctttaatgttcatatcaattgccctggcaatctgttcaactgaaaatccatttttcagcatcgtgagaatgatatttgtacgctcttcctctctgattccctgacttaaattacacataaaatcctctctgtatctctacttgttggaaatatttgtttcgaatggaaacaagatatactgatatatgaaacattaaatctgtaataaggataacacagaaagtatagataaagcaagcataaaattcctattcccccaactctgaatttgtgttatattcttaatcagaatcgtcataataactggttattttgttacaaaggagaaagaaaataaaatgataaagaaaatcggtattatcggagcaatggaggaagaagtggaggcacttcgtggaaagctgacttatgtgaagacgaccagccgtgcgtctatggatttttatgcaggaaagatgggcaataaagaagtggtgatcgttcgtagcggaatcggcaaggtcaatgcgggtatctgtacccagatcctggcagatctgtttcaggtggatgcagtgatcaatacaggtattgcagggtctctgaaagcagagatcaacatcggagatatcgtagtatcgacagatgcaattcagcatgatatggacgcgaccggatttggttatgagccgggtgtgatcccgaggatgccggtgagctgctttgaggcagataagagactggtgaaagcagcagaggacgcatgcaaggaagccgttccggaggttggcgtatttgccggaagaatcgtcagcggagatcagttcatctctgaccgtcaggtgaagaaccgcattacggcacagtttggtggcatgtgcactgagatggaaggagcagccattgcacaggcagcatatctgaactccattccgtttgtgatcatccgtgctatttctgataaagcagatgacagtgcaaccgtagactatccgacctttgagcgccaggcgattgcgcatagtgtggcactggtagagaattttgtagcacgtctgtaatggggcagtatattcagaataagatgacgaggggcgacagggcagcagtcctgtcagaatccgtcgataacatcgccttcccggctgatcggtgtctggtataatagagccagatccgaaaagtcaggggaggcgttttttatgcgagaatttttttcaatgggagtggtcgtatctgctcttgaattattacagaacggaggcgaatttatactgctggggatctggggaatcctgttggcagtatgtagacgcagagtatttcgaagtgtatgccgggaggcggcacttgagggaggcgagaaggggcgcatgcttcgggcgatgacgctgaaattccagaaaagttatgaagtgcatgtggaggtcagcgaccgtgatacttttgtgcggaaatatatctgtcaggaaaagcggatgagggtgtcgctgcccagatggagatatcttccggagcgccttgcaggaatcattctttgtgtgggagcagtcgaggtggcactgctggactggctaggatatggacagggacttacgtggcagcgggggacgatggcactgggatctgcagcagttgtattgggactggcacttttgctggaagtagacagcctgtgggagcagatccacattttgcttctggactatgtatccaacacgctgtatccgaggcagatccatgtgtatgaagcatttgaggaagagacagatgcggcgaactcctttgccaaaggaatcaaggggcagcgcagtgaaaaagagaaactggcagatgggcaggtcaatgatgaggcacagaagactgcccaaaagaatgccacagctattccattaactctcaaaaaagaagaagaaaaaatatttcaggaagttctgtcagactttctgggataaaatggggcgtgatcgacagcttcgccgtcacgcctgctcagtgatagggccttctggtaaaggggtcctcttccagctcctgctgtgctcgtcttcgtgtcttatcaatggcagcttcatagccggtgagtgcggcaaatggggagaattgagcagcccgttcttctaatgtcatatgtggatggatgcgggaaacgtgatgcggcaggttgataatatcttcataagtatccgaaggatcgttcatgctttgtgacctccaatctggttatttcgttccatagtggtggcgccgtcttccagatctgtacctcgcaagatcgcattttttccatatcggtctttgatggccagcatggcagtctgaaggcggcgttcccgttctctggaagcttccttttgtattttctcagcttcttccttggatggatcagagaacaggcttaattgttcataggtttcttcctttttgacctgattctcaggtatcacatgatcggcacttaagttcaggcggcggatcagcagagcaggcgatgtgatccgatcataaagtgtcatggcggcttcaatgatctcggcagaggaagaggtaaaatcagccagatgaatggtgccatggccgtgcttgggaacttttcttccgtaccggtccgtagtcacttctccgtggtaagcggatcttcgcgcaggatcagacaggttatcaatatcatagccgatcgtcagtacaagctgatctgtcacaaaatgtctggagaagagatccagggacagagcatctgccatctcacggacgacgatccgggctttttcataggtgtatgggtattgcagcacctgaccggatccaaggcttgaggattccggtcggtaagctttgatggcttcgatagtacaaggttcccatccccaggcatggtcaataagaagctccgcattgacgccgaagagcttgtacagcagatcttcattataaaaatccgagctggcaccggtggagcagcgagccacatctcccatggtgtacatgccatattgagccagctttttcgcatagccaggacccactcgccagaaatccgtgatcggacggtggttccatagctgtcttcgataggatgcttcatcaagatgagcaatgcgtactccatctctatctgcaggcacatgctttgccatcagatccatggcgatcttacacagatacagattgggtgcaattcctgccgtggcggtgatcccggtattgcgtaatacttccaggatcatctttttcaccagttcatcaggagtcagatgatacataggaagataatcggtcagatcaagaaagacctcatcaatggagtacacatggatatcttccggcgcaatgaactgaaggtagcagttatagattttggaactgacttcaatatagcgggccatgcggggtggtgcgacgatatagtcgatggacagggagggatccagcgctaacgcagccgcatcggaggaactgcccgaaaaggttctgcccggtacatgagtaagccgttcaatattcacttcacgaacccgctggaccacttcaaacaggcgggcgcggccggagatgccgtgggatttcagagaaggagacactgccagacagatggttttttctgtacggctcttatccgccaccaccagattggtggtcagaggatcaagtccccggtccatgcattccacggatgcataaaatgatttcagatcaatggctgcatagagccgttctttggaagaagctgtatgtgctgtcatggatggtgcctcctttcctgttaagcatggatttagagttaaaatcttttttatattatagaataagaacatatgttcgtcaacagggatttatttactgttcacacagcagccagacacttgctgtcaggctgcgtaaaaacatgattcaggagtgagcaggctccttttgcgaagcaaaactttaaatgagcctgcgaatcgttactggaacgaggtacgagtgaacagtaacgaaatatgtaccgaactacttgttttcaaacttagagaatgataatatagacatgtgttaacagcaataagatgcggcaaaaatatagtattgttgaagaggagaaataacatggcaaaagtaacatttgactattccagaactgcacagttcatcagcaaagaagaagtcgagaacagcaaagttctggcagaggcagcaaaaaaagtactggttgaaaagaccggagcaggaaatgatttccttggctggatcgatcttccggtagattatgataaggaagagtttgcaagaatccagaaagcagcagctaagatccagagtgattctgaggtgcttctggtgatcggtatcggcggatcttatctgggagcacgcgcagctatcgaatttttaagacacagcttctacaacagtgtatccaaagaagttcgtaagactccggagatctattttgtaggaaacagcctttccacccgctatatcaaagatctgatggatgtgatcggtgatcgtgatttttccatcaatatgatctccaaatccggaactacaacggagccggcgatcgcattccgcgtatttaaggaaatgctggagaagaaatacggcaaagccgaggctgcaaagagaatctatgcaaccactgataaagcaagaggagctctgaaacacgtagctgacgaggaaggctatgagacttttgtagtaccggatgatgtaggaggccgtttctccgttctgaccgcagtaggtcttctgccgattgcagtcagcggtgctgatattaccaagttgatggaaggtgcagcaagtggccgtgagctggcactgaatactccgtttgaggagaatgacgctgtgaaatacgcagtgatccgcaacattctgcatcagaagggcaaagcagtggaagttctggcaaactatgagccgagtcttcattatgtatctgagtggtggaaacagctctacggcgagtctgaaggtaaagatcagaagggtattttcccggcatcagtagatctgacagcagaccttcattctatgggtcagttcattcaggatggttccagaatcatgtatgagaccgttctggaagtagagacctgtgaggatgagatcgtgatgggcgaggaagctgttgatcttgacggactgaactatctggcaggaaagaacgttgattttgtaaataagagtgctatgaacggtactattctggctcatacagatggaaatgtaccgaaccttctggtgaagattccggcacaggacgagttctcccttggacagctgttctatttcttcgagttcgcatgcggtgtcagcggatacatgctgggtgtgaatccgtttaaccagccgggtgttgagagctacaagaaaaatatgtttgctctgcttggaaaaccaggttatgaggctcagagagaagaacttctgaagagactgtaagaatgaaaaaatataagatcatatacgacgaccaggatctcctggtcgtctgtaagtttgcgggacttgcagtgcaaagtgcccgtgtgtccacaccggatctgatgagccttcttcgcaacgagatgctggagcgaggagagaaaaagccttatcttggtctggtgaaccggctggatcagcctgtggaaggaatcgttctgatcgggaaaaatgaaaaggcagcggcagatttaagtcgtcaggtgacggatcatatccacatggaaaagtggtatcagacggtagtctgtggaaaactggagcagagagaagatacacttgtggattatttgctgaaggacagtcgaaccaatacatccaaagtggtcaaagagggaaccccgggcagcaaacgaagcgaacttcactatgaggtgctcgcatcagatggagagaagacacttctgaggatccgtcttctgacgggacggcatcatcagatccgggtacagttgtcgcatgcgggtctgcttatctgtggagatgccaaatatggaaaagcaggtggaccgctttgtctgtgtgcatataaggttatcttttctcatccccgcaccgggaagcggatggagtttgaagtgaatcccacatttccagttccgtccacagctctttgacaaagaggatgccaaagggaccggtgaacagaccggcagcaccgaacaattttaatccgacgatcacggagatcagaaaacagacgggtaaaagtcccaaaccatcgcctaagagtttgggttccagcaattcccgcgtcagccatgtgatcccgtaaagaaggagaagccatacaaaaaaggtgtagtctttctgacagaagacaaggatcagccaggggacgaagatggtgccggtgccgaagacaggaagtgcatccaccataccggtaagcaccgcccacagtcctgcaccggggatgtgtaagagccagtatccgacagtacattccaggacaatgacaaacataatacgaatctgcgcatgcgcccagccctttaaggactgggcgattcgtttacctgcgtgttcaagcggcctggcaaagggaaggtgtgtcagcaggcattgaaaatccggccagtcgtgggcaaagaggatcacagccataaaatataaaaagatgccaaatgcacaggataacacaggcggtacggcggtggacagatgaagagacagggaggaaggaatccagtctgccagatcagcatattcattgatccatgtctgcagctgcgtctgaagctccgggatcaggtctttacatggctccagcagaagccatccggtgagcttgagtgtggtggctgtgaaaaagaaaaacatggcaacgacggaagcagtaaagggcagcagttttctgtgaaagtgccgggaagcagatgccagcaatgaaactgtcagccaggcaagaaaaaaaggaaataccagcggaagcaggtatttcagtaatagatagacagccagcagaatgccggtcttttctatataaagttttatccggtgatccataagcgtggcctccttgtgattttgcgctgtataaaatgcgtggaatctgtgttatcgcatttgctatatgaaaagtatctgccatggagaagaaactatgtctgagaagagttggaaatggcgataaaaattcccggatctgtaaaaagatccggggaatataaacagaagattattttataagatgttcggttttcaaccattcctgatattcgtccagcctttggataaatccactgaattcagggactgtaaaatcaagttccttgtatttcacagagtagataatacctttgctgattaactgcgctctggcagtggagatggagccgactggttttttcataatttttgcaatattggatatggtgcacggaagcgttccgcaggccaccatggcaaagatgaatcgccggtcggcatcggaacagcgctcatatcttactttgaaaaagccattgtccaatacctgaaagaagcccgggatgactgcattcacatcgtcaagagtaatgacctgatcagaggcatggtcaaacacaagctggcacaactgctggataaagaagggatagcctttggataattcggtaatcttttctacagcttcagcagagtaagagacatgtaacttctgggcaggaatctcaatggctttcctggattgttctgtgtcaagtgacccgatttctttataaagaaataatcgctcagagtaggatttttcagcagaaagcatggcgtagattttaggaagacctgcaccgattaccataatcggatagccaagctgattggctctgtgaagcgcagcaatcaaagctccaagctctgtgggtttcatgtactgaatttcatcaatgaaaaaacatacaggtgtctcagatttatatgcagcttcgccaagggaagtaaatacatccgtgaggctttgggtcagattggtaattttataaagttctttttcctgcatggaaagggaaaatgtattgtcattgggatcaaaggaaactaccagagatttgatagcatccaatggtttttcaatcagatttttgaatttttctttagtactgattttccgaagaaaggcctgtgaacaggtggcaatctgggaaataaaatcatttctctcttccacttctatatgtttgcagaaaatatttttatcttcagcaagcttctgcaggcggttgatcagtacggtttttccaacaccacgaagaccactgaaaataacagattgggtcgggatatttaaaataagtgcgtcaaaaagatgttcaatacctgtaatatcttcatcacgaccagcaagataagttggcgtcagacctgcgcccggtctgtagggatttactttaaacatacagttcacctccggtaaaattatctcatacagaatcgttttcgtcaactgattagcggtcttggtcggtggttttcgcgataaattccaaataaacataaataactacaaataacttcagattttcattcgttgacaaacatatggtggaatgttatggtttcaacagagagaaaagaggattcaaaatgatgaaaacatttataaaaaaacagcctccagggcgattgatcgctatgggctttgctatggtgatcctgataggaacctgcctgttgctgacaccctggtctgttcgtcagggtgttacggtgaagccggtggatgcattattttcagctaccagtgcggtatgtgtgacgggacttgtgactattgatacggcagatcattttaccgcgtttgggcaggcaatcatgggactgctgatccagatcggaggtctgggagtatcatctgtgggtgtaggccttgtgatcgcagcgggtaaaaaggtcagcttcaagagtcgtactatggccaaggaagcattgaatgtagacaattacaaaggtgtggtgaagctggtgaaagcggtgctctgtatgacgcttggatttgagctggccggtgcacttttgagctttctggttttttcgagagattatccatttctgcatgcggtggggatcagtgtatttcattcagtggcatcctttaacaatgcaggacttgatatcttgggcgggcttcagaatctgataccctatggggatgatgtgttcttgaacattgtgaccagtgcgctggtcatcgtaggtggtattggatttccggtgattctggatgtagccagaaaccgcagttttaagaaattaacactgcattcgaaggtggttctggtgaccagtggaggacttttgcttggcggaacactacttttgaagctgacagatcatcttacctggatgcaggcattttttcacagtatgtcagccagaacggcaggcttttccacctgctccctgggagagttttccaatgcaggattatttgtcattatgatcctcatgtttatcggagcatcttcaggttctaccggaggcggtgtgaagaccagtaccttctttgtgctgctgcaggcgatccgtagtgaattttccaagcggaggacaggcgcatttcacaggagcattcccagagaaaatgtcttccgggcaggaatgctggtaatcacatccatggtgctggtatgtattggcacatttctgatgtgcgtgcttgcacctcaatttgattttgttcagatcatgtttgaagtcgtgtctgctttcagtacggcaggactttccacagggatcacaccggaacttggatttgcggcgaaagtagtattgatcctgatcatgtttactggccgtctgggtgtgatgacgatggtaacgatctgggtgaccagaccggaacggcagacacgttatacggaggaatccgtaatgattggatagaggagaagatgaaaatgaaaaataaacagacagcaggttcttttggagtgatcggccttggccgttttggtaccgcactggcaatcactttgtcagaggcgggcaaggatgtgatcgccattgaccgggacgaagataaagtaaaggcgatccgccagtacacggattatgcatttgtggcagaaaccatcaatatggaaagcctgaaggagacagggatccagaactgtgatgtggtggcggtgtgcataggtgagcagatcgacgcaagcattctgatcaccatgagcgtgctcgagcttggagtgcccaaggtcatctccaaggccatgagcccggaacagggagcagtcctccgcaaaattggagcagaagtcgtttatccggaaaaggatatggcgatccgccttggaaaacgtctgatcagcaacaatttcctagattatattatgctggataacagtgtggagatccgtcagatcctggtgccgaataaactatgcggagagacgatcatgaacagtaatttccgtaaaaagtacgggttgaatattatcgcgatccagaagggccataataccatgatcgagatctcaccggattatcagtttgagccggaggatgtgatcgtggtgatcggaaaaattgaaaatattaaccggctggaacaggaaatgtgaggaaagacagggaatcccggttgacaaacacgggattccttcttattattagaagataatggagtttatacttgcatgaaaaacggctgctgacgagaaggcgcggcggctaaggaaaaggagattgcaaacaatggcaaaagacaagaagttagtagaaggcatcacttccatggacgtggatttcgcccagtggtacaccgatgtcgtgaagaaagcagagctgtgtgattataccagcgtaaagggatgcatggtgatcaaaccggctggctatgcgatctgggagaatattcagaaggagcttgaccgcagattcaaggagacaggagtagagaatgtatatctgccgatgctgatcccggagagtctgcttcagaaagagaaagatcatgtggaaggttttgcaccggaggttgcatgggtaactcatggtggactggagccgctgcaggagcgtatgtgtattcgtccgacttctgagactctgttctgtgatttttatcagaaagaggttcattcctacagagatcttccgaaagtatataatcagtggtgttctgtacttcgttgggagaagacgaccagaccgttccttcgttccagagagttcctgtggcaggaaggacatacggttcatgcaacggaggaagatgcagaggcacgtactcagcagatgctgaatgtatatgctgatttttgcgagcaggtgcttgcaatgccggtgatcaaaggacgcaagacggataaggaaaaatttgcaggagcaactgcaacctatacaattgaggcactgatgcatgacggaaaagcactgcagtcaggtaccagccataacttcggtgatggatttgcacgtgcatttggcattcagtttacggataaagataatcagctgaagtatgtacatcagacttcctggggtgtgactacccgtctgatcggtgcaatcatcatggttcatggtgatgattccggtctggtgctgccgccgcggatcgctccggtacagaccatgatcattccagttgcacagcacaaggaaggtgttcttgacaaagcatatgagctgagagataagctggctcgtcagtttaaggtaaaagttgatgattccgagaaatctccgggatggaaattcgcagagcaggagatcaagggaatcccgacccgtattgagatcggtccgaaggatattgaggcaaatcaggccgtgatcgttcgccgtgataccagagaaaagatcgtggtatccttagatgagatcgagaccaagctgggtgagattcttgagactatgcagcatgatatgctggagaaggcaagagcacacagagattctcatacgtatgatgcaactacttatgaagagttcgtagagactatcaataacaaaccgggatttgtaagagctatgtggtgtggagatcaggcctgtgaggataagatcaaggaagataccaccgctaccagccgctgcatgccgtttgaacagcatcagctgtctgataaatgtgtctgctgtggaagaccggcgaaaaaaatggtatattggggcaaagcatactaagtcgatgcctgtaaaactgtaatttacgtcccggcttctgagaaggaagccgggatgttttgttcacagggaaatacgcagatgcgtgaaattgtgaatattgaaaataaacggaatatgattacaaggagtcagaatgtatagaattgacgttccggaaaaagttgaacatattatagatactttgactgcggcagggcatgaagcctatgcagtcggcggctgtgtgcgcgatgcactgctgggaagagaacctgcagactgggatattaccacatccgcatctccctatgaggtaaaggcattattttccagaaccatcgataccgggatccagcatggaacggtgacggtcatgcttggaaaagaaggattcgaggtgaccacttaccgggtggatggagagtatgaggattgccgtcatcccaaggaagtgcagtttaccaagagtctgctggaggatctgaagcgacgggattttacgatcaatgccatggcctacaatcctgcagaaggattgatcgatgagtttgacggagcaggagatctgaaacgtgggatcattcgctgcgtgggtgatgcggaagcacgttttggagaagatgcgctgcgtatgatgcgtgcggtgcggtttggtgctcagcttggatttgaactggaagaacagaccagagaagctgtaaaaaaactgtgtgaaaaccttcgaaaagtcagtgctgagcggattcagacagagctggtgaagatgttggtgtccccacatcctgaccggatcctggaagcctgggagctgggtatcaccggtgtaatgctgccggagtttgatgcatgtatggcatgtatgcagaataatcctcatcatatggatacggtgggtgagcatattgcaaacgctctgcaatatgtggaaccggagaaggtactgcgcctgagcatgttgctccatgatataggaaaaccgcagacgaagactacagatgccaatggaatcgatcatttttatgggcatgctcaggttggcgaagagctgacagcaaagattctgcgccgcctgaagtttgataatgataccatccgtaatgtgagaagactggtacttcatcacgatgaccggccagccaccacttcatccagcgtgcgccgcgctgccaatcggatcggagcggatctgtttccgctgtatctgaacgtgtgccgggcagatatcttggcacagacaaaagagacacaggaatccaaacttcagaacttgtctaagatcgaatcaatctatgagcagattctggaaaagcagcagtgctttacattgaagcagcttgctgtgactggccgtgacctgatcgcggaaggaatc

SEQ ID NO: 2212 - DNA, 3146 bp, Unknown
  16S sequences of unknown bacteria
ccccgccgtatcggaaattttgcaaaagcccgttttcgacggcgctgccgtcgcccgtcagcatcgcgtagcaaacggcagcctcttcctctctcatggttccgaaaaggacgttccgcagacgttcgcgcgctgcataaaacaaatcgaactttttctcgccgcgtaccatgattttgtcgcccgaaacgctcgccatatatttcgtattttccaaaatcggcgtcacgttaaaacgcccgtacgcggaagaatcgtacggttttaactcgcactcgaacgaaactttcgttccgatccctatttcgtcgggcaacgaattcacgtaaacgcggatattcccgcccagcgccctgacgctgtccccgtcggtgagcatcgcgtcggtcagatacaggctgtttttgcccgcgatatccttgaccgttgcggaaaccgtataagtcccctccgccgcgttgtccgcattgtaagaagaaaggcgcgcggaaaaggacagcgcgcccagacaaaacatgagcagtaaaaatgcggcgaacaggagcgcgggcaaggcgctcttctcctttttacgaaggaacagacaaattgcgcctccgccgccgaccgcaaggagcaagccgatccaaagggcgtgcagagaaaaagcatagcacaaaaatatccccaagccgaaacccgaggatattgcgaggacgggacgaaaattgaataatttgccccgtcctttgagccatccctttcgttcttctttcgtatcgttcatattaacagaaactgatccgatcgctgatggagcggataaagatgcccttttgcacgcccagcatgatgcattggttgataaattcggtaaagcggtcgctcgggcgcgccactttcagttcggtgcacacgagcgcgatcagttcgtcgcaatacagactgactttgttttccaaaagccctttgatgagtgcgatgacctcgtaaggcgtgaaatcttgttcggtcttacggatcggctcgcccgcctcgtagcggtaaaagtcgcagtcgaggcatttatccgtcttgcgcagatacgttttgccgcacagcgtttcccgtttcaattcgcaaagattgatgagattgagcatgcgctcttccactttcgcgccgtatttcaaaacgcccaaagaattcagacaccgcttcatcaaaaattgttcgctgaaaggctcttccgccgaggcgatcgctttgagccgcgccacgatctccgcgtcgttttcgcccgaagtcacaaactgcgccagattgttctgctgttcgagtttggcgtagcggtacgcctttttatatttggtcagatagtcgcgcgtctgcttttccacgcccgttaagcggtcgagaatatccttgatacgcttgatctcgcgcttgggattgttgataaagttaatgctgaacagccgcacgacgttccagttgttgtgtttcaagatctgcgtctgcaagatacagcggtcttttgcgctcgaacggaacgcggtggaaccgtcgcacaatatggcgaggataaatctctttttgttcttgggatcgacgaccgcacagtcgatcttgaattcggaaatacccacgtcgtagcggcattcgtagccgtacgttttcagttcgcgcgcgatatatttgccgatgccgctctttgcgctctgcaattcttccgcgttgagggcgagcgtcgtcttgcccttctgcgcgaattccaaaaaggctttcagtcccgcgacgcccttgctgttggtcttggacaaatctatcatcgccgaggtcatcgacgcgaacacgaccatctcttcgcgggcgcgggacacggccacgttcaaacggcgccaaccgccgacctggttcaaaggtccgaagttaagggagatcctgcccgtacggtcgggaccgtaacagacggagaaaagaatcacgtcgcgctcgtcgccctgtacgttttcgaggtttttgacaaagatgggttcttccctctcaaacgccgcgtcttccaggcggtttttgatgagcgcgtcggatagccgcctttcgatataatcctgctgcgccgtgctgaacgtgacgatgccgatactcgactgcgaaagtttgggatctttcaggcggcggatcacttcgtttacgagcgcgtccgcctcgcccttattccgcttggtaaagcccctgtcgtacacgccgtcctccacgagcgcaagccgcactttgctttcgagcgcgtcgggcgaagggaacgtacataatttagagccgtaatacatgatattggaaaacgcgatcaggctttcgtgtttgctcctgtaatgccaggtaaggtgcttttcgggcatgctcagagcaagacagtcgtcgagaatgctttccagatcttcgttatcgagattttcctcgtccacatagcccgaactgaaaaacgaggtaggcggcaactgtttcggatcgcccacgatgatcgcgctctttgcgcgcgcgagcgcgccgatcgcttcgctcgtcggcaactgcgacgcttcgtcgaaaataacgagatcgaagagatcgggttcgggttcgagatactgcgccacggtgacgggactcatcagcatacagggcgccaaagcggtgagaagttcgggaatatccgcaaagaaacctttcagcgtcatgccgcgcagattgctcttcaaatggcgctggaacgcgagcacttccagactcaacgccccctccgtagaagtggaaggcagtcgggatatgagcgcgcggcggatatgctcccttgcgagttcggaatactgctcgtcgagcgcacggaactgttcgatcttttcctccaaaacgctggaagaaaatttggagagcacggcatccgcgccgatgttggtttctagaaaattacggtatacgtttttgcggaaactatccagaagattatccgaagatatagcgccgctcgcgagcgaatcggtgataaaagtcagccccgcctcgtccagttcgtgcgagatacgcttgaacatgcaccagcccgcgagcatatcgatattgtcgatgagcgcgctcgccttgtcgttgaaataatcgagaagatcttcgtcgtaccacccttcgggatcggcgttgacggcggcggcaaa

SEQ ID NO: 2213 - DNA, 11830 bp, Unknown
  16S sequences of unknown bacteria
ccccggtgcattcttgcgccggggtgctgtttttattcttcacagcaatggccatccggttattgcacctgggccgcgctgcatcagatcaccatatcgatgaccttgtcattttgctccatgggatacttttcgtccatctcatccagataggcgttgtaatcatcattggtcagggcctcttcggcgctggattcccaagtgggacggctgcccacaaagtacatgatgtgatagccatactcggtttccacaatgccggtgtcaccagccttgcgggaagcatccaggcaccagtttttgaaggtatccacaaaattggtgctctcattgatgccagtatacagaccgccctgggaagcgttgctgtcagcagaatgttcccgagccagctgagcgaaggaatcctcggtggcttctccggccttccactcttccagcagggcttcggcctgggccttcacttcattctttgcagcctcgtcgctgccttcctccaccgacagcaggatgtgccgcacatccacgctttcgctgtcgtcacgataacggtcaatgaaatacacaacgctgtaattgctgctgatctccagcacttccacatcgccttccttgcgggaagcatccttcacccagtcgatgacggtgccggaagtggaaagagtggcgccttcggtcagagtgccttcgggcttggagtactgctccacctgatcctcggcggcctgctccttggccatgtcgataaaggactgctcatcggtgacggctgcggcaaaggcatcggccttcgccttggcctccgccttggaagcctcgtcctcggcgtcaaagaacacctggaacacccgataatcggccagatcaaactgatcggcgttttcctcataataggcttccagatcctcggcagtatactccttggcctgggtgttttcgtaataatccttgcccagagcatccttccacaggatctcttcgtattcctccatggtgatggacacgccggtcaccgtctggaggtacttggtctcgctgatatcggactccttggcggcgtccttcacggcctggacattggcgtcgtaattttcctggccttcctggctcatttcatagccattttcggtggcttcgttatacagctcataggacacccggatggtggagtcggtctgccggcggaaatattccccaaaagtcatatcctcggtgtagttggcatcgtccagagtggaagaagtcaagcccatggaggacagataactctcattggaggagaggaaattgctgcgcagcatattgtaataatagctgtattcctgaccggagatcttgctgtcgcccacggtcatggcggtcatatgacgctgcaaagtgccggtggcatacagcaggccgaacaccagaagcaccagcaccaaaatggcggccagaccgcaaagggccttgcgcaggcggcgtttgcccttctgctcctgctgctgggctaccttctgctcctgctcctgaacccgctcttttcgtgatcttgcacctttacccattgaaaacatcctcacttcatcaatttcgccaaaaggcgatgcgcaaatcaaattatagcaaatcctcactggggatttgttacaaacatttaaaattataggggaaagccgctgaaaaatcaagaggcggcaaaaaaatgctggaaaaaagccccggattgtgatatgattgtctgcggagaaatttttctgcaaaattacaaaaaacgcttgcattccaggcacctctgtggtaatataatttgtgcttgtaataatgcaatgaagctgatgcgaggtgagaagtagtgaaagagggcatccatccccagtacaatcggaccacgatcaagtgcgcttgcggcgccgagatcgagacaagctccaccaaggagaacatccatgtggaaatttgcagtaattgccaccccttctttaccggcaagcagaagctggtagatacaggtggacgggttgatcgcttcaagaagaagttcaacatccaggactaaaagagccagatcccccgctgcggcgggggaccgaaaaagaaccgggcctgatcggaacatcgttccatcaggcccggttctttttctcttggcggcgtgttatttcggtccggtgcccggacaggcaaaactttctttgcccgagtgggtttgatttcctggtgcgggagcacaatatggccgtccggccgtccggacctctcggggaaaaactaagtttttccccgacctttttcgcgccccaggcggggttatatgaggggccaagtgcctcagagaatccctggtgaggcagcatgccgctggaccacaacccacagagcctgggaaagttatacctggggagacactccgccactgcttaaaaaataaatgacctttttcagcaccggctgctgccataccttttcataggcccgggcgtaaatatccagttggggcgcatagcgggcggcgtggacctcttcctctcccgggttcacccggtcgcttttgaaatccagaataatggccccctccggggtctgaatcaccagatccatcaccccgttcatcagaatctcttcttcctcttcctcccccagtcccagttccttgggtgagaaaagggcggaaaactgatactcccgcaagcaagggttctcccgggccagctttccccattgggagcaggcaaaatcggaaatggcccccaccggcacccggtccaggttctccccttgcagcggaccctcttgcagccgccgcagctcctgggctgccccttccggggtcaggcagttttccagctgcaccagctgcatacaccggtggatcagggttccccggctcatggcctgctcccgggtctggccctggtacagccggatacgggcttcctgccgccgccactccagccgtggagtgtcctccatggtcaccagagcggtgggggtcagcttggagggcagacggctctccttttcatagggatattgaaaggcctgcatggcccgatacagggccagatcgggcaaaggctcccgctcttgcttttctgtctcggcctgctgggtatccacctctaataccgccgggtcatagggctgcacatggcaaatcagttcttctttctctccggaaagggggaagtccatggcccccaggccgccataggcccgcagttcctctgcccctttgtggcaaaggagcggggcgcccaccagcagagccgcactgccttgcccggcgcactccctccagggcaatttgtccccctccagagcccccgcccactggcggatggccgaaacggcatcgggcagggacaaaatgagcaccagcttctccctggcccgtgtcatagccacatagagcttccgctcctcttcctcccggctctggcgcagggccttggcaaagatggcgttttccatctgggtggccgtttcggtgcgcagcttttcgtcccgcagggaaaatgccacccccagctttttgtcgatggccaggctctggcgcatctcgtcggtgttataccgcttgctcagatcgggaagcagcacaatggggaactccagccccttggagcggtggatgctcatcagcgccacaccgtcgcccccttccggcggcacccgttccccttccttggcccgctcttccagctgacggagaaagcccagcagcccccgccgcccggtcttttcgtattccagccccaactgatagagccggtgcaggttccgccgccgggtattgcctccgtccagggcctggaacacccccagcgccccggtctcctggtagatcagggacaacagctgcccggcccccaagtcgggggcatactggcgcagccggtgaagaagggccataaactccttggcccttggcagatcgctctctttcagagcgtcataaaaatccccctcccggcggctttgccggatggtgagcagctcgtcgggcgtaaagaggaacaaaggcgagcgaagaaccgaaatgagagggatgtcctggcgggggttgtcgatgatggccaggaaagagcgcatcaccgccatctccacggtggaaaacagatctccccctccggcggcgcaggggatgccctcttcctccagggccttctgatacaggggcgctttggaggtgaaggaactgagcagaatagccacatctcccggctttgccgggcggctctctcccttttcttccacctggtactctttcagaagggccttcacccgctttgcggtgaaagcggcttcataaagggccttgccgctttcctcccccggctccttttcccgcttcatgtccagcacccacacttcggcgggacaatttccctggtattccgccccgggatacagggcctcccggctgtcgtagtccacgccgccaaaagaacggctcatggtgcgggagaagataaaattgcacagggataagacctcccggcgggagcggaaattctgattgagcatcagccgcttttccgccccctgggggtctttttcgtagtctatgtagctgtaatatttgtggacgaagatctccggctcggccaggcggaaacggtagatgctctgcttcacatctcccaccataaacaggctcccgttctctccctgcagggcggcaaagatcttttcctgcaccccgttgctgtcctggtattcgtccactagaatctccccgatgccctgggccacctgccgggccagaggtgtcacattcccctccttatcataaagaagggccagggcgccgtgttccagatcgctgaaatccagggcggcccgctgctccttcagccggcggtactgctcccggaaagccttctccaactggatcagcccccggagaatgggcaaagaccgctccccttcctgctgcaccgccgcaaggggccgggagcaggtctcttcccgcagccgttccacttcctgggaaaagccgtcccgcagggctttcagccggtcgagaaaatccttgtcctctccccgcactgctcccactctgggctttgcccaggccgacagagcgcgataacaggcgtcccagccctttttggccccttccctgatggctttggccccttccagacaggcggaaaaagccgggccatagcccttctcgatggcgggagaaaaagcgatctcctccaaagcctcccccagcttgttctgccagaaggccatggacccatcgcattccgccaggctctcctggcagaagggagcctgcgtaagctcgccccgggccaggctatccatggaggacagagcaaaatccaaaaacccctccgggtccggatggctcattagagagtcgtacagatgcagcaccgcacgccccaggttcttgtccccccgttcttcggcgaaattctccaaagcggccaggaaatccggatcctctccccggctttcgtaccactcttccagggtatcctccaaagcctgctccttcagcagacggctttcgctctcttccagcagccggaaggccggaggcagacccagcagggcaaaattctgccgcagcagccccaggcagaaggaatgaaccgtctggatgggggccgagcccagcaaagccagctgacggcgaagacggcgggaggccggatgcagggccagctcatccagcagacgcttgccgatgcgctggcgcatttccatggcggcggcattggtaaaggtgacgatgagcatctcccgcagttccagcccttccggctccagcagacgccggatcacccgctccaccagcaccgccgttttaccgctgcctgcggcggcggccacgatcaggctgccgccccggctctcaatggcctggcgctgttctttggtaaactcaacggccatggtgtgtttcctcctcttcttcctctgtgagacgggcgtagacctcttcctgggacagtacccgggccagccggggtgcgtccttggccatggtctcgtcgtagtggcaggcgtctttgtaggggcagaaattgcacaccgacgcccccgggccggtgaccaaaggccgggcctcgatatcccctcgggtgatgagggcgcacagacggcgcagctgccggtccacccctcgggtgagcttttccagcccctcccggctggtgaccgaagaggtgctcttcagcccgcctccttttttcacgctgacgggcaaaaagcggaagtccccctcctgccggtcttccatggcctgcaaaatcggctcttcgtccagcacaatgccgatgcggcgcaattctttgctcagctttccttccccgtcctcgccgtaacccacctgcacataaggggtcttggccgggatatagagcactccggcggtctggatctgctgggccccgtctcccagacgctcccgggccttttccagcaccgcttccctgccaaagcccaccatcagcagatagacgaacatctgcatattgatgccatagagcagatcggacagatgaaaggtctttttgccggttttgtaatcggccaccttcacatacagagtgccgtcctggataaagccatccagccggtcgattttgccgctgagggtcagttttaccccgtccccttccagcagaatgggcggatattcttctcccgggccgaaggccatctcaaaggcgatgggccgaaacttggacaggctcagctcctgccacacatcctccacaatggacaccaccatccgctggatgcggcggaaaatagcccggaagcggggactttcctcttccagatgaggcaggtttttttccttcacctgggcgatggcccgcagggcggctttccgcggctcctgctcctccccctcttccaaaagccgcaccgcccgctccaccacatcgtggaggaaggtgccggtttccggcgcgccgaaggtggcccgtttccgctccttggcatgaaggccatactccatgaaataggagaagcggcaagcggccaccttttccgcccgggatgcggtgatgcggatgcgcttgccgtaggcggcggccaccagctcccgggagcggatgggcccacggggagaaacggcatagcggcgcagggcttcaaagtggttctgctgctcttctcccttctcttcttccaaagaaagggcggctctggcccagatgtccccttctccctgacaggcggcgcaggccagctcccaggcgggccggggagccagcaaacggaaatcccccgacggacgactcatttccaggccagggagcaaatgaagcatccgctccaccagataggaagggcggcaggccgtgcctccggagagggtctggggacaaagcaccgccaggcgcttgtggggcgctgcaaaggcgtggtagatctggctctgggcctcataggcctgctcttcggcggtctgggtcagggtcaccccggcccgcaatagcgcatcccgctcctcttcggtgagcaggctgcccccgcccaccgccgggggcaaagccccttctcgggcccccaggatgatgaggaactccaccccggcaaaactctgccggtcaaaggaagcggcctgaacatggtccagggacaccggaatggcggccacctggtattgggagagcatcagccgccacagacggcaaaactccccggcgtccatctgctgcccgcccatggcggcggaaaactgagccaaagccccctgcaaaatgtcatagagctggctgtattcggcgctctccctggcccggccctgctcttccaggctgcgggccttttccgaaagagcctgttccatgccggtctctttcaaaaaccgctccagggcttgggcatagtccggcccctgacggctcactttcagagcctttatcagattctcaaaggccggagcgatcttttgccggatgtgttccagttccagcaaagcccccgggtcctccttcgccccgtagcccccgggatttttccggaagggagcaaaatactgtttgccccggatgttatgcatcagcacataattttccagcttgtcgcattcctccatggtgaggggagacaggccgcttttcagataggcgaacacatcctcatagcccatgccctgacaggcggccaacaaggctccctgctgggcggccagcaccggcttttgcaggatatcgcttttctctcccaggaacaagggcacctgccatttctgaaaggcgctttccagcagcggagcataggtctccatgtcggaacaggccaccaccatgttccggcagcgcatcccctctcccatggccttccggcacagggcggcggcaaattcgcactcctcctggggatccgaaagggtgtaaatgctcaccccttgccacgcattttccgtgggagtagcggcataatcaaaaagatcccgctccagcacggagagggccggcggcaggtccccttccttccgattcaaaggacacactttgagagggcggttgattttctggcagatcccggccagacgctgcaaaaatttctcctgctccagaaaaagacggtcctctttttcccaaagcagggcaaaagcggcggagtggcatttttccagcagggcctccacaatgctccgttcctgggcagtcatgccggaaaagccgtcaaaataaagatcccaaccccggccgaagtccgatgggcccagggcctcccggcaggccgtcagcaggtctttgtcatccagaggcaggtcttttgtcacattctgataggcggcgtagcaaagagaaaggtcgcgaactttattccggctctctcccaggctttcggcagcctgggccaggtcctccggagccacctggcagcttttcagctcgcttaccagctccagcatgcccccggccagctccggccgggccgagagagaaaaatgggtcaggctgtccccgcaaagagaaagagcccggtgcatggccagcacccggcctcccccgtccagcagcgcaggcgggtgtcccccctcccccagcacacgctgggccaaccgcttgaaggtgagcacttcggcaaaacgggcgatgggattgccctgggactgaagcagccgccgttcgctttcgtgagaaagcatttcgggcacgatcaacagctgccgccgtccggccctggccccctctcccatggcagaaagcagggcctcggttttgccgcacccggcccggccggtgtaaatggtcaccatatcataaacctcccccaaagagataggcaatctgataccatgacgccaatgcggcatggtatattggccgtgttttcggttgtcccgcaagggacgagaaaacggccgcaaaaatctgtataataaccgttttgcggttattataccatcttttcgggagaaacagcaacagcccccaccgggttttcccggcgggggcaaaacaaaataacctattatcccaaagcgtggcgcagctgggccagaagctcggccaccttgaaacggatcttgtactgcaccccatccccggtgatataccggatctccccgggagaaaaattctcctgggcggtgtccagaaactcctcctcacaggccggagcgcaaaggggcggcagcagcacgcaccaccagttgtggcccttcccttccccgatggtcacccgcaaagcatcataaaccccggcaggcaaagagaaggtattatattcccgggtgtcaaaataagtatcccgcttttccacctgcaccgggtagtggtagccctcctccagcaccaccttctgggcggccttttgaatggcgcccaggaaagctgcatccatgggttttccctcccagtttttcgcctcttccagcactccgtcccgcactttcagtttcagagcctggtcttcctcgctgtcgctgttggccagcacatgaagccgtgtcaccttgctctctatgctctcctgctcctccggccagcaggcccccagggccagagtaaacagcaggctcaggagaagagcccattcccattttttgaagttcagtttctttatcataagtaaaaacaccagcctttccttctgagagaagtatggactggtgtttttctttttaaaccaaattttctcaaaaaaccggcgtgcagacgaaggtctccaccggcagtttccggaaggcctctgcggccttttccgcctgctgggtattttcaaacaaaccatacagagccgagccggaaccggtcatccgggctcccagggccttttctgcaaggagtttttcccgcagctcctgctcctgaggatggagtgcacaggccaccggctccatcacattgccaaggtttgcaccgattttttccagatccccttcctccagggcccggagcatggcctgggtgtcgggccgctgctgcaaaggcccggcgtccattttctggaacaggcttttggtggagatggaataccggggcttgatgaccaggatgccgcagggaggcagatgaggggcgggggtgagtttttccccgatgcccctggccagacggcagccggtttccaggcagaagggcacatcggcccccagggtaagggcccgctcctggagctttttcttggtgagggggtagccataggcccggtttagcagacgcagtacggcggcggcatctgtactgcccccggccatcccagctcctaccgggatgcgcttttgcaatttgatgtgcaccgccccttttttgccggtttcctggaaaaaggccaacgcggctttataggcgatgttccggctatcccggggcacatagggaaggttgcaccaaaggcccactccgccttcccccggcagcagggtcactttgtcgtgaagggacacggtgtgcatgatggtttccagctcatgatagccatcctcacgctttcccacaatgtccagcgtcagattgatcttggccaaggccttttgtctctgtactttcatatctgttcctccccggagtgcctccggtggcatatagcccacaccgtgcctgatgcaggcagcaaccattctgttcgtgggcacccgttatacctgggtgcatttagggtgtattttacttttcttcactcaatacccctgggtgtgccgccggtgcattctttccttctgcgtccaatgccaacgggcgcccagcggagtgcctccgctcccatgccgcccacgccgggtctgatgcagacaacagccactgtgttcgtgggcacccgttatacctgggtgcatttggggtgtattttacttttctgcacccgtcactccgccgcccgcctgctagacatcaatggctttgatggggcacatctcatggcagcaatagcatttgatgcatttccgcttgtccagatgggccttgccgtttgccacatgcagcgcctggcgtgggcaggcccgggcgcagtcgccgcagcccacgcaccggggcgtgatgtggggaaagggatttgcggcccgctccagccatggccggagaaaatgaggcgcccaggagaaccggctgccgctttgctggatggccggcacaaagggcggctgcaacggctccaggctgtccccccgcaaagtgaggtgcctgctctcaaagggcaccagccccagctttcccccctcctggtgcaccggggaacgctcgggcacaaggccgcaatactccatagccgccaggtccagggcaaaggggttctgggaaccgaagagcacgcccccatggcgcacccgtcctcccgaagggcctttgccgtccatgccctccaccccgtccagaatggtgtaggccggctgcacataccggcacagatccac

SEQ ID NO: 2214 - DNA, 6599 bp, Unknown
  16S sequences of unknown bacteria
cggcggggtgaattcctccagtccgaaagaaaataactcctcctgggaagtacatatagatattaaaaagaacattcccgtagcagcgggtctcgcgggaggaagctccaatgcggcgggcgttattttagctctgaatcggctgttggggatggatctttccctttcccgtctctgcgccgcaggggaaaagatcggcgcggatgttccgttttgcattatggcggccgctggaagtcagcgccggcttctgaacatcaagggcggtgcttcctgtgctctcgccgagggaatcggcgaaattcttacaccgctccggtctgttttgttctgggtagtattggtgaagccgccggcagggatctctacagcggaagtttatcggagaatagatgaaatttctataaaaaaacatccggaaaccgctcatttgatcgaaggtatatcatccggcaatatgcagaaaataaaatcatctatgggtaatgtgctggaaaatgtaactttttccatgtgtcctgagagcggtgctctcaaagagcgactgaacgaaaaagggtgcgtggcggcgatgatgagcggcagcggtcctacggttttcgcattgtttcaggcccgggaaaaagcggcggcggcagtctcatctttaagagacctgaaagagcagggatacagtatatttttagtgaaaacacttcagtaagcaccttgtatacacagtacaattcgtttataatatgagaaggcggctggggaaaacatcagcctttgccccatattacctatgaaaaatatgtgataagtaatatatttgattgtacaggaaaaatgtgtagatgaaagagaagagataggagaggtgcagtgtttaatattaacatgcaggagcacaaaccgcttagagaattagtttatgaagaattgaggcttctgattatgacaggtcagattaagccgggaaccagaatgatggagatcgagcttgcggaaagcatgggagtcagcagaacacctgtcagagaggcgatccgccagttggagaaggataatctcgttacgatagagccgagaaagggcgcctatgtttccgatatttcagccgaggatttcgacagcatgatgatcgtccgtgaaccgctggaagggcttgcgacttatcttgcgacgatcaatatgtctgacgaagaattgacggaagttcgcagagcggcggacgcctgtgaaaaggctatcgcctccggcaatcaggaagaactgacgaaggcggacactcactttcacaatgtgatcacccatggcagcggtaatacgtatctgatcaatctgtgtcaggatctgcaggagaaggtaacgcgcttccgctatatatattttaagtccagtaagagagccgaagaaattgtaaatgagcataaactgatcgtagatgccatggagaagagagatgcggaagaagcccgcggatactccatcgagcatatcaataatctcagaaaatctatcgacagagaagaagatttccgtccgggtgccaattcttagccgcatcggaaaagccgcggctgccggcgtggagcggaagtacaggtggataggagctgtttcggctgccggccgtctgacagccgtccgttttttgcgctgtggattcccgggattgcggcgatcttgatttaggagtgtgatattatgttagaaaggtcctttgaaatcggtccgattcgtccgcccagcgaggcttccagtctcctgcttcaggtgacgagagggtgtacgtggaacaaatgccgcttctgtacggtttatcgcggttcaggctttcagatgatccagccggaggagatcaggaaaaatatcgacaatatggcgtatttcagagatctgctgctgtcctgcagcacggacgaaggcatcgtggataaagcaaagctttacggttatctggaaaatttcagcaatgatgagctgcagtgcttttatatgatttataactggctttctcacggcggaaaatcagtctttcttcaggacggaaattccattgcgctaaagccggagaagttagccggcgtactcgtctatcttcgggagaagtttcctcatatcgagagggtaacgacttacggcagagcggagacgatgtcgcgctggtcggaagagcagtggcgcctgttgcatcagagcgggctcaaccggattcatacgggttttgaaagcggttcggacaatgtgctgaagctgattcataaaggtctgacgcaggagcaggaaatcgacggcggccgcaaagtaaaagccgccggactcgaactctccgtgtattttatgccgggcatcggaggtgtggaattccacgatgaaaatgcggaagagacggcctatgtggtgaatcagatcgatccggattttgtccgcctgcggacatttgtactgaagttggaatccgagatgtacgatatgaaaaaagccggcgatttcagtgaattgacggacatcgaaaaactgcaggaaatccggaaactcatcgaaaaaatcgatcgcccggatgtgacagtggtcagcgatcatatcgtgaatctggtaggttctctcaatcatccgatccgccggaaaggtgaaatgcttgcgaagatcgatgaggttctccggctgccggagcgggagcagaaaatctatcagctggccagacggcacggagtcgtggaggaatattctcatctgagagaactgccgaagaatcgcatcgaacatttcggctatgtcgcttcccaatataccgatccggaggtgtgggaatcacatctcaacggcattctgcggcagtatgtgtaaaaagagaacatgaagaatgccgttcgctgtccgtaaggcaagcggaaccggatctgtgatatcagcttgttgaccggccggaccggccatataatatcagacaggaatgctcccgggagcattcctgttttttattgggcggatcccgaataatcgcgcaaggtgactgcagggagagataccggtggtacggaatcgtataccggaaatttccgggagaaaaaatattattctgcagaagcggccgaagccgcataacttaaaagagctccgcatagcattgatagaaacgacagtttttcagaggaggggcagcgatgagcgatttttataatgacaggatggaatttttccgggaaaccggtgcgaagcaggcgccttccgcaggggaaggcgacgcgggaaacagcgggaatgaggaaattttcgaccgcggattgttgcaggacaattccgcggcagatacagcggagactttttctggggaaagcgtttatgcagcggacgatgatatctggaatacagaaatcccaagagaaccggcaaatcggctttctcaggaggagtttttggaagaaactccggttttacagtctgcgggaggattttcaggaaactttgcatcggttcctgaaacggcggatctggaaccgggcatcgaaaaaaatggatggtttgacgaagatacgggaggtcaatggagagaggagacggctgctgaaaacacccggtcgggatccgtctcagaaggagaagcgatctggagtcccgcagatcctgcagcgtctgctccatcggcagaaactgcagactccggtcagccgccggagacagcggatgccttagattcagacgagacatctgaatcggaggaactttctgtaccggcggaacacagagatctgccgccggactttgctctgataccgccgacggcgcaggctccttccaaactgatctctgcggatgaggatttgaaaagcagccgcctgaaaattacgggagtgtatcatctgcagcttcctgtaatcacgattgaagaggatgttctggtgccggatgtggaaccggatttggaacagattctgaatatcgaggcgaggccggagatttcttctcacgagacgattccagcctccgacggaaaggatacatataagatcagcggaagtatttctgtaaacactctctatcttcctgtatccaatgatggcgaactgatttcaatgaattctcgtatcgattttcgcagagaatgcacgccgctggaggcggaggacgagaaaagtatgacggaatccggccggtcgtccgatgcgtctgaggttatgtcggcggaacttctctctgtaaaggcaagagtgatcaatgaacgtaagattcgcatcagtgcagagctgcgctgtacgatccgaaaatattgcgacgaggagaccgaattcctggagggcgtgagggacggtgaactcaatctgagaaaagaaacgatccgctttaccgatatcgctcagcggcgcagagatacgatggatatcagcggtgaagtcgtcttcaaagaaaatatgccggaaccgggccagattctcaactatgatgtgaatatcgtagaaagccggcgtcagatcggcagaggcaaagcggtgatcgatgccggcgcttattacagcatcctttacatgccgaagacgggaggcgcatcgtcccaggatctggaagaaagcggggaagatgatgagagaattcccgtattctgccggggaaaaatcgattttactcagtttgtaaaatttcctgactctgtatcgtcgggcgatccggacagcagagtgacatttgaagtgatctcttcccagctggattttgaagttccggaggaaggcggtccgcggaagctgatgctccgcgccactgtagccgcatcggtcgatgtgttccgccgcatggagcgggagattgtcacagatatgtatcatcggacaaagaatgtggatttttcgacgacagcccgtcaggtcgccgaactgtgcggtagcggcgcggcggaaatctccgtacgagagattatcacccttccggagacaaagaccggattccggcggattccttacatttctgcggcggtggaaaatcttcagatcgcagtggagaatggaagatgccgggtggaagggctcgtagatacaaattccgtgtatgaagaggaggaaggcggcgcaggtttttcttctttcgcacagaaactgccgttccgtacgcagatcgacataccggggatctccgagggaatgacggcggaatacagctgcggattgaaggacatctggtttgaccggatgaatgcccgccaggtagagtttaactgcacgatttatgtatcggtctatgtgtggaacgtcgaagcgcggaattttatcgaccgggtttgctatatcgaagacgatgcgattgttgaggatgctgctggcatggtaatttatatcacccgtccgggggatacccagtggagtattgcgaaagaattccgcactacgatgcagcagctgcggctcatcaacaatctggaagagagcgattatatcgaagagggcagaaaacttctgatcctctgatctttgtcaaagtaacctgcggctgccagaggccgaaaggatcagaatcatattgcagggagaagaaagactccatttagaattgcagataggcttcggattttaaccggagcggcaatttgagggcgtattttccgggaaaaagcagatcgctgcgggcggtctgtgaagaccgggacgccctcgttttttgtatcgagcggaaaatagggagcagcagaattttataagtttttggattcttccatatttttcatggagtgaggtataaaaaatagcggggcagaacatattctttgcggaggttgaaattacttatggaaaaaacagcggaaaaaataaaacaattcctgccggtttttattacgattctggctgtaacgatgttgtttaccgggatggcctgcaggcaggcgaataattcatttacaaatgaggattttatccgttttcatgttatcgccaacagtgattccgatgaggatcaggcgctgaagctcagagtcagggatcgcctgatcgaatatatcaatgacggtctcaggagagaagcggtccgccagtccgacggcggaggcaaaacggcggaattgaatatagaggaaaccagggattatatccgcgaaaatctcggagaaatccgtcagaaagcacaggagatcgtacagaatgagggatggaattacgaggtgaatgcggagctgggcgttcgctggataccggaaaaatcctacggttctctcacttttccggcgggaaattacgaagcgctcaatatcaccatcggtgaaggcgcgggaaaaaattggtggtgtgtcctctatccgcccctttgtctgctcgacgtacaggaggaaagtgaagccgaagacgtactgcgagattccatcatgagaggaaaatactccgtgctttacgacgccgcgcacggagagcgtcagaccgctcttcatctgcgttttaaggtgctggaactgttcggagctgaatagaagaaacgttgtttcgcgggggggggatacgcgggaattcgtctttggttttcacaggacgggacaggcagtgcggcggctttgtgaaaatacagattattttgggtcaaaggcgtttaaagattctcctgcgagggaaatttatggtataatgatcccaatcatc

SEQ ID NO: 2215 - DNA, 7057 bp, Unknown
  16S sequences of unknown bacteria
tgccgaccgcatagctctggaaccattcgccgatctgataaaacagcatgacggcgatggcctccgtataatccccgttgtccgtgatggccagggcgatggcaccgatggtcgcgaccgccatcagaaagctctcatcgaacacctgccggttgcatatgcccttgaacgccttgatcaagatatcataaccgatcaccagataggggatcatgtacaaaagaaacctgaccgccccttccgccggcacgaaatgcagcatgatcatgagcgcggccgcaatgagtatgcgcgccagcatcttcttttgctttttgttcatcatctcatccttctttccgttattcgcctttcatttcatcaattaaacatgtatttaattgacaaccttactataccggtcagcggcaggaattgcaagcgctgtgcgggcgctctttctgttcgggcgctttttgtttccaaacggatcatttcgtctatgctataatagacgcaggagttgatgacatgaacaaagaaaaacaggagatcatctctgtttctcagcatacggacttcaggatggtctgcgagctgttccgccagctcagcgatgagacccgtatccggatcttctggatcctctgccaccgggaagagtgtgtgcaggagatcgccgcgctgatggagatgagcagcgccgcgatctcgcatcaccttcgccgcctgcgcgcctgtgcgctcatcgtcagccgcagggaaggcaaagaggtctattatcgcgctgccgatacgaaagaagcgtgcttcctccatcagatgatcgaggatctgctggacatcacctgtccgcaggagcgccgcgtatgaaacaggatatccatgcgctggcgcagcggctaaagcgcgtgccggcaggcaccgtccagatcatcagcgagagcggctgcgtgccgcggcaggcgcagaccaaaggaaaaggcatcatcgagccctatgcggtctttgacggcgtcatgctggaatacaactgttttcaaggcggcagcgtgcgctttacgcaccgcccgctcccccatgtgctggagatcaattactgccatcagggcagggtaggatgggacatgaaaagcggcagcaccgtctacctgggcgccggcgacctcgccatgcagccgatggactgctgcgcagattcgctcatgcgctttccctccggctggtatatgggcatccagatcacggtggacttccccgccatctccccaaggctcagcgccatcctggaacgaaacggcatccagatcgacgcgctgcagcatcgctactgctgccaccaggtattctcgctggcgcgcagcccgcagatcgacagcatcttctcggtcctcttccaccgcgcttccatctcgcccttcctgcatcagatcaagatcatggaactgttcgcttatctggctgagcttgatccaacgcagcagaaggccgtcagcgaatggaacaccgagcagacggccatcatccagcaaatgcacgattttctgatcgaccatgtgcagcagcgctatacgatcgaagagctctcgcaccgctttctgatcaacacatccacgctcaagtctgcgttcaaggcggtctacggcatgccgatcgcggcatacatgaaggaataccgcatgcagcaggcgatgatcatgctgcaggatcctgcgctgagcatcgcggagatcgccgccaggctgggctatgaatcacagagcaagtttgcgcgggccttcaaagactgcgccggcatcctgcccagagattaccgcaagacgctccagacaaagcgatgagccatccacagcgtggatggctcgtctttatttaatcgcttttgcgcgcgttcagataacggctcaggaatgtcttcgtccgctcgttcttcggatgaccgaagatctcctccgggcttccctcttcgacgatgacgccgctgtccatgaagacgacgcggtctgacacatctctggcaaagcccatttcatgcgtgacgatgaccatggtcatcttttccctggccagctccttcatgacatcgaggatctcgccgaccatctccgggtcaagggcgctggtcggttcgtcaaagagcagcacctccggctgcatgcacagcgcgcgggcgatggccacacgctgcttctgtccgccggaaagctgaacgctgccggcgcgggcaaacgcgtccatccccaccttcttcagataggtcatggccctctcttccgcttctgcccggctcttcttcagcactttcatctgtccgatgacgcagttctccagcacgttcttattgctgaagaggttgaagttctggaacaccatccctacccgggaacggtactgattgacatctgcgcctttggcggaaatatctttcccatgaaagaggatattgcctccgctcggcgtctccagcatgttgatgcagcgcagcatcgtagactttccgctgccgctggagccgatcaccgtgacgacttctcccttctgcacgctgaaattgatgtcattgagcacttccaggctgccgaaatgctttttcagatgttggatctcgattactgtttccatgttccggcctccttttacgcgcagagatcacgcgtctcagatttcatgttcatgcgcttctcgacaaagttgagcaagagcgtcgcgatggtcgtcaagatcagatagagcacggtcgccacgaaatacgtctccaccgggcgatagttgcttccggccaaggactggctctggaagaacaggtcaagcacccagatcacgctcagcatcgagctgtccttgatgttgacgatcagctggttgccgatggatgggaaggcgttgcggatcgcctgcgggaagatgatgtgcaccatcgtctgcagcgtggacatgcccaggctcttggctgcctcgctctgaccgctgtcgaccgactgcaggccggagcggatgatctcggccatatacgcgccggtattgatggaaatgaagaacaatccggctgtcggtccatcccagccgatgatcggctgcaggccataatacaggaacatcgcctgcaccatcatcggcgtgccgcggaacacccagatataaaggctcgtgaacagacggccgatgcgcttgagcaccttgacggcagcgctgtccgaatcattgatctctaaggcgcggatgccgccgaggatgagcccgatgatgaatccggccaccgtgccgatgatcgcatagatgagcgtcacctgtacgccggacatgaacatcacgatattttcctgaaaaatctgccagcatttcagcaaatcaaatgtcatagtctacctgctttctcttattcagccggctggatctcaaccgccttctgcatgtatgcctttctcgtatcctgatcgatattgtccagcgcgtcctgtacggcgttgaacagctcgccgtcgcggctgccttccttcagggcgatggatacggtcgtatcggcctcaaagccttttccttcatcaaaggtgatatacgtcagatccgggttggccgcaacgacgccttctgcgacggcgatctcagcagtgatgccatccacgtctcccgcctgcagcgccagcaccatctcggcataagtgcgcttcggcgtgatgtgattgacgccttcgatctgatcgatcacttcgtcatagttcgttccgttctgtccgacgacattcttgccgctgaactgctggatatccgtataggacgcttcttcgctgtccttgcgcacgatcatgatcatgccctgtgaatcataatacggcgtggtgaaatccgcggactcctcacgatccgcattggccgtcatgccggcgatgaccgcatcgatgtctccggtgcccagcgccgggatcaggctgtcccagctgacctgcttgatgaccagttccttgcccagctgatcggcgatgttcttcgcgatcatgacatcatagccgtccgcatatccgccgctttccagcaggacggatgaatctgtctgattgctgctctgccagttgaacggcgcatacgcgcattccatcccgaccacgaaggtgctgtcttcctcaggctgctcactgccgccgcagccagccagcgtcagcaccatcgccgacgcacaaagcatcgttccaaattttttccacatcttcttttcctcctctttcctatacgacaggagccgtgctattagcacggctccgctttcttctaccgatcctctaatagcgcctcttcatcgaaatgaaggagtgctgcaagtgtttcctgcagccccaggattctgcccgccggcatgcctccttcggcagtggttacctttcacgcgtttcctcgcccgccggctccgcgcgctactctgatgcactgcttcctctaatctcctgtgatatgtcaattattatagcgtaccagacacgattgtcaaccattattcccatttttctcccacaattgcaaaaacggtgcgcgtttcgcgcaccgttcatcctcattctgccgctttgaccataaaatcacagaccttgcgggaatactccatcggatcatcgaccgggaagccctcgatgagcatcgcctgagtgtacagcacatcggcatactctttgactgcttccttgtccttagcatagaccttctgcagcgccgcaaagatcggatgattcggattgatctccaggatgcgggtcgccttcatgccaaacggattgccctcaggcatagcggaaagcaccttctccatctcaaaagacatgccttcatccgtggacatgcagaccggatcatcgaccaggcgggcggagatcttgacttcggataccttgtccttcagcgcatccttgatgtcagaaagcagatccttgttttcttctgccttctgttcgatctccttcttttcttcctcgctggccagatcaagatcgccctgagagatgttcttgaactgcttctctttataggaagacagcgcctgcagggcaaattcatcgacattgtcggtcagatacaggatctcataatttttggcctttactgactgcaccatcggcatgcggtcgatcttgtcgacattctctccggaaacgaagtagatatagttctgatcctccggcatgcgggcgatgtattcatccagcgtaacgagcttcttctcatgggaggaatagaacatcagcagatcctgcagcagctccttgtgggaaccatagtcattatagacgccgaacttgatctgcaggccgaagttctcccagaacttctcgtattcctcacgctcatttctcagcatgagcaacagctcggacttgatcttcttctcgatgcggttggcgatgaccttcagctgacggtcatgctggagcatctcacgagagatgttcagggagaggtcctgagaatcgaccagacccttgacgaaacggaaatgctccgggatcagctcctcggccttatccatgatgaacacgccgcggctgtacagctgcagccccttcttgtaatcctgagaatagtagttcatcggcgccttgcccgggatgaacagcagagcggtgaagctgacattgccctccacgctgaaatggatcaccttctgcggatcggtgtaatccatgaatttatccttatagaaattgtcgtactcttccttcgtgatctcgctcttgttccgcttccacagcgggatcatggaattgagcgtcttcgtctcgatgatcgtttcatatttcggttccgcattctcatcggcgttttcctcttcgatgcgcttttgttcctcgacctccatccggatcggataacggatatagtctgagtatttgcggatcagacgctcgatctcatactgcgccagatactcgtcatagttttcatcgtcgctgttctctttcagatgcagggtgatctgcgttccccagccctctttctcacaatcctcgatggtgtagccgtccgtggcgttgctcgtccagcgatgggcctgttcctcgccgtatttgcgggagatgacctccacgtcctgcgccaccatgaaggcagaatagaacccgacgccgaactgtccgatgatgtcgacatcgctgtcttttccttcctccagcttctgcttgaatgccagcgatccgctcttggcgatcgtgcccaggttttcctccagctcttcggcagacatgcccagaccattgtcgcggatggtcagggtgcgtgcgtcgcggtccacgtcgatatggatctcaaaggcatcgcggtctacgtccgcatacccttccgtcagggactgataatataacttgtcgatggcgtcgctggcattggagatcagctcacgcaggaagatctccttgtgcgtataaatggaattgatcatcagatccagcagacgcttcgattcggctttaaactgtttcttgctcatgaaacattcctccttagcactctttatcaaagtctgctaaaagcataacgcaatcggttagcaccgtcaaccccggagtgctaaaattatcgtttttctcgcagggaacgggctcattcctcgtcttcctgtgcaagccgcgtcagcgtgctgccgctgatgcggtatacggtccacgccgacatcggctctgcgcccagtgaaagatagaagtcgatgctggggcggttccagtccaggcaccaccattccagacggccgcagccctgcttgcgcgcgatggccgccagccggcggaacatggccgtaccgatccctcgcccgcggtatgccgccttgacatagagatcttccagatagatgcccccgcgccccagaaacgtggaaaaattgtagaaatacagtgcgaatccgacttcctttccttcccatgatgcaaagatcacctctgccgtcttgcgttcaaacagccattgttccagcagcgcttcatcggcgacgacctcatgttccagcttttcatcacgggccagctcccggataaagctcaggatcagcgccgtatcttctttccgcgcttggcgaagctgcaattctttcctcatcgtcatc

SEQ ID NO: 2216 - DNA, 2819 bp, Unknown
  16S sequences of unknown bacteria
ccccgactcctcggagaagtacgccgcatgtgcggagagcacggtgtgcggggcggcgagcagcgggtggtcgtgttcgacgggctccgtctcgaagacgtcgatgcccgcgccccacagcttgccctgctcgagggcatccgcgagggcgatggtgtcgacgaccgcgccacgcgacgtgttgacgacgacagcgccgggcttcatgagcgcgaggtgcgcggcatcgaggagatggtgcgtctgcggcgtgagcgcgcagtggaagctgaccacgtcggcacgcgcgagcagctcctcgtaggtgcaggtctcgtagccttcgggcgtgcggcggtgcgggacgagcgagcgcgagcagcagatgacccgaaagccgaggcccgccgccttgcgcgcgaccgcgcggccgatggcgcccatgcccaccacgccgaacgtgcgcccgtacacctgcccgagcgggcgggtcgcagcataatcccagacgcccgccttgatgtcgcggtcgagctcgttgatgcggcgcagcacggcgagcgcgagcgtgatagcgtggtcggagacgacctcgttgccgtagccaggcggcgtgcagatggccacgccgtgctccgtcgcggccggaacgtcgatggtgtcaaacccgacgcctgtgcgcgagatgaccttgagcttgggagcgagcgtctcgatgaccgcacgggtcatgttgccgtacgagaagacgatgccatccgcgtcggcggcgttttttatgatcccctcgggcgagcggtcctcgaacacggcaagctcgacgccggcatccgtcgccatctgcgcttcgacccgcgtatcgtccatatcgtaatcggtgatgacaatcttgggcatgctcactccattcgctttttgcgtgtgcacattgtagccgagtgcaacgcccgcaacgctttgcgctggccgcgtcaaagatttcgaatggcgctactttccgtcgcccgtatcgtaggcgccgttgtcgtagttcttgccggtcacgacggagaagtggaagatcggcgttccgatgcgctttatgctgatgcgcccatggggcagcccgccggggacgaagacgagcgtcgtcctgtcgatcaggtggtcctcgccgtcgatgctgaacgtgagctcggcatcgagcgcgtaggggtcgtccgggttcgttccgaaaaagccgatgatctcgtcgtcttcgtggacgtgctcctcgaagacggggtcgcggtcgggaacatggtggtaccacgcggtgttcatctggaacgcgccaggaaccacgttgctgtccatccacaggatgcgccgcgagaagcgcttgtacatctcctggaactccggcgtgcccgcgtgcgggtcgtgtagctcctggatgaagtgcttgccgtacttgccctcggtcccccgtactgttgccatagcgtgtcctctccccactctgccggtgatgcgcccattatatgccgcctgttgcgccgcccgcacaccccagcatgcgcgggaaccgtggcagtgccacgcatctcatgcatacggggcccatggcgcacgggaaacgtggcaatgccacacatctcatgcatcatgcacggggatcgtggcagtgccacacacctcgcgttaattgcacgggaacggtggcagtgccacacatctcgcgtccctcgcacgggaaacgtggcagtgccacgcatctcatgcatacggggcgcatgcgttgtgggagttgtggcactgcggcgcttttcgcgcatgcgggggcacaacggagcatgcgtatctctataatgagaaaacgcgtgtacacaactgctttgaaaggcggcaaccccctatggtctctcgcatttatgttgagaagaaacccggatttgacgtagaggcacagcaactcaccgcagagctgcggtcgattctccagctagaggccctgaaaaacgtccggctcatcaaccgctacgacgtcgagggcatcagcactgagctgttcgagcgctgcgtccccaccgtcttttccgagccgcaatccgacaccacctacaccgagctgcccgaagccaacggcgccgccgtcttcgcagtcgagtacctgcccgggcaattcgaccagcgtgccgattcggcgagcgagtgcatccagctcatcagccagggcgagcgtcccgacgtcctgagcgcaaaggtctactacctcgaaggcgacctcaccgatgcgcaggtcgaggaagtaaagcactacatcatcaaccccatcgaggcacgcgaggcatcgctttcaacgcgcgacacggtgaagatggtctaccccgagccgcagcccgtcgaggtcatcgacggcttcaccgagctcgacgacgcggggctgcaggcattcatcgccaagcgaggccttgccatggacctcgacgacatcaaggtgttccaggcgtacttccgcgacgaggagaagcgtcagcccaccatcaccgaagtcaagatggtcgacacctactggtcggaccactgccgccacaccaccttcggcaccgtgctcgacgacgtgaagatcgaaggcgagctcgtcgagctcgccttcgagaagtacctcggcatgcgccgcgagctcgagcgcgagaaaaagcccatctgcctgatggacctgggcaccatcggcgcaaagtacctcaagatgaaggggctgctcaagaacctcgacgagtccgaggaaatcaacgcctgcaccgtcaaggtcaccgtcgacgtcaacggcgaggacgaagactggctgttcctgttcaagaacgagacccacaaccacc

SEQ ID NO: 2217 - DNA, 32759 bp, Unknown
  16S sequences of unknown bacteria
ggctctttttgtactgtctgcacaatctggggcagttcacgattcggcagggctttttttcttgccttgttttccgttgcctctttgtgacaatctttttatggggcttgggttaaaataaattcgggtgataaagtgaagataacgatttacatagatgtttttcttattacaaatacccttataaattactttctcttaaaatttgtttgtctgctaagcggggaagctcccggagtaaaaagactgattttttccgccgtgattggctcggttttatctctttccatattttttgatatagacggctgttttgctttgttaataaaatttatgtccctgaccgcctgttgcgccgtcacatttggtgtaagttccaagaaaaagtttgtgcaaaacattgtgtatctcaccgccgtatacgccgcattcggaggaataattaccgctgtgtcccataaaacccaaagaatatatacaaataattacaattactacataaatataaatccgctgctgcttgcaggctgtataggagttatgtatttgctggtattttgttttgataatgttgccggcggcaaaaacaaaaattacagatttgcagtcaaaataaatggtgaaaaattttatataaatcggttttatgataccggttttaaggttaaggatatagtgacagggcgcagggtgctcttgtgtgatataaaagcatttaaaacggaaaacggccttctttataaaaatttaaagaagcggaagaattttaaagccgatttgccctttatcgtcaccccggtgttttattctgccttaaataaagagggcgtattgcctgcctttgtaccggataaactgcggcttgtaaccgacaaaggcgagaagaatatagaaaatattattttagcgataaccgaaagtgatttcggcgaagatatacaggcaattttcggaaaagatatttttaattcggtaggtgtttaggatgatatttgatttaaaagaacagattttaaaaattttatttggcgaaaactcaatttattacataaatgggccgcaaaaactgccgccgccgctaagccgagaggaagaagaacagactttttctcttttgacaaaaggcgacaaggctgccgccgaaaaacttattgtccacaacctgcgcttggttgtttatatagcaaaaaagtttgaaaacacaggcataggcatagatgatttaacatcaatcggcacaatggggcttataaaagccgtaaacagcttttctccggaaaagaacatcaaatttgccacatatgcttcaaggtgcatagaaaacgaaattttaatgtacctgcgcaagcggtcaaaccgaaatgtggatataagcatggacgaggctctctccaccgacagcgacggcaacgagcttaacttgattgatgttttgtacgccgacggcagtgaggtcagcgaaaatatcgaaagtgagagcgacaggcaaatggtgtggcaatcacttaaatgtctatcccaaagggagaggagcataatgattatgcgcttcggtctaaacggcgacgaggagaaaacccaaaaagaagtggcggatttaataggaatttctcaatcttacatatcaagacttgaaaaacgaatattgggaaagttgaaaaaagagattgaaaaaatcggctgatttttaaacaactaaaaatttccacttataattcgcaaaaaattacagataatcataccataatgattttaaggaagtgattatctgtattacaaaaaggtaaacataaccgggattgacacttcgtccttacctactttaagcgatggggaaagggacgaattgatacaaaaaatgaaaaacggagataaaaaagcccaagaaaaactggttttatcaaacttaaaacttgttttaagtatcattcaaagagtaaatataaaaggtgaagaacgggacgatttgtttcaggtaggctgtatcgggcttataaaagcccttaataattttaatacacaactgaatgttcggttttccacctatggcgttataatgataatgggagagataaaaagatatatccgtgacaacaacatcataagggtcagcaggggaacaaaggaccttgcttacaaggtaataagttataaggaaagctatcaaaaaacccatggatgtgaaccgacggttgaagtgatagcccgggaatttaaaacatcaccatttaaaatacgcaatgcccttgatgcaattacagagcatatttctctttatgacccggttttttccgacaacccggacaatgcctcggttatagaccaaatatccgacggagattttgaagatgattgttacaacgaggcaattattcgggaactgttttccggtcttaatccaagagaaaaatatattatgaatttaaggtacttgcagggcaaaacccaaatgcaggtttcgcaaattgttggtataagccaggcgcaggtttccagaatcgaaaaaaatatccttacaaatgttaaaagtcggcttacaggttaaataagtaaagacacacatattttaggcctttcatataatataggaggggtggtttaaatggtgtgtctttctgatttaaagacaaaagatgttgtaagcattgtgaccgggcagaatataggcagggcggacgatatagaatttgacgagaaaaccgcagttatacacaatatcgttatttttggcagaccgaaatttttcggaattttcggcagggaaaaagatttaaaaatatcttggaaagatattgtaacaataggcaaagatgtggttttaataaatgccccggaaatttacggcggcggaaagaatggaaaaacgaatgtaactttcgattaaaccgagaaaagacagggaaggttccttgtctttttcatatttttatattataatttctgcaaaaaataaaatcgaacaaaataaaggaatatattatgaaagaattggcagaaaaaagctacaatcggtttgatttattcagaaatcaatgggcagtcgtaaccgccggcacccttgataattttaacggctgcaccgtaagctggggcagtatgggcactctttggacaagaggcggcgagacgggaaatattattaccgtgtatattcaccccggccgctacacctgcggttttatggaaaacagtgatacgtttacggtcagctttttcccgaatgaataccgcaaggcattgggctatgtggggacgcactccggcagagacgaagataaattttcggcggccggccttacacctgtggaaattgacggcagcgtagggtataaagaagcaagcgttacttttgtatgtaaaaaaatgtacggtgctccctttgataaggcaggtttaaacgaagaaatagcccgatattataaggacaatccaaaagcctatccggtagatgaaaaaggcgattggcagccacacttgatgtttgtgggcgaagtggttgccgtagaagaaaaataagtgttttttcataaaattccgttaattggctaaaaaaatgaaattttaagttgacacaaatatatgcttatggtaaaatacttaggcaaaatatgcacactgtattccttacgggtggtgtaacttattatcagacccgtaaaaattcgcaaaatacagtggaagattaaccaaatcggaggtaaaattttatgtcatcagtatcaatgaaacagttgcttgaagcaggcgttcacttcggtcaccagacaagaagatggaaccctaaaatggcaaagtacatctttacagaaagaaacggtatctacattatcgacttgcagaaaacagttaaaatgttggatacagcttatgatttcatcagagatgtttcagcagaaggcggcgaaatcctttttgtaggtacaaagaaacaggctcaggaagctattaaagaagaagccgagagatgcggtatgcactatgtaaacgcaagatggcttggcggtatgcttacaaactaccgtacaatcaaaacaagaatcgctcgtcttgaacagctcaacaagatgaaagaagacggcacattcgaccttctccctaagaaggaagttgttcagcttgaacacgaaatcgaaaagcttgaaaagttcatcggcggtatcaagaacatgggcgaattgccaaaggcaatctttgttgttgacacaagaaaagaaaaaatcgcagttgcagaagcaagaaacctcggtatcccggttgttgccattgttgatacaaactgtgacccggatgaaatcgactatgtaattcctggcaacgacgacgctatcagagcagttaaactcattgcaggcgcaatggctgacgctgttatcgaaggtcgtcagggcgaacagctcacagctgctcctgaagaagcaagcgaagaagctgaagctacagaagaataatttattaaatagtttttctaaaatataacaggaattattacaggaggaaaaaattatggcatttacagcaagtgatgttaaaaatcttcgtgaaagcacaggctgcggtatgatggactgcaaaaaggctctcacacaggcagacggtgattttgataaagccgttgaaatcctcagagaaatgggtcttgcaaaggttgcaaagaaagccggcagagtagctgccgaaggtatggtttacgccgttgccgacaaggctgcaaaacttggcgttgttgttgaagttaactccgaaacagactttgttgccaagaacgaacagttcagagaatttgttgccgatgttgcaaaagttatcatgagtggtaacccatcatcagttgaagaacttcttacaatgaagatgcctacaggcgaaacagttgacgaagctttgaaggaaaagatccaggttatcggcgaaaatatgaatatccgtcgtttcgaaagatacgaaggaccttgtgcagcttacattcacgcaggcggcacacacggtgttctcgttaagtttgaaacatcagacgaagtttttgcaaagcctgaatttgatgtttacggccagaatattgctatgcagatcgctgctatgaaccctgcataccttgaccgggcatctgttcctgcagaagttgttgccaaagaaaaggaaattatccttgttcagatggctaacgaccctaaggacgccaacaagccggaagcaatcaaagaaaagatcgctttgggcagagtttctaagtactacaaagaaaactgccttgttgaacaggcatatgttcaggacgacaaggaaactattgcttcttacacagaaaaaacaggtaaagaacttggcggcagcatcaagattgttgcatttgctcgttttgaaaagggcgaaggcatcgaaaagaaagccgacgatttcgcatctgaagttgcaagcatggtaaaataaggtataaaaaccgaagatgtaaaaagagtggcaaattgccactctttttttatgcgatttagctttactttaatgataaaatatagtaaaatattataaaatataacagttcgtggggtgtataaaaatgtcattaaaatacaacagagttttaatcaagctcagcggcgaggctttggccggcgataagggtttcggtttggattatcctaccgttgtggaaatctgcgagaacataaagcgtgcttatgagcttggtgcggaaattgccattgtagtaggcggcggcaacttttggagaggccgttcaagcggcgatatggagagaacaagggcagaccaaatcggtatgcttgcaacggttatgaacgctttgtcagtggccgatgctcttgaaaaattaggtcttgaagtaagagtacaaacagcattgcagatgcagcaggttgccgagccttatatcagaaaccgtgcaacaagacatcttgaaaaaggcagaatagttatctttgcctgcggtacaggtaacccgttcttctcaacggatacagcggccgctttgagagctgcggaaatcaatgccgatattatctttaaagccacaatggttgacggcgtttacaacaaggatccgaaaaagtatcccgatgcggttaaatatgatactttaacatttactcaggttttgactgatcagctgaatgttatggatatgactgcggcaacaatgtgccgtgataaccacttgcctatacttgtttttgacttaaaggacggaaacattgaaaaggcgctcagcggtgaagaaatcggaacattagttacagaataaggagaattttattatgacaaaaatttatgaagataagatggatcaggctgttaaacaccttgaaggtgaatttcggcgtgttcgtgccggcagagccaaccccggcgttttggacagagtttcagttgaatattacggtgttccaacacctgttgcacaggttgcaagcgtttcaaccgccgatgcaagaacactggttatcacgccttgggacagatcaattttgaaagagattaacaaagctatacttacatctgacataggtatcaacccaaccgatgacggttcatgtatcagacttgttttcccggctcctaccgaggaaagaagaaaggaactcgtaaaagaagtttctaaaatggccgaggaagctaaggttgccgtaagaaatgtaagaagagacgctttggataaatttaagacacagaagaaaaacagtgagataaccgaagacgaccttaaaaatcttgaagataaaatgcagaaaatcacagataagtatgtaaaaaacattgatgatataactgccaaaaaatcaaaagaagttatggaagtttgatttattttcaaaaaagggcatatattattatatatgccctttaattttaaatttcgggcggcttatttgccgctaaaaagtggtaattgttatggacaatattgtaattcccaagcatattgggataataatggacggcaacggccgttgggcaaaaaataaattcttgcccagaaatatggggcataaaaaaggagctgaagtttttcaggatattgccgattattgtgatgaattaggtcttgaatcggtaactttttacgccttttctaccgaaaattggaagcgaccgttagaagaagtaaacagcattatgcgccttttaaaagaatatcttatcaaggcttttgattacgaaaaaaggaacaacagaatgctgtttataggtgataagtcggctttttccggtgagttgttggatttaatgcttgatattgaagaaaaaaccaaagacagaaccggtatgacgataaacatcgcattaaattacggtggtcgtgacgaaatagtaaatgcaacaaaacatatagcggaagatgttaaaagcggaaaaatatccgaaaacgacattgacgagaagttattttcaaactatctctacacaaaaggtcaaccggatccggactttattttgcgccccagcggtgaaatgcgtctttctaattttctcctttggcaaagtgcttacgccgaatttatatacatggatgtactttggcctgattttacaagagacgatttggacaaggcaataatagaatttaacaaaaggaacagacgctttggcggcgtttaacggtgtgtatgaaacagagagttttaaccggaattgtcggtgcattgctattgctggcagtatttatgatttttgacacaatatttttcaatattgcggttttggcggcttacttcattgctttgtatgagatatactcggcttttaaagagcaaaatgcaaaggcactgtttttacttttgggtattataggggcatattttatacttttaccttatgtaccacaggtaaacaatcggcttgtaattgctttacttatgggaatatacgcccttataaccgttgcaagtttcgatagaatagattttaaaacactatcgtcaagcctgatgttcggcttgtatgtgttggtaggctttgcttcaataacatatttaaagaaaattcttcccgtggccgaatacggccgggacgggttattcctttttactatgagtgttgtcgtggcttggggcagtgatatatttgcgtatttcggcggataccttttcggcaaacataaactggcgcctaatttaagccctaaaaaaaccatagagggttttgtggccggtgttttaggggctcttgtttccactcttttggctttgtggggatattgtaatttaaaaccgattctcgaaggaacggctctttcatactcggttgaatttacccagtatgtttatgttggcttgtttgctgcggtaggcgcagtggtaagcgttataggcgatttgtttgcctcggccgtaaaaaggcaggttggcataaaagattatggcaacttattgcctggtcatggcggtatattggatagatttgacagcgtgataattttgacgccgtatatgtgcgcctttgcttattatgtggcagcaaagggcggattgtttattgttatttaaggcgtgtgtttaacacgcctttgttatcttgtataaaattttaataaattcgtcattataaattcatataattgatttataatgtacagtaatgttgtttgattagaaaaatataaggatggttattatgtataaaaaaataattgttttgggttctaccggctctatcggcacacaaactcttgatgtttgccgtatgcacaatatcaaagttgttgcactttccgcaaacagaagtgttgataagattgaagaacaaattaaagaatttaaaccggaatatgtatgtcttaccgatttacaggccgccgagagttttaaagaaaaggcggataaatatggggttaaacttctttccggcaaagaagggcttatcactcttgcaaaacttgatacagatgctttggttttgaatgcggtagtaggtattgcgggtctcggtgccacgctgcgggctatcgaaagcggaaaagatctcgctcttgcaaataaggaaagccttgttacaggtggtaagcttgttacagaagccgttaaaaagcacaatgtaaaacttttgccggtggacagcgagcactctgctattttccagtgtttacaggataaagagagtgcaaagagcttaaagaagattattcttacggcctccggcggtccgtttttcggttatacatctgagcaacttgaaaatgtgacaaagcggcaagcgttaaagcatcctaattggtcgatgggggcaaaactcacaatagattccgccacacttatgaataaggggctggaacttattgaagctgtttggcttttcgggttaaaagcagaggacataaaaattgttgttcacagacagagcattatccattctgcggtgcaatttgcggacaatgcggttattgcacaacttggcagtccggatatgcgcctgcctattcagtatgcgattacatatcccgaaagatacgaatgtcctgcggcagaacttgatttttggaatatgaaagatttgacatttgcaaaggccgacccggatacattcctgtgtttgaaagccgctattgaggcaatcgggaaaggcggtttgtacccttgtgccgtaaacggcgcaaatgagagggcggtgcagcttttcttggaagacagaatatctttcacagatataggcagagctgtatatgcaactctctcacatattgatttagataatgactataccttggaacaggtttatgaaaccgatgccaaggcaagagctttcgtagacgaaatgcttttgagcaaaggagaataatgggcattttaatttctgttttagttttcggattggttgtaatgatacacgaattcggtcactttgccgtggcaaaaatttgcggtataaaagtaaatgaattcagtatcggtatgggacctaaaattttcggaaagaaaaaaggagatacggaatacaatctgcgtgcgcttcccatcggcggttttgttgccatggagggagaagacgaaggcgaaaatatgagcgaaggttcgtttaattccgttcctgttcaaagtcgtattcttgtggtaatcgcaggtgcggttatgaatatgattttaggttttgcggttcttttatttttggtatccggagaagatgcaataacaagccgaaaggtaaagggcttttacgaaaatgccaaaacctatgaaaccggtctccgtgaagatgatgagatagttgccataaacggcagaaagtgctacattgcagacgatattatatatgaatttgccagaaccgaaaacgcctctgcggactttacggtaataagggacggggaaaaaatccagttaaaaggcgtaacctttgacacggtggaaaacgatgacggcacaagccgaatgataatagatttttatgtttatcctgttgagaaaacggtacattcggttgtaaaggaggccgcaaattggacaatcagccttgcaagaacggtatttttaagccttattgaccttgttacaggccatgtggccataaaccaaatgtccggcccggttggcatagtaagcactatatccgaagccgtaagctacggttacgaaagcgtcttgctgattttggctatgataaccataaatttaggagtattcaaccttatgccgtttccggcccttgacggcggcagacttctgtttttattgattgaactcttgagaggtaaacctttaaatccaaagtacgaaatgtttgtgaatgcccggggtatgataattttactgggctttatggcatttgtaactttcagcgatataacaaaactttttatttgacggtgacgatatgagacatgaaaaaagaattgtaaaaataggcaatacatttttgggtggcaacaacccgatacttgtgcaaagtatgctaaatgtaaaatcaaatgatgtacggggtaatgttcggcaggcggtagctcttgaaaaagagggctgtcaaattcttcgtgtaagtattcctacacttgaagatgtgcgtttgatagagaatattaaaaatgaaataaaaataccccttgtggcggatatacactttgattatcgcatagctttgcgagcaatagatgcaggcattgacaaagtgagaataaaccccggcaacattggttccgatgagagagttaaacaggttgtggaggcatgtaaggttaaaaatattcctatcagaataggtgtaaatgccggcagtttggaaaaacacatcttggcaaaatatggtgctcctaccccggaggctctctgtgaaagtgcaatgtaccatatcagattgcttgaaaaatttgattttaacgacattgttgtgtcaattaaatcatcgaatgttaaaacgatgattgaaagctatcgtatgcttgactctatgtgtgactatccgttgcatttgggggtaaccgaggccggtacatatcgtatgggtcttattaagtccggtatgggcataggtaatttgcttttggacggtatcggtgacaccctgcgtgtaagccttacggattctcctcttaaagaaattcccgccggttttgatattctccgcggggcaggcatcaaagtgcccgggcctgaaattatctcttgccccacttgcggcagaacaaatcttgatattgccgcaatagcaacacaggttgaagaaagattaaagggaataaacaagaatataaaagttgccgttatgggttgtgcggtaaatggcccgggcgaggccagagaggccgatataggcattgcgtgcggtgttgacaatgcggttatgtttaaaaaaggcgaaagagtaaaggttttacacggcaatataattgacgaatttgtaaaatccatttatgaatatttagaggaaacaaattgagcagagcagttcttgaaatttacaatgattataatggtgagtatgttgaacggctacaaggggtaaatcttgaagccattgacatttctcactcaaaagcccatcttatggttaagttgtcgtcatataggttaaccgagattgaacggttacagcggttttgcggctttttaagcgacaaatacccggactattccatagatatatttaacaaatttgatatttcgtcattttgtcggggcgatttgcaaattttattaagaatgttttgcggcgatgtaaaaaatgttcctttggaatattttaaaaattcacaggtagaaatcgtaaacaacattatgcacttaaccgtggataaaggatacagttttttggaaggctgcggattttccggtttactgagccaatatatttttaaattgacaggtgaaaacattcacatagagcttgaaaatacacggactgatgaagaagaaatttctcggcctgtgtttgttccgcctgtcataaaacacatagaagaaaagcctaaatacaacgatttttacattaacggtttaaatataaaagatgactctgtcaaagtctttataggcaagtacataccgcctaaaaatcttaacagcatagaatatgccattgaaaaaaacggcagagttacgctttggggcaaggtctttgctgtaaatcaacagggcaatttcaggaaaatatatatttattcaattaccgatggcaaaaattccataaatgtaaaacttctccttgacccgggtacaacggattttgacaaatatgacgcaattaagccgggaacatactttcttgtaaacggcgattgtcaaatggacaagtatgaacgcgattatgttattatgccacatgacattgtaacattttccgtcgctccaaaaaaggacaaggccgaaaagaagagaattgagttgcatttgcatacaaagctttcttcaatggatgcggttgtaaacccggacgaggcagttcgatatgctcacgatataggtcacaaggcgatagccataaccgaccatggggtagtgcaggggtttccccaggcaatgcttgaggcagagtcaatacaaaaaaatgacccggattttaagctgatatacggctgcgagggctacttggttgataatatcgtaaaagtttatgacggtaaaacagcaggaaatctccgtgatatagagtttgttgtttttgatattgaaacaacaggcttgaatccaaataacgaggccataaccgagataggtgcggttaaatggaaaaacggtgatgttatagaggaatttcaaacatttgtaaacccgggcaaaaaaataccggccaatattgtggaacttacaggcattaccgacgatatggtaaaggacgcaccggggcaatctcaggctatcgaaatgttcaaagaattttccggcaacaggattttagttgcacacaacggcgccggttttgatataaatttcattaaagttgtagccgcaagggaaggtgtggagtttacctgtgaaaatcttgacacattgcccttggcaagaaacctccttgaagatttgaataatcacaaactggatacattggcaagacattataaattaggtgattttaatcaccacagagccaatgacgatgcagcaatgcttgcaaaaatcttttacggtttaatagaagaccttgaaaagcagggtataacgaatatcgaggacataaacgaaaacctcagcagcactgaaaaattgccaagaaagagttttcatatcattctgcttgtaaaaaacagaataggtttgaaaaatctgtacaaacttgtttcatatggacatttaaactatttctttaaaacacctcgcatgcctatgagtgaaataatcaagtacagagagggtttaataataggttctgcctgtgaagccggtgagctttacagggctattgccgacggaagaagttatgatgatttattaaaaatagcatctttttacgattatttagagatacaaccccttggcaataacgaatatatgtaccgtgaaggcaaagttgactctatggaagtactcagagagtataaccgtattattgtaagattaggtgatgacttgaaaaagcctgttgtggcaacgggggacgttcactttttaaatatggacgattcaatctaccgtgctattctgatgtccggcatgggctttaaggatgcagatacacagcggcctctttactatcgtacaaccgatgaaatgctcaaggaatttgattatttgggcaaagaaaaggcttatgaagttgttgttacaaatacaaatcttattgccgatatgatagacggtgatataagggcaatacctaagggtacattcccaccgagtattgacggtgcggaagaagaacttaaatccgcaacatacgaaaaactgtacagagtttatggggataatccgccgaaactcatagttgaccgtgtagaaaaagagcttaacagcgttattcagcacggttatgcggttctttatgttatcgctaaaaagcttgtacacaactccgaggaacacggctatttggttggctcccgtggatcggtaggatcttctgctttggcttttttctccggtatttcggaagtaaacccattgccgcctcactatttgtgcccaaagtgtaaatactgcacatttgatgtgccggaaaatgtcttaaacggctttgaccttgaagacaaatactgccctgtttgcggggagaaaatgataggtgacggcaatgatattccttttgaaactttcctgggcttcaacggcgataaagagccggatatcgaccttaacttctccggcgaataccaattctatgctcatcgctacacagaggagttgttcggtaaagaatacacatttaaagccggcacagtgtcagctttgcaggataaaaccgcctacggatatgtaaaaaaatatcttgaagaaagaggtaaaactctcaacaaggcagaggaaaacaggcttacattaggttgttccggggtaaagagaactaccggacagcacccgggtggtatggttgtcgtgccgtcaaattacgaaatttacgatttctgcccggtacaacacccggcggactcaaaggaaaagggcgttataaccacccactttgaatttaaatatctccatgatacccttttaaaactggatattctcggtcacgatgtgcctacaatgtacaagcaccttgaaaatttaaccgggttaagcatgtatgatgtgcctatgaacgaccgcaaagtttacaaaatgctcaccagcaccgagccgataggggtaaaagaagaggatattatgagtaccacttccacattcggtatcccggaactgggcaccgactttgtgcgacagatgcttatggaggctaagcctcagacatttgcggatttgatacaaatttccggcctcagccatggcaccgatgtttggaacggcaatgcacaagaccttattaaaagtggcacctgcactattgcaaatgttatcggcacccgtgacagcatcatgttggaacttataaaaaagggcgttgacaaggccaaggcatttaaaattatggagataacccgtaaaggtaaggcggctaaggaatttacgccggaacttgaaggcatgctccgtgaaaacggcgttgaagattggtatatagaaagttgtaaaaagataaagtatatgttcccgaaggctcatgccgtggcttatcttattgccgccataagaatgatgtggtttaagctgtattatcctttggaattttacgcaacttatttcaccgtcagaggcgatgcggttgattacgaagcggcgataggcggcaaaaaagttgctaccaaaaagctgaaagatttaagccggagaatgcgtatcgaaaaaaccgcaaaagatgaagaatccaggacatctttgcagatggtttgcgaaatgctttcaagaggttatgaatttttgccgataaaactgggttcaagccttgcaaaagattataagatagaggacggcaaaataagactgccctatatgtcacttaaaggggtaggcgaatctgccgcaattcagcttgaaaacgcctgcaaagaaaacagcgactttttgtccgtggaggacttccaaagtcaatcgggtgtttcttcgtctgttctcgatactctttacgaggttggggctttgggcaatatgccccagacaaatcaggtttcattcttcaatatgtaatttaaattatataaagcaaaaggcagacagaaagcagaaaactttctgtttgccatattttgtcaaaataaatattgaattatgacacaaaaatttatataatatttgtaataaaaactaattcagaggtataaaatgaaatgtccatattgcggcagctttgaaagtaaagttgtcgattcaagaccaacagaagacggcgagagaatacgcagaagaagagagtgtgtagattgctcaaagaggtttaccacatttgaaacaatagagctaagccctataatggtgcaaaagaaaaacggttcaattcaagcttttaaccgtgacaaacttttaaacggaatgataaaatcctgcgaaaaacgccctgtggccattaaagacttggaaaaggccgtagataacatagagtacaaaattgtaaacagcctcaaaagcgaagtttcttccgccgaacttggtgatatggttatggaagaactcaaacgcttggacgaggtggcctatgtgcgttttgcctcggtttacaggcagttcagcgatatacagtctttttataaagaaatatcggactttatcaataagaaaagcaactaatctataaccgatatatactcttttatggtggttatgtcggatagtatttcaaccgcacaccggcggcagtcatcggcattttgatattccattccgtttttcatcaaagcaatatttaattgaatatcccggatatgctccttacttattaaaagttggagcgtatcctttttgtctttgtaaaaaatttccattttgtcaagtttttgccggtattcatcattacattcttccatttgagaaaatgttaccgcataggctctcagcacattcaaatttttttcgcaagcacggtgaataatcaccgagccaaacagaatggttaaaaataccccgacagcaattttaaagtggctcatataacctccttttttgtaatgttgtaattatcatctccgtcatacaaaagtaaaagtatttgtgataaatccatattttcttttttcagtatattttcaagttttttatcgtcaaaggatacaatcgggtaattttcatattgctttttaccgtcaattaccatggcaaaaggcggaatttcagccttttttaatgttgtttgaatatttggcgcagggtaaatgtttaccgcacctgtggtttccacaatggcaagagccacttcttcaaggtaaaaaatatcctttgaacgcatggattcaagtatatcgtcaacggtaaatctcagttcgttcattgtaaactggtctataaccccttttttaataagcactttctgtttgccctgtgtaaagtttgcaagtttgttgttactccttgcaaattgggaagaaaacacctcataacatacaataagcaaaatcgggataaccgagtacaaaataggcagttccggtgcttcaatggccatagatgttaaatttgatatcaacattgtggccacaaggtcactgggctgaaattcccccaaatttttctttcccataattctcacggatgccattataagcaaaaacataagagttgttcttattatcatcgaatacatattttcacctcgatttattgttcccgtcgcctaaaaatatattcgtcggtcaataataaatcgaggtgatttattatgcaaaaagtaagttctgttttacaagaaaacatagattatattaaagattattttgaaaattcggcggatttgtattgtaaaaatttaaccgtcgtcggcaatgattgctgtgtttgtatgtgtgaagatttaactgataccgcacgactgtatgatatgtatttaaatcccatcggtaaaatcacggaaaagcaagtgggagataatttgtttgactatcttgcaaattcttcggttatacctgtgaataccgaattacttgataattttacggatataacaaaagcccttaccggcggcacggcagtaatgtttgcggccggcgatacaagggccatggcaatgcaagccccgggctatcccacaagaggaattgacaaacccacaaatgaaaataatctaaggggaacaaaagagagctttatggattcgggcagaaaaaatatggctcttattcgtcgccgaatcagatcgaaaaatctatgtatagaaacttttcaagtgggggaaaagacccaaaccgaaatcagcgtatatcaccataaagattactgccctcaaaaactgtatgattatgttacagaaaaaataaaaaacaccgatttgccaatggtgtttgaaagcggttatctgtctccctttgtagataaaacccgattttctctttttacttcttgcggttttaccgaaaggccggatacattctgtgctaaattgtgtgagggcagagttggtgtaattgttgacggtacaccgtacgctcttatttatccctataagttcaatgataattttaacgccggtgacgattacgcacagcgcccgtatttcgccgcctttacaagaattatgagatatatagcttttgtgttgtccgttgctttgccgggcttttatgtggcttttgcctcttacgcaccgcaaacccttgtcaacaaattgttgttcagcatttattattctcaaaataaaacgcctttgccgctttttcgggaggccgccgttatatgccttttgtttgaagttataaaggaggcggggcttcgcatgccgggtgcaataggaaattctgtgtcactggttgcggcgttgataataggggacgcagccgtaagtgcaggaattatcggcaatgctgttttgatagtttgtgcaatgagcgttgccacttcttttatgataccctcgttttatgagccgatcacacttttcagacttgtgtttataaccttggcagggttgtttggcatagccggcgtcagtatggcttttataatccttattatcaatgttttaaatgttgacagttttaacgaggaatatgtggataccgacatcggtagcatggataaaattttaaaggacagtttaaggaatttataatgggaaaaagctcatctttgaaaaatttcatatttattttttgctgtgctgtatttgattttacggttgcagtctctgtggaaaatagcagtacaaaaagttggcttttcaacataggtgtttattgccggctgcggtgcgttgttattttgctgccacatggtaataattttacaaaaatcgagaaattatttatcggtttatttttaattttccttattgccaaaagcactgccgccgcaagcgcatatatgaaaaactataacagcgagtacacggcactttccacggtaattatcacggtgataacggttgttttctttttattcgccgatgagaaaaaatccgatatgtatataaaatcaatgtttattatgatttgcattatgatttttgttgttctgctgtctaactacaaaaagctaaacgctgtaaatatttacagtcggcaggaggaaaaacaaacttcctatcatgtgatgcgaattttcaactttcttgtgcctacggttattctcacagacaaaagagaaaagcaaagcgccccattgaatataattttgcggttgactgttactgcgcttttcaccgtgtttgcatatatggccgtaaaaggaaatttaatgataaatatgtcgccgatggcggttttatttacggtttcctccggaaaaatgataagaaattatgacgctatatataattttcttatgttttttaatttaagcgctgttgtgggcatttacacatgggcgttttataaattaggcgcccaaaggcgtttgatgttattgttactgccaatatattttgcggtaaatttgataagcggcgtcgctataattcggtgtgaggcgtttatactttttatattattcgcaaggggagtaacagaaaaatgaaaaaaatatttttacttctaattttctgccttacattttgttcctgtgataaaagagaagatgtgtatgtaaaaaatatattcttggattttgacggggactatcaattacaaatatcctattatgattttacgcaggaagaagaaagctacggagacaaaaattaccatgccgaaaatatagaggatttctccgcacaaattatggaagatgaaaagtattccttccgcctttgtgaaaatgtgtttatttcccaagaaattttaagcaaaaatatgaacgatacagttaattttatcaaaaattcaggaatacctatcacggtcaatatcgcagtgggtacaaaaatacccgatgaagacaaggcggttcaatgtcctatatataatctgtctcaaaatcagggcaaagtaaccggaggagtggaagatggggaaaacggcggcaggtatataatatacgaaaatgaagtcatagaatttttaccgtttgaaaaatcagtctgtcttgatttactgaccgacaatataacaaatgtggaatatatctttcaaaataaaaaatattatgcggatttggacagaataaataccgcctatgccgttaaaaatgatgaatttgtaataaatattgatatgtttttaaaaagttttacaggcacagccgacaccgaaaagggcagagaagaaatgaaaaatcttcttatgtcaaacataaaaagtaacatatatcggcttatagataatgaaaatcttaaaagaatttacaattttaaatggcggcgggaacaaaaaggggatcatacaacaaaattgagaatagatataaacatatactaaaatccacaattttgaagtgacccccaaagtttagacaatattaaattatatgtgattaaagttcggtagcattttcctgctgtctgtccaaaatggcacggttataaacttttaaaatattgtttacaaattcttccggaccatattttctgctggaagccacaactctgtcacgaacctgttttctctcgtcaacagaaagagccgtataatctcttaaacgccggtcaaactcttcaaaatctttaaaagtatagccgttttcgccttgcgtaatttggtatttgttgccctcatccaatttttgcaacatcaaaagtccgcttgctcctgcttccaaagcagaaattgagtttgcctctgtaaccgacgctgtggcatataaatcacaggcatagtagtaggcggatatttcttcatggtcaactttgccggtaaagaatattctgtcggcaaaacctgtgtcccgagcaagctgtttcaaactttcgttttccgggccgtcacccattattaacaatttgtatttgtcacacttttcgctgctcttggcaaagtattcgattaaaacatcaatacttttttccttgcccaatctgccgcagaaacaaagaacaacatcaccgtctttaaaaccgtacttccagcgaatttgccgcaccttgtcccgatttacattttccggtaaaaacaaatgcaaatctgttgcgtttggtattatagtaaccggtttatgtattccgcctttttcaagtaaaaccctgccttttggagatggacttgttatctcgtctgcgtgtttggcaataacacctaaatatttgtagacaatgggtttggcaataaagttaaacatctccggcacaacataaaatgtgtactggtcatacaatgtgtgcagggtatatacaaccggcttattgagcttttttgccgcccaaaggccaaaaatgccaacggtaaattctgtttgaatgtgtatcaaatcaggattaaaatcccttaaatatttaagtctttgatgactgtaaggtattgttaccccgtagccgtaaatttttttaacgcctttggcagggcagtacagtacgccgtccttaatgtagtgggtctttgagtgagggtcagtggttacgattaaaacctcgtgcccctttttttcaagctcatctttcaaagactctatgtgtgttacaactccgcttataaacggataataatattcggtaaaaatagcgattttcattgttaaatctcctcatgttcaacaattatatcacagaattggttaatattcaattaaatatatataaaggcaaggtaaaggaattttaggctaatatattgaaattattattttactattatataataagatatagatatgttcgtttaaatatataggccggcggttgcattagttgtatctgtccgcccggaaagaggtaataatatggaatattcggtaacatttgaaaactttatcgcacagcttaatttggaagttttatccgtgccggatgacactcaaaaaatcaaaataacaagtacagaggtaaaccgtccggggctgttgatttccggattcagcaaagattttgacccaagcagaatacaaattttaggcagaatggagtttagctatctggacagccttgaccatgatgtgaaaatcgagagaatgaacaacctttttggaagagaaattccggcggttatcgtaacgagaaatatgcttatttcttccgaaattgttgagcttgcaaggcgccataaggttccgttgctacgcacaggcgaggaaacttccacatttatggcagaggcaatagcttaccttaacaatgagcttgcaaaaagaataacaagacacggtgttttggtcgaagtttacggcgaaggtgttttgattatcggcgacagcggcgtaggcaaaagcgaaacggctatcgaacttgtaaagcgtggacacagacttattgcggacgatgcaatagaaataagaaaaatttccaacaagagccttattggacagtcacctgaaaatattcaacactttgtggaactccgtggcgtgggtattataaatattgcccgcacatatggggcaggtgcggttaaacagtcccaggaaatagatatggttatcgaacttgaacactggaagccggaaaaaagttacagcacaataggcttaaacgacgaatacatggacatcatgggagtaagcgtaataaaatctgtaattcctgtaagaccgggtcgtaatctttcaataattatcgaaactgcggcaatcgtaaacaggcaaaagaagatgggctacaatgccgcaagggaactgcttgaaaaattaggcgtatccgaataatgggggaaaattatgaacaaattatatataggcgtagatttaggcggtacaaatattgctgccggcattgtggatgcagagggaaatattctgcataaaaaatctgtcagaacagacctgcctaaacccgaacacgttatagaaaatgatatttacaccctatgtatggagctttgcaaagaccgtggatatgatttagccaaagacatatccgcaataggcataggcacccctggcgcagttgacggtataagaggcatagtatggcaaaatgtaaatttcggctatacaaattggcaaataaaaacaaatttggaaaaacttttcggcaatgtgccggtgtatgtggaaaatgatgcaaacgccgcagttatagccgaggcaaccgccggaagtgcaaagggtaaaaaagatgtactgatgataacaataggtaccggcgtaggtggcggagtatacataaacggcagcatttatgcaggcagtaattttgccggcttggaagtggggcatatggttatccaaaaaaacggcaggcaatgtaactgtggcagaaaaggctgctttgaaacttatgcctctgcagcagcacttgtcagcgatacaaaggtcgccatggaaaataacaaggacagtctgctttgggaaatttgccccgacattaaaaaagtaaatgcaaaaacacggtttgacgcatacaaatcaggcgatgaaacagcatgtaaagtcgttgatgaatacatagcatatttagcggcaggtattgtaaatcttataaatatctttcagccggaagtgctttgtataggtggcggagtttcaaatgaaagacagtttttaatagatcttctcatgccttatattacaacggaagattttgcaaaaaatgctcgggaacgcacaaaaattgttatagcaaaattcagaaatgacgccggaataatcggtgcggctatggttggagtaaaaaatgattgaaaattttttgatcgaaaataaaattaaatatttaaaggacgaaagccttaaaaagcatacaacatttaaagtcggcggaaaagctgattttgtggtgtctccgtcaaatttatccgtactttcaaaactgataaaatatctcaatgaaaacgatattaagtattattttttaggtaacggctcaaatgttatttttaacgaccaaggctttaagggagtaataataaaatcacagggttttaacgattgctcttttgacggcactaaggcctacttcggtgcaggtgtttctatgacatacgccgcaaaactctgcggagaaaaaggtctttccggtattgagttctgctatggcataccggggaatatcggcggcggaatatttatgaacgccggtgcctatggcggggaaataagtcaaaatatagtttatgtaaaatatcttgatgaaaacggagatccgcaaacaatttgtaaagcggattgtaatttcggttataggcactcatgctttatggggaaaaaacggtttatattaggtgcagagttcgagcttactccaaaacctaaggatgaaataatttcgtttatggaagatattatgaaaaggcgcattgaaaagcagccacttgataaacccagtgcaggcagttcatttaaacgcccggaaggatattttgccgctgctttgatagatgagtgcgggctaaaaggcaaaagcataggcggtgcctcggtcagcgaaaaacacgccggctttatagtaaacaacggcgacgccacatgccgtgacattgttcggcttgcggatttggtttccgacactgtttataaagaaaaaggcgtaagaatagaaaaagaaatgataattgtttaacaggaaggtaaaatggattacagttttgttattttaacaggtatgtccggggcaggtaaaagccttgcggcaaaagctcttgaagatgtgggctttttttgcatagacaatatgcctacggcgttgatacttaaactacttgaacttaaagacgacttttttatgcacaataaaaaggttgcttgtgttgttgatataagaaacggaaaagattttacccggttgctgtctgcaataggtgaaatgagaaaagaatcgcactgtaaagtgatattccttgacgcacaagataaagtgcttttagacagatataaagaaacaaggcgtattcatcctcttatgttgcaaagcaatatttctcttgaaaacgcaattaaaacagaaagagcagctctttccgaattttacaataatgcagattacattattgacacatctatattgtcaacggcccagctaaaagaaaaacttttaagttttattgtcagcgatcaaaagcacactatgggtattgatgtggtatcttttggatttaaatacggtattccctctgatatagatgtactttttgatgttagatgcttaaaaaatccattttatgtgccggagctgaaaaatttgaccggcaatgaccggtcggttagggaatttgttttttccaatgaagaggcacaagaactgcttgcaaaaatgacaagtcttattgatttttctcttccgctgtacataaaagagggcaaaagtcatcttacaataggctttggctgtacaggcggcaaacacaggtcggtgtcatttgcaaatgtggtttacaaccatataaaagaacttgattactcggtgaatgtgtatcacagggatattaaaagaggcaagcggtgaaaaatacattttcaaaatcctgtaaaatcgaaaccttggataattttaaattttccaaaaacgattgctgtaatgccagttttttaaaaggatacttttttagggaaaatattactcccgatatgcaaagccttaggcataaaccggatatatttaaatccgcaaaggttgtaaaaaaacttatgagcagatatgacataaattcttatgtcatagaaaaagaacctcggaacaaagaacctatgtcggttttatatataaccgagccggaaagcctgcaaaggctttatactttacaggaaaatatataccggtgtgatgattgcccaaggcattttttaacaggcttgtttgtgtcggacggcgttgtaaacgacccaagcaagggctacaagttggagttttcttataaggacgaggataaggcaaaaaaaatatacgaaatattaaaagaaaatgattttgactttaaattgacaaagagaaaaaattcttttgttgtctacaccggtaacagcaacacgatagaaatattccttgccaccgtaggcgcacagctttcttttttacagcttgtaagcgataaagtggaaaaggatataaacaacaaaaataacagagttgcaaattttggcaatgccaatatggaaaaaaccaaaaatgccggaaaaaaagtgttggaagccattacaaagcttattgacacagaacttctttacgagttgccggaggatttgcaagaaattgcccagttaaaattggagaaccctttgcggtcgttagaaacacttggcaagatgtgctcggagcctatgacaaaatcttcggtaaatcgacgactgcaaaaactttgcgatttggctcagattgaggaataaaaatggacagagaatttgtgcatttgcacttgcataccgaatacagtttattggacggtgcttgccgtatagacagactgatggataaaataagcgctttgggacaaaaagccgtagccataaccgaccacggcgttatgtacggatgcgtggatttttacaagcgggcaaagaaaaaaggtattaaacctttaatcggctgtgaagtctatgttgccgccagaggaaggaaagataaagtttttaaggtggataaaaattaccaccttattttgctgtgtaaaaacgccacaggttatcaaaaccttataaaaatggtaacgcttgcttcaagcgagggcttttacggcaagccgagagttgaccatgagctgttgtcaaaatatcacgaggggcttgtgtgtctttcggcctgccttgcaggggaaattcctcaggctttgttgaatgacgatattgaaaaagccgaggaaaccgcaatgttttacaaaactcttttcggtgaagatttttatatagaattgcaagaccacggtatagaagaacagcgcgcgattttgcccgcacttataaggcttgccaaaaaactgaatatagaacttgtggcgacaaatgactgccattatatagaaaaatccgattccaaaatgcagcatgcaatggtgtgcgttcaaacaaacaaacacatggacgacccgaaccctttggaatttgaaaccgaggaattttatgtaaaaagtaccgatgaaatgtatgatttgtttgcgtacattccggcggcctgcgccaatacggtaaaagtagccgaaaagtgtaattttgattatgaattcggcaagacaaagttaccaaagtacgaaaatccaatgggaatatcaaacaaagatttttttgtaaagatgtgctatgagggccttgaaaagcgctacccggttattacaaaggaacttaccgaccgcttggaatacgagataagcgttataacaaaaatgggatttgttgattactatcttatagtttacgattttataaactatgccaagagtcacgatataccggtaggccccggcaggggcagcggcgccgccagtctgtgcgcttactgcataggcatcacaaatattgaccctatgaagtacaatctgatttttgaaagatttctcaacccggaaagggtaagtatgcctgactttgatgtggatttttgctacgaaaaaagacagcgagtaatcgactatgtaactcaaaagtacggcagtgaccatgtatgtcaaattataacattcggcacaatggcggcaagagcggcaataagggatataggcagggtgttgaatatgccttacggacaggttgacaaaacagcaaaacttgtgccaaacgagcttaaaatgactattgccaaagctctgaaaatgtcaccggaactgaaaaaattgtatgacggcgatgaaaaaacaagggagcttatcgaccttgcctcacaggtggagggaatgcccagaaacgcctcaactcacgctgccggcgttgttataacagataaacctgttgtggaatatgtgcctttacaaagcaatgacgggcaaatggtaactcaatttactatgacaaccatagaggaattgggtcttttaaaaatggactttttgggcttgcgaacccttacggttatagacaactgcgaaaaggctgttcaccgttttgacccaaattttaaggtgaatgaaatcccccttgaagatgaaaaaacttttaatcttttagcctccggtgatacggtaggtgttttccagtttgaatcacagggaatgacaaatgttctcacaagtcttgtgccaaaggacttagaggacctgatagcggttatttcgctgtacagaccgggtcctatggattcaatccccacatttataagaaacagacatcacccggaaggcataacctacaagcacccaatgcttaaaaatattttgcaggttacaaacggttgtatagtgtaccaagaacaggttatgcagatttgtcgtgaacttgcaggatatactttcggccaggctgatttggttcgccgtgcaatggcgaaaaagaaagccgatgtaatgcaaaatgagaaaaaccattttatagacggatgttcaaaaaacggaataagccggcagattgcaactgaaatatttgaggaaatgtcaagtttcgcttcatatgcttttaacaagccccacgctgcggcttatgcttatgtggcataccagacggcatatttaaaagcacattatccgaaagaattttgggcaagtatgcttaccagtgtttttgaaaacaccgaaaaaattcttgaatatacaaacgaatgccgaagaataggtataaaaatacttccaccggatataaataaaggctattctggatttgccgttgagggtgataacattcgctacggtatggctgccgtaaaaaatgtaggcaagagctttgtggattatatagttgccgaaagagagaaaaacggtgattataaaggtgtttttgactttttaaatcgtatgtccgacaaaagcggatttaacaaaaggggaatggaatcccttgcaaaggttggagcattcgaccaatttggcataaacaggcgcagactttatataaatatagagaacgccatgaacagcgtaaataacacaaaccgtcaaaaaatggacggccagctggatttgttcgacctgccttcggatgttgaggacagggccgacagtgtatataaatttgatgatgacgcaggcttcccgcaggccgaagaatacacatatattgataagctgcactatgaaaaagagcttgccggtatgtatttctccggtcacccgttagaaagcaatatagaatatgttaaaaatctatcaacttgcaacatttctaaattgacgaatgacggcaatcggatatacgataatacaaaacaaacattggttgccattataagcaagggcagaaatcacaccaccaaaaaagatgaaattatgggctttttcactattgaagatctcacttcgtctatggaaatggttgttttcccgaaactgtacagacagtgttcggattttcttgttcaggacaaagcaataatcgtaacaggcacaatagacataaaggacgataagcctaccattatagcagacgaaatttatcgggtgggctccgaagagggcaaaaaccttctgtccaaaaagaaaaattcaaaatacggcctttatatcaaggttaaaagcaagaacgatcccgttttcagagaaatgcctattcaccttatggatttcaagggaaatataccggtctatttctattttgaggacacaaaacagtatgttttagccccggaaaaatattgggtaaggcgttctttggcacttatggatacaatcggtttttacgccggaaagggcaatgcggtgtttgtagaataaacggaggtagagtgtaaaatgggcgaaaatgttgtaaaaggtactataggaattttgacaagcggcggcgacgcaccgggaatgaacccggcaatccgtgccgttgtgcgtgcggcgctcagcaagggctacaatgtaaagggaataaggcacggttacaacggacttttgaccgatgatatctttgatatggatttaaggtctgtatccgagataattcaccgtggcggcacaatgctttataccgcccgctctatggagtttatgacggaagaggggcagcaaaaggcggctgaaacttgcagaagatacggtatcgacacattggttgttataggcggcgacggctcattcagaggttgccttgcaatttcgcaaaagggtataaagtgtatcggtattccgggaacaatagacaacgacatcgcttgcagcgaatacacaataggttatgatacagctctcaacacggctatggagatgatagataagctgagagacacaacccaaagccatgaaagatgctgtgttgtagaggttatgggcagacattcaggttacctggcaataaatactgccatagccacaggcgcattgtgtgtccttatcccggaaatgggagaaataaacatacaggaagatgtagttgagagaataaaagaaactcagcgcaagggcaagaaaaactttattgttttggttgccgagggcgttggtcaggtgttccaaattgcggaagaaatagaaaagaacaccggcatagaaacaagagccactgttttgggccatgtgcaaaggggaggttcgccgtctatgcgagaccgtgttgttgcggcacagatgggtgttcatgcagtagagcttgtagacgatggtaagtataacagaatagttgccattaaaaacggcgctgttgttgactatgacattgaagaagcactttcaatgaaaaaggttttggattccaaacttgtggaaatttcgtatataatttcaaattgatttttgaatattaaggttctgtctttaacggcagaaccttatttttcaccctgttcttcgcaaaagaatatagtgagaatagggtgatgtttatgattaaaaagaacttatacggcaaaaaattaaaagtgagccgtcttatgtttcttttgccgccgattttggcggtttttataatattgtttgttgatttaagattaaggccgcaggtgtcggatatggccaaatacaaagtacaggggataatcacccgggctgtaaataaagtaatagctcaggaactgctaaaaaccgataccgattatgatgaatgggtaaaaatcaatgaaaattcttcgggtgatgttacatttttaacatataacagtattcttattaacaatataaaatcaaatataacctcggagataataaaatccgtagaagatataggacaaacggatatttatattcctctcggcaacattacaaatgtagatttattgcaaaacaaaggcccgaaaattaaatttacgatttcgccggcggtgtatgttgaaaccaatatagaaagcgaattcacaaacaccggaataaatcaagtgctacacaaaatttatgtaaatgtgcgggttacggccttggcgttaattcccaattatacaactaccgcaaattttgaaacgaaagtttgcatcgcccaagtaataatagtcggaaatgtgccgaataatatttcggataaaatttttcggctgggataatgttgtaattttacatataatttgttataataccatattgaggtataagaaatgaatattcaagatgcaatttcggaattggagcaattaaaaaagaccattgcttatcattccaacctttattatcaggaaaatcgaacagaaatatccgattacgagtatgatatgcttgtaaatagggtgaaaagcatagaaaacgaatttccgcagcttataaccgccgattcgcctacgcaaaaagtgcagggtatggcgtcgtcttcttttgaaaaggttgttcatacagtaaaaatggaaagccttttggacgctttttcctatgaggagttacgtgattttgacagaaaagtaaaagacgccgtgggcaaggcgcaatatgtagtggaaactaaaatagacggcctgtctatgagccttgaatatgtaaacggtgtgtttacaaggggttcaacaaggggagacggcacagttggggaagatgtaacccaaaatctcgccacaatcaaatcaattcccaaaaggattgaaaatgctccccgctttatggaagtgcgtggcgaagtatatatgcccagagcagtatttttaaaacttgcaaagca

SEQ ID NO: 2218 - DNA, 2686 bp, Unknown
  16S sequences of unknown bacteria
cctgtcgttcctttttatgatattccagaatctcttccgcaatccgctccaccggaatcccatattcatacttctgatataacggattcagccagatcgcgcgcgctacgttttctccctgatgcagaattgtcagcccatcgaccggctccagattgtttttcaaaatccggctgacacttactttgctcccttcctctgcctgctctgtcaccttttgcttgatctgctctacaaactcctgatattccaaatcacagccacctttccatgtttgattttttcgttatgtgatgctgtaaatatcatatcatctgttgtgttgatttgcaaggtgtttattatctttttatttatgtaattattgctatatattatgttgcattcagagcaacccattgaatgtagcataagcgtcacactactgcttaatactccgcgcacctgaagcgacggaatacttatttgcatccaagtgccgacaattcaaaaagccttaccaaaccattgtcttccggttcagtaaggcttctttataactgctaagcagttatttcattatactctggacaggtactcacctgttctggtgtcgatcttcagcttgtcgccggtctctacgaacagcggtacatatacaactgcgccagtctcaacagttgccggcttggtagctccggtagcggtatcacccttgaagcccggctcagtctcagtaacctcaagctctacaaacagcggagcctctactgcaaatacattgccgttgtgagaacataccttaaccatctcgttctccttaacgaacttcaatgcatcaccgatggtctcattgttcagagcgatctgatcgtagttctctgtattcatgaagtagtacagatctccgtcattgtacagatactgcatctctacgcggtcaattcttgcagtcgggaatttctccgtcggacggaaggtcttctctacaacaccgccgttgatgatatttttcaactttgttcttacaaatgcagctcctttacccggttttacatgctggaactcaatgatctgataaatatttccatccatctccaaagtaacaccgtttctgaaatctcctgctgataccatttactgtattcctccttaaattcaatcctattgcttttccttggaacaggcgaaggcctgcatactctctgccgtgtcctctcctgatattagcatatcctcctgcgacacgtcatatccatgctattctaccgtatcccgcgacttttttcaactgttttttttatatttacaagtcaatctttcgattgcgcagcatccactggcacgttataataataccataaagttaattttggcattccaaaggaggatttttatatgcttatcaaaaacggccttatcgtatcacccggcaatcagctggaacagccggcagatctgcgtatccggaacggcattattgagaccatcgcagcagcaaacagtcttactgctgagccggacgagcaggtgctggacgcttcttcacttgtcatcgcgccgggactgatcgacatccatgtacatttccgtgatccgggtcttacttacaaagaagatcttcataccggagcaatggctgcggcagcaggcggctatacaactgtcatctgcatggcaaacacgaagccggtggtcgatacgcctgaaaccttaacagatatactcacccgcgcaaaggaggaaaaaatccatattctgcagtgcgcctcgatctcccgcgggatgaagggacaggagctgaccgattttcatgcgctgcgcgattccggagcatgtggcttcacggatgacggcatcccgcttctcgatgaatcgctcgtgcagtccgcgatgctgcaggcaaagacactgaatgtcccgctctccttccatgaagaggatcctttttttattgaaaagagcggcacaaaccgtaccgctcctgccgttgcggaagatgtgctcgtcgcacgtgactgcatgatggcgcttcacacaggggcaaccatcgatatccagcatatcagctctgcgcattccgtcgcactcgtccgctgtgcaaaagcactcggcgccccggtctttgccgaggcaaccccgcatcattttactctgaccgaagaggcggtaaacacgtacggcacctacgcaaaaatgaatccgccgctgcgcaccgaggcagaccggcttgcaatcattgaaggcctgcaagatggtacgatcgactgcatcgcgacggaccacgcaccacacagtacggaagaaaagaaaaaagatgatttcttcgctgctccaagcggcatcatcgggctggagaccgcactggcgcttggcatcacccagctcgtaaagccggggcatcttacgctcatgcagctcatggaaaaaatgtcacttaatccggccaggctctaccatctcgacggcggcacaatcgcagagggccatccggctgacctcgtactcttccatccggatgaaacctttgtctgcggtaactatcagtccaaggctgaaaacacaccgtttaccggatgggagctgtacggaaaggtacatgcaacgatctgcggcgggaagattgtatggaggggctaatctgcccctcttccatttgtaaagcggacattcgcaatccatccctgcagctctgctgacagggcct

SEQ ID NO: 2219 - DNA, 32759 bp, Unknown
  16S sequences of unknown bacteria
attatcctgtattgatgggaggaattcttgtaacgggaatcgttgtcattatatccatgcttctggtagatctcattgatctggcattgaatccaaaacttcgtaaggcggtgaccagatgaaaaagaaggtaagaaagaatattttctgggtactgttgtttctggtgatcgtactgttgtgcatgacagcaccgttatatgcagtatattctcctacggaagtagatcttggcagtgtgctgcaaaaaccggatgcaatacactggtttggaacagacagttcaggaagagatgtatttacgcgtaccatgtatggtggaatggtatcattggcagtggcggcaagcagcagtctgtgcgcgctgttgtttggaatcgtatatgggggaatcagcggttatgtgggcggaagactggatacgaccatgatgaggatcgttgatattgcatatgccatgccttccaccattgttgcactggcatttcagatggtatttccaaacaaagtgctgggtctggtcatcgttatgagtcttaccagctggatgactatggcacgtgtgatccgggctcgctttcaggagttgaaaaaagaaaattatattatgctggcggaaggattcaatattccacggcatgtgatcctgtttaatcatatggtacgcaactccttttccagcattatcattattgcgacctttacctttgccagtgccattgtaacagaaacatcattgagctatcttggtgtggggattcctattggaattccatcctggggaaacatgatcaacggaatccagagttatgtactcaatggaaagtggtggatcgtgctgcctccgggagtgatgatcatcctcagttccatctgtgtgaactatgtgggtgagtatctgaaagaaaaatatgtgtcctgaggttaaacaaatgaacgacaaaactataaagcagaatattaccagattatggaaccaggcatacatcaattatgatgattgttatgcccatggtctgaaaagtgaagaggaaaaaaaggaatggctgagatttttgcgcaaagtgatcggaaaacagccatgcagtatattggatgtaggagctggaaccggatttgtcagtctgcttttagcggagcttggtcataactgtaaaggtgtcgatctgtcggaaaatatgctttccaaggcaaaagaaaaggcagaaaaagctggatttcacaatgtgacatttgcaataggtgatgcggaagacaccaaagaaccggcagatcagtatgacgtggtgatcaatcgccatctggtgtggaccttgccgcatccggaaaaagcgatcaaagaatggaagcgggtattaaagccggggggaagactggtgatcatggaaggtaactggcattataaccgtctctcagaccggatccaggtgttcttcggtaaatgtctgatcacgttggtggagcacagaaatgcattttccaatgatggtggttatgataaagacacgaaggaagagcttccgatgatgaagagcagaaatgccagacgtcttgcccagatggtacagaatgcaggactgaaagtgactgtgatccccatgacggaggtagaccgggcagagaaacaggcaatgcctctcagatatcgtctgttgaacccacataaacggatcacagtgatcggtgtgaaggaatagcagtatgaagaacatattagaagtagaagatctggggatcatgatcgatggggagaagattgtcaaagacatttctttttttgtacatgatcagcacattacctgtattgtaggcgaaagcggaagcggtaaaagtgtaaccatgtcagctgttcttgggttacttccgaaggtggcctgcaagacaaaggaaagtaagatcatgtttcatggagattccatgttctgcatctaccaggatccgatgaactcgttgaattcgtctgtgaaagtgggtaaacagctgtatcagatggcaaaagggtataaaaaaatgacccgggcagaatttgatcagcaaatgggaatcatactggaacgaatcaaatttgaagatccaatgcggacactgaacaagtatccctttgaattatctggtggaatgctgcagcgtctcatgatcgcctgtgccattctggtaacaccatcgttgatcattgcagatgaaccgaccaccgctctggatgtaagtattcagaaagagatcttacgggaatttcgtgcgatcaacagagaatatcagacggcgatcctggtcgtgacccatgattttggagtggtagcggaactggcagatgatgtgatcgtgatgcatgacggcgagatcgtagaaaaaggaagagtccttgaattgttcgattcgccgcaggaggaatacacaaagaggcttttaaaagccagttttgagggggcggaaaattgcagttagatgttttagatgtaaacaaatcttatggaaaagaatctattcttcatcacattgagttttcggtaggctctggtgagattgtcggactggtaggggagagcggatgcggaaaaagtacgctggcacgattgctgtgctgctatgagaagccggatagtggaaagatcctgttttgtggagaagatactgctggatttggaaaaaaagaacggcagcagttccggcgcagtgtacagatgatcctgcaggacagtctgtcatctcttgatcctaaaatgtctgtgggacagaccttgcatgagaccctaaaatacaatggagtttcagatatgacccggagagaggaaaagatcaggaaaacgctggagattgtgttgctgcctgccgatcttcttgcaaaacgcccttcacagctaagtggaggtgaacgtcagaggatcagtatctgcagggcattgctggtagatcctcaactgctgatctgtgatgaaatcacttcaagcctggatgtgctcaccagatatcatctgctgggagaattgaagcgtctgaacaaggaaaaggatcttccgatggtgtttatttctcacgacctgaaatctgtgaaaagtatcagcgaccggatccttgtcatgtaccaggggagaatcgtagaggaattgaaaaaagaagacggatttcgttatgaacatctgtatactgcgagacttctggaatctttgccgatcgatcatccatccaagcgggaatcactggttcataattttgaggatgaggttctgacagctgtataaagttgagtctcctataaaaatccatataaagaatactttatcaatgaaaatagctgctgtgggaagcagctattttcatgttcaaatcattgatcaaaagacagaaacacatatatgatataacaatatggaatggatatgtgcgcaaaatggaatatatcaataacccccaggagggcttatgaagataattgcaagttgttataatatatatatttgaaactaagaggtaatgttacagatgaaaatatatgtattaagaagattgttccagcttctgccgattcttctggcaattacatttttgtcttttggtatgatgaggattgccggaagtgatgtggtggagcagaagatggaaaatacaggcagtgatatttcacaggaagtggtggatgcggccagagaggagctcggtctggacaagccatttctgacccagtatgtggtctggcttggcggaatcctgcgaggagacatgggaaccagttatgtatccggcaaaccagtgttctctacgtttatttccaagcttccggcaacattgcttttgacagtcacatctattctgttgacgatccttatatctattccgctgggaatcctggcagcagtttatcagaatcatgtttcggattatcttatacggacgtttagttttatcggaaatagtcttccaaactttttcgtatcgcttttattgatgtatctatttgctattcgacttggatggtttccggtcattgcaacgggtgtcagtctgaaaagtgttgctatgccggcgattacactggctattgccatgagtgcaaagtatcttcgtcaggtaagagcaacggtactggatgaattgagcaaggattatgtggttggtgcgaaagcaagaggtatcaaattttccagaacattgtgggggagtgtgatgaaagcttccctggtgacgatcatgacgcttctgatgctgtcggtgggaagtcttcttggaggaaccgcaattgtagaatccatctttatgtgggatggtgtgggaaagatggcggtggatgctatcagcatgcgtgattatcccattatacaggcctatgtcatgtggatggcgatcatctatgtggcagtcaatctcctgaccgatatttcttatcgatttctggatccaaggatccgtctgggaggtgataaggaatgaatcaggagcaacaagtaactgtccgtatccagaaagtgaagaagaaccggatccggatgaaattgattgtatttgcagggctggcagcagcactactgctgattacgatttttgcaaagtatatctgtccctatgattcttatgcacaggatctgacgcaggccatgcagccgcccagtaaagctcatctgatgggaaccgatacttatggtcgggatatgctgtcccgtgttctgatcggagcacagaccagtatttcgtccacgtttgctctggtagcgatcattaccgtatttggaacggtagttggaattttctgtggttattacggtggaattgttgattccgtgatgatgagaatttcagatgtgtgtctggcatttccgggtcttgtatttgctatggcagttgcggctatcctggacggaggagtcaggaatgcggtcatcgcacttgctttgatcagctggcccaaatattccagaattgcaagaggacagacattatccataaaaaatctgccttatatgcaggcttcccagttggctggagattcagttttacaaatgattttccgacatgtacttccgaatatcgcaggaccgatcctggttacttctatgctggatattggtaccatgatgatggagattgcaggattatcgtttctggggttgggagcccagcctccggtggcagagtggggaagtatgatgagcagcggcaggagcatgctgcagacctatccatggatcgtattatctccgggattggccatctttgtatcagttgtgatatttaaccttctgggtgatacgatccgtgattatatggatccgaagaacactcgatcaaggtagatataaataaataaaagcagggagtaaacacatgaaaaagagaacaggaaaaattcttgcattactgctgtcactgaccatggtggcaggtgtcatggcaggctgtggttcagaaaaggctgacagtacaagtggtacacagacagaggcaacaaccagtgcagatacagctggtaagaaaacatttgtctttggagataccaccttcaatgcggaaaatgaggaatccaacattgatccgcacagtgcatactgcggatgggcatgtatacgttatggcgttggagaaactctgatgaagatcaatgattccatgcagctggagccatggatcgcagaagaatatgagctggtagatgatcttacctggaagattacgctgaaagatggagtgtgcttttccaacggaaaatcctgtgatgcagaagctgtaaaaaaatgtttggaagatctggttgcagtgcatgagcgtgcggcaggagatctgaagattgattctatggaagcagatggtctggtgctgacgatccatacaacagaagcatgtccaagccttatgaactatctctctgagccctatggctgtattatcgatatggatgagggtgtgaccgaggatggaatcgtagtaggtaccggtccttttgtggcaacggagctggtgacagatgatcatctgaatcttgtgaaaaatgagaattactgggatggtaaggtaaatgtagatgagatcacggtccgtactatctccgatggagatacgctggccctggcacttcagtctggagagatcaatgcagcatatggtatggcatatgcaagctatccggtctttgaaaatgataattaccagtttaccagtgtacagaccagccgttccttctacgtacagatgaattatgcatctccggtggtggcagacgatgcagtccgcgaagccattgctatgggtattgataaagactcatttgtcaatgtacttctgaatggatatggatatgtggcaactggtgcttttcctgatacagtagattttggcggttctacactgcatgcaaagacctatgatccagaaggagcaaaagcggttctggaggcagcaggctggaaggacagcgacggagatggcatccgtgaaaaagatggacagaagctgacgatcaaatggctgacctatccgagccgtcaggagcttccgctgcttgctgaagctgctcagagtactttaaaagaaatcggtatggatgtacagatcaatgcaactgcagatcataactccatctggaaagatgcttctgcctgggatgtctatgtaggagcgaacgtgaactgtggtctgggagacccgacaaacttcttctccacacattgtctggatgcatccaccaagaaccgtggacagtatcacagtgataagatggaagagctggcagtgcagctgaacagcacgtttgatacagctaagagaaaccagatcgccatcgagatgcagcagcagcttctggatgacaatgcgtttgtattctgctctttcctgaagatgagtatgatcagtcaggcaaatgtgacaggacttaccgcacatacatgcgattactatgagctgacagcagatctggatatcaactgagtattataagatttggacagcaattcagagtcttgttcggagggctctgaattgttgttgttcaggagtgatagaatggacgatacattattgaattatgattccgtggagatctcttttaacggaaatcctgtggttcataatatttccttttcgcttcatccgggagaaatccttggactggtaggagaatcaggaagcgggaaaagtacattgatcaaagctgccatgggactgcttggtgacaacgggcttgtgaccaagggagatatcacatataaggggaaaaaccttgtggatatgtcagagcatgagcttaagtctatccgtggtgcagagattgggatgatctttcaggatgcaggtgcttccctctgcccgattcagaccatcgggcatcagatttatgaaagtatggcagcccatcagaaaatcacaaaagcagaagcaaagcaaaaagcactggatctgttcgggaaacttaactttcaggagccggagcggatctgggacagctatccatttgaaatgtccggcggcatgaatcagcgtgcaggtatcgccatttccatgctgatgaatccaccggtattgtttgctgatgagcctaccagtgcactggatgtggcagtccagcgacaggtggtgcaggaaatgcttcatgtcagagatcttttcggaacggcgatcatcatcgtaacccatgatatcggtgtggtgtcagccatggcagatacggtgctggttttacagaatggcaataagatggaatacggaccagtgaaagaggtgctggaacatccgcagaatatatatacgaaagaactgctttcggcagtgccgaagcttagaaggagtcagaactaagatgaagccaatattacaggtaaatcacttaaaaaaagtatttcatcaacgtgggaaacgggatgttgcggcagtaaatgatgtaagtttttgtctgtatccaggagaaatccttggaattgtgggtgaatctggaagcggaaagagtacagttgcaaagttgatcacaaggctggaagatgtgacagatggtcagatcattctggatggacaggttattacccattcaaaagggacagcacggaaggaaatctatgaaaaaatccagatggtctttcagaatccggtcggttcttttgatccaagaaggacgctgggcgatggcattggagaaagtctgaaaaataaaagggtttccaaagcagagattcgagcaaaagtagctgaactgctgaaacagtgtgggctggaacctgaatatatggatcgatatccccatcagatcagcggtggacagtgtcagagagctgccattgccagagcactggcggtgaatccgaaagtgatcatctgtgatgaggcgaccagtgcactggatgtgacggtccagaagcgagtgattgatctgcttcagaatttacaggaaaataagaatctgtcctatgtctttatctgtcataacctggcactggttcagcagttctgtgaccgtgtcatcgttatgaaggatggacgggtcgtagaagaaggaatccctgacgaagtgatccagaatccaaaggaagaatatacaaagatgttggtggagtcggtattttaacagatcttccttaaaaattcataaaatcagttgacaaacagcattattttttatatcctatatttaacaattaggttaaatgttaaacgaggtgaacgagtgtgggactacaaaataccttgaaggcactggcagattcgatccggcgggagattctgaatctcctgaagaatggaccgctgtcagctggtgagatcgtggatcatttctcagtgacaggtgcatccatatcgagacatttatcggtattgaaggaggcagatctgatccgtgaccggcgggaaggaaaatttatttattatgaattgaatgcctctgtgctggaggagatcatgctttggatcacagatttgaaaggagaatcagaccatgatggaaatgattaagaaaaactggggaaagatcgtgcttacttcggcagtggttctggctgcatcactggcgggagggtatggatgggtcatgccggtggttatgctggctgctcatctgttgtgtctgctgtctgcatttggcgataaacgcattcatacgcagagcagaaaggcgcttgacattttgttttggatcatgccggtgggatccgtgcttcttgcagtgatcagccgcatatcagagagtggtgccgatgacgatctggcttcactgatcatggactgcggactgggacttctgtttcttattatgggaaattatatgccgaaatttcgccagaacggtgtgatcgggattcgtgtgaagtggacgctggaaaatgaagaaaactgggcaatgacgcatcggtttgcaggaaaatgtcttatgattgccggatgttgctgcattttgtttgcatttcttccattaggaatggcaggtgatctgctctgtatggcagcgattctgatagctgtgctgatacccggtatctactcctggagatattataagagacagcttcagtcaggaaaagtggagaagaagccggtttcacagaaagcactgatcagaggaagtatatttgcagcagtgatcatcatattttctgtctgggtattgtttacaggaagcatgcatatggtgtatgataaggaatcatttaccatagagacccctgactggaaggatctgaccatctcctatgatgagatcacgtcgctggattatctggaggaagatccgtccggcaactttgcggacagaagaaccaacggatttggcaatctggtgctggggatggggacttttaaaaatgatctgtatggaacctatactagatatacctacacttcctgtccatcctgtgtggtgttgacggtggatggacagacggtggtgctcaatggaaaagataaggctgccacaaaagaaatatatgaacgactggaagagatgaagaaaaaatgatcacactaaatgattacctgtattcgggagacacgatcttccgtattttacagaaatatacgacggatcttagaaaagacgcgaaaaagcatcggaatgaaattgatatgatgcactgcaattttctggtgcagatcagggaactattggagcacaatgatttcctgaccgcgcagtcccggaagatcacagaattttataaatatatggcgaaggaatatccttatctggcatttaccttcaaaggtcggatcaaatcgctgatccgggcggaacaaaagttcaacagctatgtagtggagtacatttatcactattacgaggaacatggaacttatccgtctgcatctcagatgaagacaagactcagctgctttcgagacctgattgcctatcggatcgtgatctgtatgccgaagtgtcattataattcagaggaagaacggacagaagaggaattaaaatgtctctatgagattgccaatgtattgccggatttcctggaggagcggggatttactgcagagcctgcacatggtgtacaggagagtatatcgcctctgatggatgagagtgttcgtccttattaccgtgactatatttcacatcacagcgaggatcagtatcagtcgctacatattacattttacgataacagctccagaagttatatggaggtgcagcttcggacgaagaccatggatgatgtggcagagatcggcgcagccaatcatctgggatatgagaagaagcaggagaaggaacgaagtaagagagatgccattccggaaggaaagaaccggtattttgatgaggcatatgagcgtggaaaacgtctgaccggtcttgatctgtccggattggatgttaatatgttcgcagccatcgataatcacctgatcaacgatggctgcggattgtaccggggacgtctgatcctgccttatgagcatctgtcccggtttcagaatgatttgattgattaacgccgtttgctaatcatgttttgtataaaataaaagaaaataggatataataccataaaacctgagtaacgtaacttgacaaagaaagtatcaatacgttattattagaataacaaaaatgaacattctatatttgatattgtgaaaaggagataatatatgttatatgaatatttaaagttaaattatcttcccaatgagccaatatttgtttctgacattgatttgcctgtgaccaacggaaatcttcgaagaatgtttaaggtattatgtgattctggaaaaatagaacgtttcgataaaggagtctattatattcccaaacaaagtcgtctcaaaggcggtgttccgttagggacggatgctgttgtaagagcaaaatatgtttcaagaaatggaaaaactgatggatattattcgggatatacatttgctaaccagttgggaattacaacacaggttccgtatgtagttgaaattgtcacaaacaatgtcagttctaggtttcgggaagtggagttgaaaggacgtaaaattatattacgcaggtcaagaactgtggttacagatgaaaattaccggatactgcaacttcttgatttattaagtaatattgcacaatatgcagatgaagatattgttactgcatcttcttgtgtaaaaacgtatattcaaaaaatggagatcagtaaaaaggatgtagatcaatatattggggaatacccggagcgaatctataaaaatatgtatgagatgaggttttttgatgtttttgcatgaagataaggaattgtttcgggatgttattgaagctacagccgaagaactaaagagaccagcggctattgttgaaaaagattattatgtgacgatgattttgaagttgttgtcagagaaggcaccagaatgtgtttttaaaggtgggacatcattatcaaaatgtcaccatgccattgatcgtttttcagaagatattgatattgcattttcaaatgaattaactcagggacaaagaaaacatttaaaaaatgagattatagcaggaatcagtcagagtcttggacttccgatatctgactgggatagaacaagaagcagaagagattacaattgctatacctttgattatagaccaattagtggatatatgcaggagagtatgcttcctggtgtgaaaatggaagtttcattgggatcaatatcatttccgacagtgaaactgccagttgatagttatgtgtatcagtatttgtggctggagaatcaagattttgtagaagaatttcagcttgagccatttgaaatgttgttgcaaagtctggaaagaacatttgcagataaagtgtttgccatatgcgattattatttatccgggaaaatacaaagaaattccaggcatatatatgatttatacatgttgttaccgaagttaactttggatgcatcttataaaaaactggtggctgaaatacgtgaacagcgggcaggtatgtcgatttgcttgtcggcaaaaagagggatgaatatttcagatattctcaaaaggataataaaagacgaagtgtatcgttctgattatgaggaaataacaacttattttcagactcatccagtagagtatgaagaagtgattgatgtactggagaaaataatacaatcaaaaatatttgagtaaaaattatcatccatgttctacactcggatccatggatgataattttagtctgtgtaagaataagtgattaacgccgtttgccggtataatcctgctttcggcgttcattgacaaaatggttcaggattccaccgccaataataatgacagcggccatgatcagcacacgtttggcaccttcctgtgggagggtgctttttgatgcaatggaagccgggtcaaaggtaagcacatactggacttcgtgaggtgttcccatggccagtgtgtcagcaatgacgggaacatcctgagtaagatcagcaatcggaatcgtgaagtgagaattggcatcttcttcactttcattcagatatttctgcccatctacgatcatatagtcataattggaactgctccaggtgatggaagcataggcaatcccatcattgagagtgagcagggtcggactttggatcgttgccttgccgcttccgccagtcatggtcacatcaatggcatattcgccgtcagtcagatcgaaaatatccgcatcattttctgcatttgcagaagcagcgactgtcctggcggcgtacaaaggaatcggacaaacaccggtcaataaaaagattgcaagaagaattgcatagatttttttcatttgctatcctccatttataggttctttttcttatacaggaaccaggaagctgctgcagagaagcagatcaaatacaaaagcagtatttcaatgcttgtataagaaaatgcttcatggttggcgatgcttctaagagcagcactggtctgggaaagaggaaggtattccacaaactgccggatgccagatggcataccctgagaagagaaaaaggtattgcaaagataagccatgggcatgatcacatagttggaaaaccgtggcacatccgcatggtttttagcgtaaaaggagactactactccgatggtggagaagactgctccgtttaaaaacatcagaaggaaggaccagccattgaagcaaagtccggttccgataggaagcaccagcagaatgatcaccatgcctgcatagaggccacggagacttccgccaatgacctgaccggcgatgaactgccacagtggggtgggagagatcataacctggtcaaatgctttctcatacagccgctgtacattcagattctgagcaatagcattaaagcttccgttcatggtagtcagtgcaaccacaccgggaatcagaaagttcagataggactgtccatgtgacatggtctgaatcccaagtccaaagaccagaatataaaggaggggagcaatcatggcagccagtgtgatcttgtaaaaatcacgccggaactccacccatttttcccataatacagtaagaattcccatgatcatctgcgttccagctgctgaccgactttttccagaaagacatcttccaatgtggtattccgcagggaagtttcgtttgaggaatcagacagaaactgaatcgcatcctcctttctgtgaaaatagtggttcttcatgccgtcaggacagacttcatccacggtataccgacccagcagctcaatcatgtttttgggcgcatcggtctcttccagaactccattacacataaagccgacccggtcacagagagtctcagcttcttccatataatgagtggtcagaagaatcgtcagattctgctggttcagctttttcagaagattccacatctgacggcgggccagggcatccatgccggctgtcggctcatccagaagcagaatctcaggttctgtcagcagagcacggcagaccatgagctttcgtttcatgcctccagacagctttcggaccgtacgtcgccgataatcaatgagaccgcagaaatccagcagttcttccgaacgctcccggatcttcttgatcggcatataataaagtcttccctgatattccataatctcatccatggtcatatcctgtcgcatggaatactcctgggtgatgacactgagttttctctttaaccgattattcttgcgggtcagccgctcgccatcgatatagatctcaccttctgagggaagcagaagagtggagagcataccgatagttgtggtctttccggcaccattaggtcccagaagcccgaaaaattcaccagtctcgatcttcaggttcagatcactcaccgccagaaaatggtcatattttttggtgagatgttttaattcaatcatgatgatcttctttcacaacaataatagaataatagcttgcctgatccggaatctcatccacaccgtgataaatgtgttcctctggcattccacagttctcgatcatggcacctttcaagtcgttgcgcttgagtgtctcttttacaatcggcatcttggaagctgctttcatcagtaccttggttcccggaagcttcagaccatcttcgatatcataggtagatgggatcacatggagctgttcagaacgatccaccagactgtcacctaatttggcactgactgcacagaaggacgggattccgttgacgatctcagtttcatagccttttgcctttacaagacgatggatatagatataggtactgtagatggtgggatctccaagggtcagacaggctacatccttcccctgttccagctgttcgatgattgtatcggcagcggtctgataagctgcatccagaatggctttgtcttttgtcatgggagtggagaggttgaggcattcctttgcatcaagatcctccacaataccacttgcgatcttgtaagcgactgcttttccttttccgtctgcaggtacagcgatgaccggacaacgtttaatcgtgtctactgcaagataagtcataagacgcggatctcctggtcccacaccgataccatataatgttcctttcatataaacacatccctttcttttttacacttgaaattttattctaacataaatgaaaaaaaagttcaatggaccattgacaaatatgcaaaacagatggtactatatagccactaaacccgtcagggaagtggattttaccagaatataattctgattttcgccacacatcattttgatgtgtggcttttttgcgtaactacgagccgggcagctgggcgtgctcaggatgtgagcggggagcttgctcaccggcacatatctgagtgcggacagatatgcggcgacagccgcagaagtgagaaagtcgaagactttcgaacctgcctcggcgagtaataaataagttctgaagtatgcatcaaacaccaaggaggaatcgtcaatgaataatgaatcatttatgaaagaaaaacctgtaataggattggtactgtccatgtcattgcccatggtattttccatgatggtcaatgcactttataatattgtagacagtttttttgtggcaaagatcagtgaagatgccatgacagcactgtcgcttgtatttcctgttcagaatctgatgagtgcagtgtcgatcgggtttggtgtcggaatcaatgcagtgatcgcattcttcctgggagcaggagaaaagaaaaaggcggatcaggcagcgtcactgggatttttctggaacgcggtacaagggctggtactgacagtggtatgtattgcaattattccggtattcctgcgtctgttcagtaatgatgaaagaaccatcggatatgcgctggaatattcaagaattgtatttttatttggcgtgatcatctcttgcagcctttcctttgagaagatttttcaggcagtgggacgtatgaaggtttccatggcaggtcttctggttggatgccttacaaatatcattctggatccgatcttgattttcggagttggatcatttcctgggatgggaataaaaggggctgcattggcaaccgggatcggacagatggcaacggtggttttatatgtaggaatctacattatccgccctatttctgtgaagatcagcatttgcaatctggattttaagagcggaatcacgaagagattgtatgccatcggtattccagcaatcctgaacttggcgcttccgtcgcttctgatttcttctttgaatgcgatcctggcaggattttcagaaagctatgtcatggtccttggtgtttattacaagctgcagacatttttgtatctgacggcaaatgggatcgtgcaaggaatcagacctctggtgggatataattatggcgcaggggagtatggaagagtgcataagattttcaatactgcactgacattttctgcagtgatcatggtgtttggaacaggactgtgtctgttgatgcctgagcatctgatcggtatgtttacaaccaatacgcagacgattcagatcggtgccagtgctcttcgcatcatcagtattggatttgcggtgtcatccatctcggtaactgcatgtggcgcgcttgaaggactgaatatgggaactccatctctgatcatttcactgctccgttatgtgatcctgatcattccggctgcatttgtattgagccgttttcttggagctgcaggtgtatggcatgccttctggatcactgagtggatcacagcagctgcgtcctggtatatctaccggaaacatgcggttgggaatgcataacatgaaaaactgtcttggacatgcggtaatggtccaatgagacagattcaggaactggcaaaatatatccccccgggaggcttgtaaaagttttaacaaaccggtatgatgatatccacagaaagatcggagagagaaactatgagtcatacactggaagagatccgcagctattggaacagccgggcagaaggttacacacagagtaaccgggaagagctggaaggcgagagcaggatctactgggaaaaacatatcacagaggcattgagaggacaggactgtgtacgcgtactggatgttggctgcgggcctggatttttctctgtattgctggcaaagatgggccatgaagtcaccgccattgattacacggaaaacatgctgacagaagccagaaaaaatgcagaacattatggagtgcaggtgcattttcaacagatggatgctcagcagctggagtttgaagacaacagctttgacctggtcatcagccgaaatgtgttgtggaatctggaaaatcctgagcaggcttataaagagtggtttcgagtattaaagccaggcggaatcttattaaactgtgacgggaatttttactattatgtgaccgatgcagaatacggggatcggacaagatgggaacacaagcatatgaatggtgtctgcgccaatcccattgatcggatcggagaatccctgccaatggcgagagaacttcgtccccaatgggatgacagaaccctttgtgcattgggggcttcggaagtgacttcagaagtaaccaatgaaaaagatctggatgatggacatcgtctgatcctgaattttgtgattcgtgcggtaaagtagtgagtccataaaagcggtatcggggtcaaccgataccgccaagtgcgatcccgaggatcaacacaagaaaacagacaggaacataaatgtatttgcagacgggatagaacatcttgataaaaggtgtctcccgtcctttgtttacctgagattctacgtaggatcgaccaaatacccagaagaacatgatgcctgcaagacctgcaccaagcgggcagatgtagatagacagcacatccatccaatcagagacgatcccctggatcagcagagagacgatcataccgatcccagcgatgatggcgcaggatgctttcctgccaagtccggtcttttcctgaaccgttgcgacaggagcttcataaaggttcatcagagatgtcattcctgcaaggaagactgcggtgaagaagaggatggcgatcagccatccgccaggcatggaacggatcagatggggcaggaagataaataacagtccaggaccgccctgatcaagctgtgcaccggtggttgccatggcaggaatgataacaagtgctgccagcagagctgccagtgtatcgaaaaatccaactcttgcggcagaggcagggatatcttccttatcggataaataagatccgtagatcaaggtaccatttccggcgacggacaaggagaagaatgcctgccccagggcaaagatccaggtgttcggatcagataatgctgcgggatctacgcggaaaatgtactgatatccagcgctggatcctggctgaaatgccacgtagatgccaaggatcacaaataagacaaagaaaatgggcatcatgatcttgtttgccttttcaataccgcttcccacaccgaacataaggatcacgacacagatgcaaagtgccagtacctgccagagattatttcctccggcagatgccatagtgctgaagctttccgtaaatccatcaatattctctgcagatagggtggaaccggtaaaagttcctaccatatattttaagatccagcccatgactacggtataaccaattgccatggcaagggcaccaaggacagggatccagcccagtatctcaccaagttttcgattcccttttgtctcgcaggctgtaccgaaagcatcgatgggaccggaacgggttcctcttcccagacacatttcgccgatcacgccggtgaatccaatcagaataacaaagatacagtaagggatcagaaaagatccgcctccatataaagagactctggtaggaaacatccatatatttcccattcctacagcagagccgatgcatgccaggataaatccccactggctgttaaatgattctcgttttttcatactacttttctcccatttttacatatatgaagaaagtataccacgaaatgcgagaagttcctataacaaaatgtcagttgaactggcagaatgtttcatgatagaatacaaaaaatatatgttagaagataaaagaaagggatgaaatgaatgagaggattatattcttcaaagactaagatccgtcatgagatttttacggagatcgcccgcatggcttatgaagacggagactgcagacagatggagcagctgccttataagatcgtaccgggggaggttgcttcttatagagaaagtatttttctggagagagcagttgtaggagagaggcttcgtgtggcacttggtctttctcttagaaagatttccgagcattccctgatctccgagggagtggagaatagtctggtggaggaaaaatattatgaaccgcctctgatcaatattattaaatttgcctgtcatgcctgtccggagaaccgggtgatcgtgaccgaaggatgccagggctgtctggaacatccatgtaaagaggtctgtccgaagggagctatttccatggtaaatggaaagtctcacgttgatccggagaaatgtatcaaatgtggcagatgcgtggaggcctgtccctataatgcgatcattcatcaggaacgtccgtgtgcaaaagcctgtggcatgaatgctattcattctgatgaacatggaagagctgagattgatcaggagaaatgtgtgtcctgtggtatgtgtctggtcagctgtccgttcagtgccatcgttgacaaaggtcagattttccagaccattcttgccatgaagacaggtgttccggtttatgcgatcgtagcaccggcggtagctggtcagttcggaccggatatgaagccggagaagatccgcccggcatttcaggcattgggattcgaggatgtgatcgaagtagcggtaggagcagatctctgtaccattgaggaagcaaaggacttcatgaaggaagtaccggaagagctgccattcatggcaacttcctgctgtccggcatggtccatgatggcgaagaagctgttcccggagcaggcaaaatgtatctccatggcattgacacctatggtgcttactgcccgtctgatcaaacagcagaatccagactgcaagatcgtctttgtaggaccttgtgcagcgaagaagctggaagccagccggaaaactatccgcagctatgtagattttgtactgacatttgaggaacttcatggtatgtttgatgccaaaggggtagacttcaaggaactgccggatggagagccgctgatgcaggcaagtgctgatggccgtggatttgcggcaagcggtggtgtggcatctgcagtagttaatgcgatccgcagaatggagccgaaccgtgaggtgaaagtagtcagcgcagaaggtctcgccaattgtaagaagatgctacagcttgcaaaggctggaaaatacaatggatatctgttggaaggcatggcctgtccaggtggttgtattgccggagcaggaactattcagccgatcaagaagacagcagcttcgttggaacagatgaagaagcaggcgccttttgaggaaagtatggatacggtatacgatgctatgcttccgatcctcgaaaagttgtaaatctataaagtaatgcaaaatatccatggaaatgaaccgcatgcttgcatgagcggggcatagccatggatattttatatggcgcatagcgccacatgagcaaaatggaaagcctcgaagagacgattttatttactgcagattaattccgcctctggtcagtgttttgcggatgacaacggcaaccagcatagcacccagtatggacagtatatcttttaccagatacggtacagataccagcagaaaggctgccggaaaagtgatctgagcaatgatagaatagtggaaggcacccagtacatggcagatcagtaagcccacaacaccaagaccgaaggaagcgactttatttttcagatgaagaccaagaccacagaaaaatgccaggaacaggaaaccatagaggaaaccgccagtgtagcccaccagttttccgatacctgcagtcataccggtgaagacaggaactccggcaaagccaagcagaaggtataacaggacacataaagttccgtttttacggccaagcacataaccgcacagagctactgcgaatgtctgaagggtgataggtacgccggatggcataggaatctgtaaaatagagagaactgccagaacagcagtaaacataccgatggttgtaatagttgcggtgctaaatgaatgttctttcataatagtaaactccttgttaaaatttgtttactattatagaaagaattcattcgaaagtcaagtttcgttattctgagattattttgtgggagagctgcttgatcttttcaaagctctcatcgctgatcacgtgctccatacggcaggcgtctttttttgcaatcgcttcgtccacaccgatagagatcagaaactggctgataaccaggtggcgttcatagatcttcagtgcgatggataagccggatccagtcaggatcagattaccgtgttcatccagcgttacaaagccattctcacgaagtcgcttcatggcaacgctgacacttggcttgctgtattccagatagttagctacatcaatggagcggacatttccaagttctcttgagagaaccagtattgcttccagataatcttctggtgattcctgcattttcataggatcattcccccgttgttaatagattgtcatgcacacagcataacacagttgaacttggattgcaattgaaaatcctgtggaaagcaggtataatgatgcatggaaaaggggggaaaggctatggctctggttagtcagtctgaactggcgggaaaaataatcaaattgaccgccatgcggttggatacaaagcttccatggcttacggaagccattcatctgccggaatgtagttttgatttaaaacagacatctggaacagacggaagcaggctttgctggaatacagaagaggtctttaagacctacgcagaagatcccgttcttctggaacggagatacctgcatctgatcctccatcttctctatctgcatccttatcgcagaaaaaaagagacagaatacctttggtggctggcctgtgacttgctgacggaataccgcatagaccgaatgaatatagcagggtttgaacgccctgttcctgtgggcagaagccggatctatcgaaagctcaaggaagaaaaggttgtgcttcaggaacattctctggcactctggctggagaagcagaagccagagatgataaaggaactggaaaatgtttttcgaagagatgagcatgcatactggcgacagatggaagcatccttgccgtcagaacagcgaatccgcagggaaaagataccagatcaggcagttgtcggactgcaaaagcagctgacggcaatgcatcgctggcgaacggtctttgagtcattggagctgcggaaaagtgaacacaggcggcagaagggcggaagcgccggagacgcggaagagatgatcgtgcttcagaaggaacgaggatatgactaccggcagtttttgcagcagtttgcagtgactggtgaggaacgatgtctggatatggacagttttgactatattccttatgattacagccgtcggatgtatgaacgactggtgcttctggaaccgttggaatataaggaagtccgccgtttatcggatctggtaatcgccattgatacatcaggctcctgttccggggagattgtgcggcggtttttggaggagacctggagcattctcaatacagaagggcaattctttcggaaaatgaacctccatgtgatccagtgtgactgtgtgatccaggaacatgaacagatcacctgcgaggaagagtggaaagagtatcttgacaaggtcaccgtaaaaggtggaggagatacagattttacgccggtgttccggctggtggaggaactgcagaaaaatggcaggctgaaaaatctgaaagagcttctctattttacggatggagatggtatctatccaacggaacgtccagaatatgaaaccgcctttgtatttttgaatgaagcactgaaaaaaggaaaaccgccagcatgggcacacagcctgacactggatctatgcgaggagacgaccacatgaatataagggaagcaaaagaagagattattcgcaccataaaggcctatacggctgtggatgaagatgatcagccagtgatcccgatatctgcccagcgtccattgcttttgatgggaccgccgggaatcggtaaaacagcggtgatggagcaggcagcaaaagcctgtggtgtgggacttctgtcctatacgatcacccaccataccagacagagtgcagtaggattaccggagcttgttcacaggacctatggggaaaaggaatatacggtcacccagtatacgatgagtgagatcattggttctgtctatgaatatatggaacggaccggtcataaaaagggaattctgtttattgatgagatcaactgtgtatctgagacgctggcgccgacgatcctgcagttcttacagtttaagacgtttggtacccataaggttcctgatggctggatcattgcggctgcagggaatccttcggaatacaatgcatccgttcgggaactcgacatggcggcgctggaccgggtgcgcctgatccatgtggaagcagactttggcgtatgggagacttacgcacagaagcgacaggtacatccggccatattgtcctatctggttatgcatccagaatctttttacagggtggagctgaccagagaaaagagacagtttgtgactgccagaggctgggaagatctgtcacggacattgaaggaatatgaacggcaggagttgcaagtgaccgatgcttttatggaagaatttctgcggtgtcctcagatcgcggcggatttttctacctattacaggctttaccaggcgacggccggagcgtggaagattccggagtatctgaaaggaactctgacagctaaggaacgggcggcacttctggaacagtggaagaatgccggagcagaagagcgttgtatggctgtgcgtcatctgctggcggcagcttcccggtggatgagtgacctgggaagagagagacgatatctgaagcgggaaaaagaagtgctggaacagttggtgatggctgccgggacaaggacttctgcagaattttttgcagatcgggagcaggcgcgccggatcaaaaaggaacatggcatcttagaaagctgggaagaaaagctggaaatccatgtggatcgggaactgaaagattgcctgttagggcggcagatgaccggacagcagacatcggagcagatacgcaaggagcaggccggactggaaacaaagcgggaagaactggtcagagcacttaccagaacaacggaagatctgaaaagtgtattcggagaagatctggagctggccgactggctgggaggaatccgggaacaaggagattatgaatggtgtgggtttgatgcctccgggtatgatccactcatgatagaaaaaagattagaacaacaagtaaagcgccagatggcggaaatggaggaacattatgaaactgatgatcgcatctgatattcatggatctgcatattattgcagaaaattactggaggcatatgacagggagaaggcaggacgtatggtgatcctgggagatatcctttatcatggaccgcgcaatgatcttccgaaggaatatgcaccaaaggaagtgatcgctatgttaaatccgagaaagaaggacctgctgtgtgtacgcggaaactgtgatacagaagtggatcagatggtactggaatttccaatccttgcggattatggatttttatacgagaaagggcgcatgatcttcctgactcatggacatgtatttaatgaaaagaacctgccgatgctgggcaaaggagatatcctgcttcatggacatactcatgtgccggtatgtcgggagcatgaagactatatttatatgaatccaggatctgtatcaattccgaaagagaacagtgcacacagctatatgacttatgaggatggactgttccagtggaaggatctggatggaaatgtatacatgaaatatggaatttaatggataaatattcaaaataactcttgcaatcgtgaataaaagatgtataattagtcgcagacaaggtcttagataatgatatgaggaggaaatattatgaaaaagaaaattgtaagcgtgattctttgcgcagcaatggcaaccaccgttcttgcaggatgtggaagcagcaacactgcatctaccgatgcagcagccgaggagactactgaggatgtagaggctgaagctactacagaagaggctgaggacgcagaggctgctgaggaggcaacagatgcagcagaagttactactgtagaaccgggagtcctgaccatgggaactaacgcaacatttccgccatacgagtacaaagatggcgatgctgttgtaggtattgacccggatatcgcacaggcactggcagataagcttggcctgaaactggaagtggttgatatggagtttgattctctgattgcttctgttcagtctggaaaagttgatattgtactggctggtatgactgtcaacgaagagagaaagaaaaatgtagattttacagatccttatgcaaatggtgtacaggttatcatcgtagctgacggttctgacattgcaacctttgatgatcttgcaggaaaactgatcggtgttcagcagggaacgaccggacatgtatactgttccgatgactggggcgagggaaatgtagtagcattccagagtggtgcagcagcagttcaggcacttcagcagggaaaagttgattgcgtagttattgatcaggagccggcaaaagctttcgtagaagcaaatgacggattgaagattctggatacccagtatgcaaacgaggattatgcagcagcagtttccaaaaagaatccggaactgacagaggcactgaacaaagcacttcaggagctgaaagatgatggaactgttcaggagattcttgacaaatacatcaaagcagaataagcttacttattagtaaggagcatcagcggaggtgttcatttatctgaacacccccgctttttggcggaataagatagagaatatggatatataagaagcaaagtctcaaaaagttgctgtttatatatccatattggggaaaacgaaaggagaagaagaaatgttagaaagcctgaaacttggattatatcagacttttatactggatgataactatcagtattttattaagggtcttggaacaacattaacagtaactatatttgcactggttctgggcgtgatcctgggggtgatcgtggccgtgatccgttctgcgtatgatcagcagccagagaagaagaaaggactgccgcttaagatccttaatggaatctgtaaagtgtatttgacggtaatccgtggaacgcctatgatggtacagcttctgattatgtggtttattgtatgggctagtgcaagatctactgacagcaacatgctgcgctgtgcaatcctggcatttggaatcaattcaggtgcttatgtggctgagattttccgttcaggaattatgtctatcgataaaggacagatggaggcaggtcgttcggttggactgacttatgcagcaaccatgcgatatatcattatcccgcaggcatttaaaaatgtattgccggcacttggcaacgagctgatcactcttgtaaaagagacttctgttgtaaccgttattggtcttcgtgatctgacaaaaggagctatgatcattcagtccaagacctatcaggcaatggttccgtatctcgcgattgcagcaatctatctggtgatcgtaatgttcctgacatgggtcatgggcaaaatggaaaggagactgagacagagtgatttacgttaaaggattatccaaatcatttggtgacaatcaggtcattaaaaatattgatatgcatattactccgggagagaaagtggttattatcggaccgtccggttctggtaaatccacatttctgcggtgtctgaatctgctggagatcccgacaggtggaaccatcacctttgatggacaggaaatcaccgctccaggtgttgatatcaataaggtccgccgtcatatgggtatggtgttccaacattttaatctgttcaataacttgacagtaaaagataacattatgctgggaccggtgaaacagaagctgatgaccaaagaggaagcagaagcggaagccctgcgtcttctgaaactggtcaatctggaagaaaaagcagatgcttatccggcacagctttccggtggacagaagcagcgtattgcaatcgtccgttctttggctatgaagccgcgggtcatgctgttcgatgagccgacatccgcactggatccagagatggtaggcgaggttctggagctgatgaagaagcttgctgacgatggtatgaccatggtggttgtaacccatgagatgggttttgcaagagaagtggcaaccagagtggtattcatggatgaaggaatcattatggaggaaaatactccgcaggagatcttcaacaatccacaaaatgagagactgaaaagttttcttgcaaaagtgttgtgatttttaatgttctgtgttaatatatatctgtttgacacagaggaggtgggtaaatgacgattttgaaatatgtcctcatggtactttttgtactggtgtgtattattgcaaccgttctggttctgatgcaggaaggcagatctcagggacttggcgctatcgcaggtgctgcagagacttactggggtaagaataaaggacgttccatggaaggaaatcttgtgaaatggacgaagattctgacagtagttttctttttgctggcaatcgttctgaatctggatattttttaatattcagaagactgtgaatgtctctgaataactttacagatttacagggcactcttggacatcaggagtgccttttgttatctgatgaaataagaaaatgtaagtgaggtgaagatcatgactggtgaacagaagaaacagaaaaaggaaatgcttgtggaattgatgagcaatgacttgtatgtaccgatgaagatcaaggaactggcgatccttctgcaggttcccaaggaacggaggcaggaattacaggaagtgctggatgaactgatgttggagggtaagatagaggtttcggcaaaaggaaagtacagtcttggtaaaggtaagcttctgacgggggtcttcactgcacatgcaagaggctttggctttgtaactgtagaaggaatggaagatgatatttttattccggaacaggaagtacatggagcacttcatcaggatgtggtgcagatcgtggtaaagccggggcagagtggtaagcggcgagaaggttctgtgaagcagattctgacccgaggaactactcagctggtaggtatttatcagcagagtaagaattatggatttgtgatcccggataatgaccggtttgccagagatgtatttattccaaaagaagcctctaaaggggccatgaatggacataaagtagtcgtgcttttgacagattatggtgatgaacgtaggaatccagagggaaaagtcattgagattctggggcacattaccgatccgggaacagatgtgctttccattgtaaaaggatatgatctgccgacagaatttccggaaaaggtcatgaatcaggcagaacgtgtgcccgaccagatcagtgaagcggatatggcaggcagaatggacctaagggatgtacagatggtgacgattgatggggaagatgccaaagatctggatgatgccgtgtctctgaccatggaaggagacaagtatgtactgggtgtgcatattgcggatgtatctaattatgtacaggagaaaagtgccatggaccgggaagccctgaagcgcggaaccagtgtatatctggtggacagggtgattcctatgctgccccgcagactgtccaatggaatctgctctctgaatgcaggggaggatcgtctggcattgagctgtatcatgaccattgaccctaaaggaaacatcgttgaccatgagatcgcggagactgtgatccatgtggatcaacgtatgagttataccagtgttcagaagatcctggatggagatgaagagaccgtgaagaaatatgaagtactggtgccaatgcttgtacggatgaaggaactggcagcacttcttcgggaaaagagacgggcaagaggatccattgattttgattttccggagaccaaggtgattctcaatgaaaagggggagcccatagagatccgcccgtatgagagaaatacagccacccgcattattgaagattttatgctggcagccaatgagacggtggcggaggactgtttctggcaggaattgccatttgtgtaccggacgcatgataatccggatccggaccggatgcgcaaacttgcggcctttatcaataattttggatattctattcatctgaaggatgacgaggtacatccgaaagaactgcaaaagctgttggcaaagctggaggagacaccggaagaggatctgatcagccggcttacgctgcgctccatgaaacaggcaaaatatacgacggagtgcaccgggcattttggtctggccgccaagtattactgccatttcacatcaccgatccgaagatatccggatctgcagattcatcggatcatcaaagatgtgctccggggtcggatgaacggaacaagagaagaacattaccggagtattttgccagaggtggcccgtcagtccagcgagcgggaacggaaagcggacgaagctgaacgggagaccatcaagcttaaaaaagtagaatatatgagtcaccatctgtgggaagagttcgatggagtaatcagtggcgtaactgcctggggcatttatttggaacttcccaatacagtagagggactggtacgcacagcctctttacagggtgattatttcgagtataatgaaagtgcatgcgcaatggtcggtgtacataccggaaagtcctatgccattggacagaaggtgaaagtgcaggtgaccggcgcagataaaatgaccagaaccattgattttgaactggtggaaggaatcaggagcacagaggaatatggcgaaggatagtattaaactgatagcaaataacaaaaaagcgtatcatgattattttatcgaggacacctgggagacgggcatttctttacatggtacggaggtaaaatcccttcgtatgggaaaatgcagtatcaaggaatcttttgtaaggattgagaagggtgaggtgtttgtctatggcatgcatatcagcccttatgaaaaaggaaatattttcaaccgcgatccgcttcgggtgcggaagcttttgctgcacagaagcgagatcaacaagatcgtcggaaagatcgcagagaaaggttatacactggtgccgctgaaggtgtatttcaaaggcagtcttgtgaaagtggagattggtctggcaaaaggtaagaaactatatgataagcgtgcggatattgccaagaaggatatccgaagagaagcggaaaaagagtttaaagtaagaaacctttattaaggtacaaaaatacaaaggggaagagaagatatggtatcatttatcggagcaggcccgggtgacccggagcttttgacaatcaaagggaagaagatcattgacagcgcagatgtgatcatttatgcaggatctttggtgaatccgcaggttctggctggagcaaaagagggagcagtgatctataacagcgctaccatgcatctggatgaagtgattgatgtaatgaaagatgcggaaagcaaaggtctgaaagtagccagagtccatacgggtgatccggcgatctatggagcgcacagagagcagatggacagactggatgagctgggtatcgaatatgaagtaattcctggtgtcagctcttttctggcaactgcagcagcattgaagaaagagtacacacttccgggcgtgagccagactgtgatcctgacccgtatggagggtcgtacgcctatgccgccgaaggagaaactgatcgatctggcacagcacaatgcgaccatgatcattttcttaagtgtaggtatgctggatgagatgtctgcgatccttcgtcaggcataccggccgactacaccggtagctgtggtatataaagcaagctgggaagatcagaagatcgtagtcggagatctgaccaatattgcagagcgcgtgaaagcggctggtatccataagactgcactgacggttgtgggagatttcttaggggatgagtatgagctgtccaagctgtatgataagacctttacaacagaattccgtaaaggagtgacagactaatggatatctcgctgatcagcatcagtcacaagaatgctccgctggaagtgcgggctcgttttgcatttccggtggaagcgcaggaggaactgatgcggcaggtaattgcgcggaatatagcggaggagtgcgtatttatcagtacctgtaaccgtaccgagatctatacctatcatgcctgtccgggcagcaattttacaaagatgcaggcattgctctttgaatttgccggaattcaggtggaggaagagatgggcgactatgtccgtatgtatcagggaagcaaagccattaagcatctgttccatgtggcagcaggactggattccatggtgatgggagaagaccagatcctgggacaggtaaagcgtgctcatgagcaggcgcatcagatcggaacctgtggggtatatcttaacaccctgttccgttatgcagtgactgcagcaaagaaagtaaagacagagacagatctgtccagaacaacggtatccatggctaccatggctatcaaagcagctgagcagggcttggggacacttcacggaaagaaagttatgctgatcggtgcatccggcaagatcggcggtgtcgtactgaagaatctgcagtgcattgaaggagcaaaagtctgtattacgtccagaaatatgagtcaggctaaggaagatcatcatcatcggatcacatatcaggtcatggagtatgac

SEQ ID NO: 2220 - DNA, 32759 bp, Unknown
  16S sequences of unknown bacteria
gtgagcatcgagggtgcggatgcgattgtaaaagacctcaaggcgatggatgacggcgcggcggctgtgctgatggatggcgcaaagaaaggcggcgagatagcacttgaggacgctcgtcagaattgtcccgttgataccggggaattgaaagccagccttgctatgacggaggataaagcaacggcgacgaaagcgaccgtaaaagtggattatgataaatccatccgttacgggacgtttgtcgaacttggtgcgcgtgggcgaccgggaaatccgtttttgagaaacgccgtcgataaaaacctcgaccgtatcaatgatgcgattgttacagagatttcaaaggcggtagggagggaactgtgaaagatatttgccaagcggtgttcgagtatttgagtaccagggaagagattacgacacaggtcgggaagaggatataccccattttactcccgcaagatgcgccgctgccgtccatcgtatatgcgcctgtgcttgcaaactacgactctgctttacagggcgataccgggtatgcgagacagacgattcaggtcgtttgtcatgcccggacattcaaattggcaagagaactttccagagatgtaaagaaaagtttacaggattatcacggcgatatgtgcgggctgtatattcaagccgtgttcattaaatcggattatgagtatgacgcgaatacatcgctcaaattttcaatggatgagtatatgtcgagcatcgaattcgaaatccattataacgaaaaataggagggtaaaatggcagtagcaggtaagaatgggaaagtcgtcatcggcagtggcggagaggaaaaggtggtcgggattaagtcctggtcactcgaattgtcccttgaaacattggagaccacggctctcggtgatgattggaagaattatattgcggggctgaaagaatggacggcatcgagcgagggcgactatgaagtgcctgtcgatgcgacagggcaacaggctttgcaggacgcatttttgaacggaacgaccgtacaggtaaagttgtatgtggacggggtgaattattactccggcgaggcttacatcaatagtctttctatagaagaccctgtggatgacgtcgtttccatcagcatcgaatttacaggcacgggtgcgctcacctttgaaacgggcgaataagggggagaacatgaagaaaggtgtaacaatcgaacttgacaaaccgaggactctgcggtacggcatgaatgcacttgcgaaaatcgaggacattacgggaaagaccatcatggctctcgaccttaactcgcttggaatcaaggacttgctcgtcatcgtatatgccgggctttgccatgaggataagagtctgacgattgaacaggtcggagatttattggacgaatatgccgatctgacaatgattgcggaaaaggtcggagaggcactgaccgaggcgttcggaaaaccgaaggggaacgaaaagggggaataggagccgccgactttgacttgtctgctttcctggaaaaggcggtcgtgcaatttggcatagacccgcttattgcagacgagtacacgccatacgaattataccttataggtaagcaggtgcaagaacggaattttcgggaatttgaaaatgcactcacagttgcatggcatacggaggcatttgcgcggcagcgtaggctaccgaaactcgaaaagattctcaaagaggtgcgaaagccatccaggaaagcggagagtaggagcgatgccattctcaaggcaatggcggcggctaaaggagtgattataaaataaggagggagagtcatggcaatcatacgaaatctggtcgtcaaaatcgcggctgacatttcctccttgtcaaaaggactacaaacggcgcagaagcaaattcagaaagttgcctcctcctttacgcgggcggggacaaaactgacggcaggagttaccgcgccgcttgtagccctgggtgcatcggcaatcaatatctcaaaatcgtttgagcagagtatggcgaacgccgcatccgtcgcaatggcgaccggggatgagttgcaagcgatgacagacctcgcacgcgaaatgggtgcaaagactgtcttttcggcttccgaggcggcggatgcactctactatatggcatcggcaggttataagttggacgagatgacacagtccatcgaagcgacactaaacttggcatctgcgacacagagtgatttggcttttacaacagatacggttgtcgcagcgttaaaccagtttcaactcggggcggcgggcgcagagcgagttgcgaatctatatgcggcagccatcggcgcatcccaggcagatatggagaaacttgcattctccatgaactatgtcgggcctgttgcaaacagtctcggttgggagatcgaggaagtcgtcggagcgttgtctgtgctatatgatgcgggctatgacgggtcaatggctggtacatctttgcgccagtcgcttgtcgcgcttatgaatccgacctcggcggcgcagaaggtatttgacgatcttggtatcagtttggagcaacttgacccgacctcaaacgatcttgcctcaatcctcgataccttatcgaacgcaggaatgacgactgcacaggcaatggaagtgttcggcgcgagagcaggacctggtatgttgtctttgttggcggcgggcggtgatgccgttcgtgatatgacagaagcaatcacgggaacaaatgcggcgaatgatatggcggcaatgcaggtcgataccttgcagggacagctcaaaattttggaatcggagttggaggaggtggctctccaatttggggatattctcatcccaatcatccgagaactgctacaaaaatacatttcgccgctcacaaacaagctgatgagtttgagcgcaggaacgaaaaagaatatagtggttattgcgctccttgcggcggcgatagggccgctcctgcttgtggtcgggaaattgatttcaagcgttggaacgatcatcaaacttgggtcgctattgttctcgaagacgggactcatcattgcggctatcgtcgcagccgtggtggtgattaaaaagctgtgggataccaatgaggatttccgaaacgccgtaaccgcaatttgggagaaggtcaaaaacttcatcctcaatgccgttgaggcaatcaaggattggtgggacaaaaacggggagaaactcgtcaaaaaggtggtgagtaccctcaagtccctttggaaaatcgtcaaacagatttttggcaaaattcagaagattgcggaaaaagtatgggggattgtaaaggacatcgtcattgacgtggtcgtggcaatccgtgatttctgggagaagaagggagcgcaaatatgggcgacggtcaaaacgctgttcaccaatatctggaatatcgcaagcaccgcttttgatattatctacaatgcggtgctgaaatttttggactatgtccgtccgatatgggagaatatcaagcagctattttcctcgctttgggataccctggtcgaattatacgagaccttaaagcccgtctttgacctcatcggcgggctggtcatgactttgctcggcgtggtgacaggagtcctttccgggattattgaggcactcggtccgttcattcaagccgtgatagatgtagcccaggcaatcctggaaattatacaggtaatctgcgctgtgcttcgaggcgactggtcggaagcctgggaacatatgaaaaatgtggcgtccaatctttgggacggcatcaaaaatattttcctcgggatatgggagtttatccagggattttgcgagggcgtgaaaaacttcttcggaaatctcggggataatatcgttgctatattcaaaagtgcctgggaagggattagtggcttttttacaaacctgtgggaaggcataaaatccgcagcatcatggatatgggacaccataaccgggctgttctcgaaaatcggagatttcttctccgggctgttcaaggatgcattcaattggggcaagaacctgatacagaacatcggagacggcatcaaaaaggcttgggactgggtagtagacggagtcaaggggatcgggcagtcgattgcggacttcctcggatttggttcaccgaccaagaaaggaccggggcataaggcagacgagtggataccaaatctcatggacatgatggcgcagggtatgtataacgacatccctatgatccagcgagcagctatccaggtggcgaacgctctcggtttaacgactacaaccaaccgcgcaatggtgggtacagggacgagtccgaatgccgatttattgaacggcatcttgcagggaatggcggcgatgaacggtatgggaggcgaaacgggcaataaggagatagcattacagatcgacggtcagacatttgccaggttgattgttccaaacatcacaagggaatataagcgcaacggtattgagttgaagggggtgtagtgcgatggattttttctcgataaacggaaagagcataaaagccccgacggaaatgacgatctccccggaacatcttgataaagccgagcgaacgatggacggaacaatggtgattgacatcatcgggactaagaaaaaagtggacgtgtcctgggaatatttaactaaagaggatatgaagacgttagcgacggagtcgggaagtgaccgattttccgaaatttcttttcatgatgaaaagaccggagtgccggtgcaaatgactgcaagggcagaaagtttgacctatatgccgtactatgactgggcaaaggctcaactgatttggaagagcgtatcggttacgttcaaggaaaggtagcacggtatggagtattcagataatccgcgcaaggtgtacgggaaagtagaaatcgtttacagcgacaaagaaatcagcagcaatatgggcataacagtcagcggtaactcgaaaatcagccacccgcgcgaggtgtttgaggggtatgtctcgccgacagtcagagcctgtacaatggatggaaattccgatatgagcggctcataccaaatggtagacgatacctgcatcgttggctggtggtctggcggtttatgtggcacaggaggagtgttcgaggttaaaccatatatcgagttgtcgtttgtgttacgcccgattatctcatggatcatccgaggcgatgataagctcaatcaataccccgttgactttacgattgaatacaaatcaaacggagagattgtgcataccgaggaaatcacggggaatagtgcaatagagattaaacttgagcccaaagtcaatgatatcacctctattcgaatgaccattgcgaaatggagtacgccgaatgcgtgtgcaaagatcatacagttttacgataaactatatgaggagtacacgggagatgccatgcagatgtttgaggtcaacgaggagatgtgttcgaccgatgggaattacaatattaactccgataccatgaccgttacacttcataacaccgacagaaaattcgataaaggctatcttcgttcgcttatgattttagggagaaaggtacagccgtctatcggaatagaaaaggacggaaaagttatgtacaccagattggggactttttattccgaggaatggcaggtggagcaggacagccaatgggtaaagtgtacggcggtagataggctgatgcgcttgcagagccaaacgtacatgggctatccgttaacggagcaagtttcagtttatgacctggcaaaggacatcctgttgaaaagcgggcattccgaaaacgaattcgagatatccaatgatcttaaagatatggttataggtttagcgtatttgcccaaaacaacggtttgggatgcattacaggaaatcgcaaatgcagcgttgtgtaaaatctttgtcgatagggaagaccgaatccatgtacgcagcgaacaggctgaaaccgaacaggtggggatcgagataaacccgagcaatatgttcagttacaagtcgagcataactttgacggagttcgcgaacagcatcaaggtagagtacacagatgtggaaattgccgacgatatcatagaggtggcagaactcgagataacgttggctgggaatgaagttcgggaggtgtctttggattactcttcggacgttgcatatgccgtcattttgtcaagcaatgtcaatgtgcgggcagttatggagcagggaggggtcaattcatgcctcttgacactcacaaatcgtacagggacatcacaaacgacaacattgactgttgaagggaatgcgatagaacttaattctcatacggtggtggttgaagacgaggacagcgtaaacagttatggaacggtagagtattcgcatacggcatcggaacttgtgcaaagcgaatcgcaagcacgatacatcggcggggttatccttgcgaaaatgcgggcgggcgagggcgtgattacaaccgagtggcgaggtaatcccgcattagagatcggggcgagttatagcagtacagaccgctttggtgataaaaaagagttgatatgcgaatacaataaattttcttacgacgggggtctgaaacaacagacacgcggacgattgaaataggagggcaacacatggcttcgtggaaagaacccgaaacaaatcacacggcgggggatcaagtcacgccggaaattttcaatacacttgccgagaatgaggtgtatttgaatgaaacaaaaataacgacaaaccaggtgcaggaggcaacggttatgagcgaaacaagcgcaacacgggagaacttgacggaacaggacaccgtgatgggcgcattcggtaaaatacgaaaatggtttgccgatttgcgagcattggcattcaaggatacggtagtaaccgccgatattaataactcggcggtaacgtctgataaaattgcatcttccgccgtgacaagcacaaaattggggacgagttccgtcataacatcgaaaatcaatgcattggcggttacaaccgagaaattggcaaatcttgctgtaacggcggcaaaacttgcggcgagtgcggttacgacagacaagatagccaattccgccgtaacagatgccaagatttcttcggtttcggcaagcaaggtcacaggtcttgcagaagtggctacgtcgggagactataatgaccttataaataaaccgacgatatcttcgggcataactcttacgcgcacgacaatcaggttgaaccaacagtacaatatccctgcaacgggtgtttatctgtgctttgtgagttacttgaatgcggcaagcatgaaaggtgtagcgtgcttgggtacaatgtcgaacgcaacaagcattgacaacggaacgtgtagcgggatttcttcaatttactatgacgggggatacaaaaacattcagcttcgctgtataaacgtaagttcgacagcatttatttaccgactgtacatctcaacaaatgcgactgccgcaccgacgcagctttttgacggagacggcacaatgactgtcataatgtacagaatcagcgggctttcggcgataacttaaggagtgggtatggcgagaaacagaataaaacttgtcaagggcgatgcgttcagcatcgcctttcataatgtccgcttgccgattgtcgtagaaggggaaggagttgaaaagaccgagataacggaggaggaccgtttggaattttctattactcggacagatcgtgtgcctgtgatacaaaaatactatccgggcgagatagaaagaaacggtgatacattctatgcgatgctgactgccgaggaaacggaaaagcttgaaagcattttatacagagcgcagttgcgagtagatatttcaaattgcggagaggaggtttacacgcttgtcgataaagaattggaggtggtagcaaaatgagcgggtttcacgaaaagtgcagttgtgtccatgtcgaaccgtttcagacaatcaccaaaaaatacaagggggtcgaaaacgatgccttggaaacggtcgtggacaataaagagtggaccatagaggtcaaacccaagccccagcaataccaaagcaaatatgcattcccaaatatcgggaatccatcggtgctgtatgtcgacgttaaggaaaatgagacataccgttgggacgaggaaacaaggcaatatgtctgtattggtacagactatcgaagcattaaaatcataaatggagggaacgcataatatgagtaacagaattcttgacagtcagatccagagcaggaacgatacagcggcaaattggtcgtctgtgaaccccgtccttttgaagggtgaaatcggtatcgaaatcgataccaggaagatgaaggtcggtgacggcacgacagagtggaacagtttgaaatatctgaaagacgatattgtcatcgcttccgcaaatccgacgacaggggataaagacttcgacctgggagagttttggctgaatcagaccgacaaaacgctgtatgtcctggttgcaaaaacagagagcgcgggcgaatggaaaaggatcccgaacgccgaggaactcgtcattgtgtctgaggcgctcgtcgcacaaaaactgaaaacagcaagaagtatcagtatcatcggcgacgggtctggggcgacaacctttgatgggagtgcggatgcgagcattacgcttgtgctgaaaaacacaggcgcaagcgcaggaacgtacacaaaagtaacggtcaacgaaaagggattgattacgaaaaccgaacttcttacggcggaggatatcccgacactcacgcttgctaagatctccgatgcgggaacggcagcatcgagagatgtgggaacttctcaaggtaaccttgtggaggtcggcgcagacggtaaaatccccgacagcgttttgccgcctttggctattaccgaaccccatgcggtagccgaccagtcagaaatgcttgctttggatgcacaggtcggtgacatcgcaatccgagcggatgagggtaaatcctacattctgaaacagacccccgcatcgacgcttgggaactggctcgaacttaaatctcccgaatgcaaagtcttgtcggtaaacggaaaaacgggcgcagtcgtacttacgacaagtgacattgccgagggctcaaacaaatactataccgaggagagagcaacggcaaactttgaaagcaattacaaggcttcgagttcggcagacctgacagatggcgaaacaattctccatgcgaccgacacactcgttctgaacgggggtaacgcataagggagttgaaatggtttcaattattataagcatctgtgcaagcatcatcagcggtatggtgctttttttcttacaacgcttttttaagcgtaaagcaaagaaggacgaagcccgcgacgcggcaaaagccaaggaaaatatgttaattctgaaaagcattgatgctgtgggtaaactaacatatgcaaatgcagtcgccattcgggatgggagaacgaatggcgaaatgcacgaggcgatggagacatatcaggaaaataaggccgaaatgtacgagtatttgctcgaacaaaatgctaaaaattaaaggaggttgggtatggaaagttatttggaacttgtcagcgtccctgcgatagcagcggtcgtttattggataatagcaatcataaagtatgccgtaaaagaaaacgaaactttcaaaaaatttatacctctgattgcggcagtgcttggggttgcactcgggattgtggcatactaccttgtccccggcattgttccggcagataacgtggtcgtggcgattatagtcggtggggcaagcggactgacggcgacgggcgtcaatcagatcataaagcaacttggcaagggagatgacacggatggcggaaacggcaaaaattgaatatgagatgaatcggatacagttcaattgtgccgtcggtatcatatttgaccttatgagaaaaggttatctgaccacggcagaatatgacatggtgagtgcaagactcaaagaaagatacggtctcgaacaggggtgtgcggaatgattccgcacacttaatttttttacatgagagatacacgccgaagtcgtaaaattatgcgaacaaaagtctgtttcagcaatctttctctggacttgtaaaacattttacggtattgtttgggctaacaaaagccaaaggaggtattgaaaatggcagaaagaagaatgcggacagtcgcatatgcgagagtcagcagcaaagaccagcccacgagtctggactcacagattaagcacttcaatgacatcatggataatacgcccacgatggtcaactgcgggtgctacgtcgataatggtatcagtgggcgatttatgcatcgccgagagggattccttcaaatgctcgaggactgcgagttacacaaaatcgacttcatattatgtaagtcgataaagaggttcgggcgatgcaccctcgatacaattcgggcgattgagcgactgcgagagttaaatatccccgtctttttcgagcaggagggcatcgatacaatcaaggacagaaataacatcctgctcgtaacgatggcgcaaattgctcaagaagagtacgaggacaagtcggaagcggttagatgggcgttcaagcggaggtttgaacaagggaaattgattgtaaatcccaatactccgctcggatacaagttcaatgaggagggggaactcgtaatcgtaccagaggaagcaaagctgataagggcgatttacgaggagtatgcggaaacgggtcactcgactgaaatatgtcagaaactaaacagggcaggataccgttcggcgcacggcagaccattcaagccttcgaccatcttatatatcattaagaacgaaaagtataagggttcggcgatgatggagaagtgggttgtggttaacgggcgtaaagtcaaaaatgtgggacagcaaatgaggtactatgtcgaggatcatcacgagcctatcgtaagcaaggaattatgggacaaggcgaatgcgatggtggaaaagaaccgcaaagaagcgtgcttcgtaccgaatgggcatgaccctatgagcaagatgatatactgcgggaagtgcggtcattgctatatccgcagctttagaaacgcgcaaaagttcagatatgtttgcaacgggcatgacgatgagaggttcagaaagtgcggaaatccgagtgtccgtagagataccctcgaaagaattttcgtgcagatattcaatgaactccgaggaaagaaaatttatctcgaagaactgccattgtccgatgaactggtgcaggttaatgagggacgcgaaaagctgctcatacaagaaagaacctatctccaactgcaagcaagaggattgttggagggggcggtcgagttggagtatagacaactgctcaaaaagattgtccaaatggaggataaaaggaaactcctgctgtccactaacgcaaagaatgtacaagcggagaatgaactgcggctgtataataaggctatcatgagaaaacagccgctgacagaattcgacgaggagttgttccgagcagttgtaaagaaaatagtcgtctatggacgagaggacttcgagtatgtgctgacgaacggaaaagtcgcccttgtgaagatatactacttcgccaacaaagacgacgaaatcgacagcatcacctatgaaaaatacgaggagggcagaaaatgaacatagcaaacaatgtaaggattatacccgccattcgcacagatgtcgaaatggtgggggataatgtaatcacgaaaaagcgcacggcggcttatgcgagagtgtcgacagggagagaggaacagcagacgagtttcaaatcgcagatggaatactatactcggctgattatgagcaatcccgattgggagttcgtcggcatatatgcggatgagggcatctcggcaagaagtatgaaaaaaagaaagagatttcgggagatgatagacgacgccctcaatgggaaaatcgaccaaatccttgtgaagtctgtgagccgtttcgcacgaaatgtcctcgatagcttgacgataattgataaactgcggcagaagggaatacccgttatattcgaaaaggagaagctgaacagcctctacgatgataagcgcacgaacttcatgctgacgatgtatgcttctatcgcgcaggaagagtcggacagtttgagcgacagcgtgaattggggtatccaaaggcgcaacgaacaggggttcgtccgaaaagtaaagacatacggctacgatgtgctgaacaagcaatacgtggtgaacgaacagcaagctggtgtggtaaagttaatcttcgaactgtacctctcgggattgagttattttcagataagcaaagaactcgaacgcagggaaatcaaatctcccaaaggcttggacagatgggatacgagtacaatcgagcagatgctgaaaaatgagaagtatgtcggcgatgcgctcctgcaaaaaaccatcgcacagccctggcgaaatagaaagcgttcggcaacagcggataatcaaatgtacctggtggaagatgaccacgaagcgattatcagcgacgagatgttcgaaagggtaaaaagggagatggcatatcgaaaaactttgagggcaaacacgaagtcggggaaaggcgggtactcgtcaaaatatcccttctcgagcaagatatactgctatgggtgcgggggaatatttaggaggcacttctactatgccgatcgtgaccgtacccccgaaaggatagtatatacttggacgtgcagcacacacaaaaaccacggaaatgtggcgtgtgggcaacaagccatcaaagagaaagacatcgaagcatcgtttatcagagtggtgaatatgctcgtaaaggacaaggcagacatgataacgaagctccgagataccatccaagaaaccatcggagagaggttggctggggcagaggccgaagatataagagcgcaaatcgaagccaagcagaaagcactggttcgggctgtgagggctatgactacggatgacgaccagatagccgcgtcaaacgaaagggagcgaattataggcgaaattgagagcctaacagcaaaactgcaaagccttgaaaaccaagccacggaaatgggacatacaacagaacggctgaatatggtctgcgaccttatagccaagcaaggagaactcaaggaattcgatccgatggtcttccgaaaaatggtctacagaataaccgttgatgggaaggaattgacatatgacttcggaaacggtatcataatcacggacatggtataagcaaaagagtgccgactgtcatgcaaggcagtcggtatttttttgcccaatgtccagacttttgtaggaacggacagcaagaacaaacttttatacacacagaaaaattaaaatcagacctttcgacggttaatcgttccccgtgccgaaggagtggcaggacaacatttccatcgaccccgggctgaacaatccgctggcggccttgtggtttgcggtggattacgacgacaacgtatatgtcgtttacgaacattttgccgcggggaaggatatcgattaccacgcggcggcgatcggagcggcgtgcgcttcgctcggctggcataccgatccgaaggggaggatctgcgcgctgatcgacagcgcggccaaacagcataccttgtcgggcgtaaaaagcgtgtgcgagctgttttacgagcgggatattctcgtcaacgccgacgtcgataaggatttgttttcgggcattgcgcgggtgaaaagctaccttaacgaaaaaaacggactgccttcgctttatatcttttcctcctgcgtcaatctcatccgcgagctgaaaagctatttctgggggagcggggacgtaccgaaaaaaacggacgatcacgcgctggacgccctgagatattacctgatgtcgaggccgaaaaagctgccgcccgccgcggaaaagacggccatacaaagggacaaggaacggaggtggcggcagatcgcggcggcaagaaacggaaaaggagaatattatggcggttaaaaagagagaggaaaaagtgggagaggcgcttttgaaggtggcgttgggctgtcgggtggaggaggtgacggaggaatacgcggaggtggacggggaactgaagctcaccaaacgcagggagaccaaaaaggacattccgcccgatctgaaggccgtgcagatgcttcttgcggcgaaggaggacggcgcggattacgccgccatgtccgacgaacaactgaacgcggaacgggagcggctgctggcggcgctgcgggaggaggaaagcggggccgacaggaaaggtgcggcggcgcggaaaggtgcggccgttgaggtaggggcggcgacgcggaaaggtacggccgttgaggtagggataacggcgcggaaaggtgcggtcgttgaggtaggggcggcgcggaaagatgataaaggtaacgaagaggaagcgcggaaagatgaggcggcttcggaaaacgcggcgccgaaagcaagaaaaaagagagcggcgccgcgtaaaaaaagaagggaaataaaaaggagaaatatatgagtttcggcaaagaggaagaagtgaagcgggaggaacggcggcgggcgaaaatcgcggcggaggtgaccgaggatttcgagcggcggcgggaggaacggcggcagacggagagcggctggctgctgaatatgaattttttcagcggcaatcagtattgcgacgtttcgccctacggggggatcgtcgaggaggacaagcggttttactggcagtcgcggcgggtgttcaatcacatcgcgcccacgatcgactcgcggatcgcaaagctgacgaaaatgcggcccgccctgaaggtgcgtcccttttcggacgaggaagcggacgtcaggaccgcgcggctggcttcggggattctcgaatacgtccgcgaacgtatccgactcgacgagacgacggcgcgggggacgctgtggtcggaaacgtgcggcagcgcgttttacaagatcgtatgggacgaaacgggcgggcggcaggtggccgtcgatgagaggggcgcgcccgtctatgagggggaagtgtgcgtcagcgtcgttccgccgtttgaaatttttcccgatcgcatgggtgcggaatgcctcggggaagtgaacagcctcattcatgcgcaggcggtgcccgtttcctacatcgccgaacgcttcggcgtcgaggtggcgggacgggagattacggaaacggatttttccgcgtacagcgaaccgtcgaacggaaaaaatcccgcgcttcagacgggcggcagccgcgaagcgataaaggactcggaaatcctcatcgaacggtattcgctgccgacggcggaagaacccgacggcaggctggagatcgtcgcggcgggaaaactgctctatctcggccccctgccctatctcaacggagaacgcggagaaagaaggttccctttcgtcaaacaggactgtttaaggcttcccggcacctttttcgcaagcagcgtcgtcgatcggctggttcccgttcagcgggcgtataacgccgtcagaaaccgcaagcacgagtttctcaaccgcatttccacgggcgttttaaccgtggaggacggctcggcggacgcggacgagctggcggaggaagggctggtgcccggcaaggtgctggtttatcgacagggcggacgaccgcccgaaatgctggactgcggcagcatacccgcggaatttgccgccgaggaggaatggctggaaaaggaattcgccttggtgagcggcgtcagcgacctgtcgcaaaattccacgcccgcacgggtgacgagcgcgacggggcttcagctgcttctctcgcaggacgaatcgaggctggccgccacggcggacaatatttccgccgcgctgaaagaggtgggacggcagattttgaggctttaccgacagtttgcgggcagcgcgagactgctgacgctgacgggcgaaaacaaaaagacgcagatttattatttcaacgccgccgacctcgcggccaacgatatcgtcttcgagagcgaggaaccctctacgccgcaggaaaagcgggagacgctgatgaagctgtttgaggcgggacttctggcgggagaggacggaaagctgtccgaagaaaacagaaaccgcattctggaggccttcgggtttgcaagctatgagaatgcgggcaacctttccgccttacacaccgcaaaggcgggagaagaaaatctgaagctgaaaaaggaggagctcgcccccgacggctacgacgaccacgcgctgcacatcggggagcatacccgatttttgctgtcggaggaactcggacgggggacggacagcgcggtgaaagcgcgctttgcggcgcacatcgaggcgcacaggcgcatgaaaaaagaaaacgaataaaaggaggaaatacgacatgacaggagaggagaacgtttgcggcggaaaagagggcacggagcgcgccgcggaggcggaaggaaaaaacggctcggcagtgctcgggaaatttcgggacgtaaacgcccttgcggaggcttatggcgctttggaggcggaatttacccgtcgcagtcaacgcctcagggagctggaaaaaagagcggaaaatcccgcaagcggggttgcggtagggacggcggaaaagccgactgcgcaggcggaagaagcgggggcggaaaagcctttgccctcttccgagcgcgagggacccgctttgccttcggacttgtccgaacacctcaggcaagaacggacgaaagaggagagcacccgcgatacggacgagaacgagctctatgaggcggccaggcgctgcgaaggagtgcgattgaagatcgtgggcgattacctttcgtcgctcaagggcgcggaggcgcctctgatgaagggcgggacggggacgcttgccgtttcgcccgcaaagccgaagtccatttccgaagcgggaaatatggcgcttcgctatttcaaaaaaggcacgcaggcgtaaaactatttttaagagaaaaggagaaaaaattttatggttactatgcagaccgcggacaacgctttgaaatctttttacctcgacgccgtgacggaggcactgaattttaaggtaaatcctctattggcgcagatcagacaaaccaccgccgacgtatggggcaaggacgtgagaaagcttgtccgatacggcgtcaacggcggcgtcggcgcgggcagcgaaacgggaactttgccgacggcgggcggaaacaattacgtacagtttgtctcgtcgctgaaaaatctttacggcacgatcgagatttccgacaaggcgctgcgcgcgtccgccaacaacgagggcgcgtttgtcaacctgctcaatgacgagatgcagtcgctggtgaaaagctctgcctttcatttcgggcgcatgctctacggcgacggctcgggaacgctgtgcaaggtgacgggcgtggcggcgggcaacgtcgttaccgccgacagcgtaaaggggatcgccgagggaatgatcgtcgatttctgctccggagtgggcgtcattctcgcgggggcaaagggcaggacgataaagagcgtcaatcgcgccgacaagactttcgtcgtggacggctctgccctcacttccacgatcgtacccgcaaattccctcgtctgccttcagcattcgggcggactggagatcacggggctggaggccttattttcggattccgagacgctgtacggcgtcaacagggcgtcgaatccctggatgaagccctacgagcaaaccgaagtggggacgattaccgaaagcgttctgcagaaggcgatcgacacgattgaggaaaattccggcagcaaggtcaactttatcgtctgttcgtggggggtgaggcggtcgctggcggattattacacgcagtaccgcacgtttattcccacgttggagatcacgggcggttacaaggccatgaacttcaacggaatccccgtcgtggccgacagattctgccccgagggtaccatgtatttgctcaacaccgaggatttctgcctgcaccagctgtgcgactggcagtggctggagggcgacgacggaaagatactcaaacagatcgccgaaaagcccgtttataccgccacgcttgtgaaatatgccgagctggtgtgcgagcggcccttcggacagggcaggctgacgggaatagaggaatattgatcgcataaaaaggaggggcgcgggcgggaggaaaacgggattggagggaggcggcggaaacggaggaattggcgaggggaacgagggagagggggagcgaagaggggaatgattggcgagggggaacgagggagagggttgggaggatcggagggattggcgaggggaaagggagggaagggagtaggggcttgagggggaagaacaagcggaaacggggcggggtggggctgaaaggggaacggcaggttaaaagagccgggagagggaatagaggcgtttcgaggtaaacggaaaacgggcgggaaagaggacaaaaacgggaggaaaaaaatatgacggtaaaagaaacggtgattcttgccgcggaggagctggggctgggcgcccgggtacgcggctttttggaaaacaacgcttcggagggaaaagaggagacggaaacgctggtgagatgttttaacgtcgtggaaaacgaagtggcgttggattatctgccgctgcgctgcgaggacgaggcggagtcggagacgggcgttattcgctatgaggagctgaccatgccctgcgtgagaatcctgcgggtgacggacgagggcggaaacgcggcgccttttaagctgtttccgagttatctgaagacgcagcccggaagggtgaggatagaatatacctatacgcccgaaaaaaagaccgcggaggacaaatcggattacgaaattttgacgtcgccgcggctgttcgcctacgggattgcggccgaatactgtctcgcgtgcggattgtttgaggaggcggccgtatgggacaagaaatacaaggacgcgctgacggcggcatatcggtcgcggccgtcgcgggtgatccgttcgaggcggtgggcgtgatggggatattttacgaaaaggccttccccgtcgcaaagacggctttgaaaagggcgagttttgaaggctttactgaagcgggaacggaaataaagggctttttgcgggcctcgggcggacaaaattgcgaattttcgggaggaaggctgtcggcgggaatgggattttcggaatatctgaccgaagggggagtcaatccgcttatcgacgatcccgacgatccgcctcgggcgtttgcgcttttgccatataccgacggggacggaacgcggaaaaaggcgctgatgtacgtttccgaactgggcgtttcctatatctacaattccgttcggaacgcattcgatttcacgatgcacgtattcgacgatattcccgctatggtgcccgtctatggagaggacgggaccgcaaagctggcgttttgcagcgcggacggaatatggctgtacgacaaggcgacgaaaatgacgaaaatttacgcggaaagggcgagcacgctcgcctgcgccttttacgaacggctgtttttcgtcgaaagacccttttgtgtgagatactgcgcacccctggcgcacacggtctggacggacagcgcggacgagggcggacacgtggaatttccgtcggaagaaggggaaatcgtgggcctggaggctatgaacgaggctgtttacgtatttcgggagaggggaatcgtgcggctggacgcgcggggcgccgcgcgggaattttccgcgcaggtggtgccttacggcggcgggaaaattttagaaggctcgatcggggcctgcggggaaaaaatcttttttctggcagaggacggggcgtacgccttcgacggaaagacctcgcgaaggatcgccgaagcgtcgccgctttcgttgccgacgggcaggcaggtatgcgaacacgccgcgtataacgggaaatattttctgcgctataccgcggaaaacggagagaaaaagctttggattttagacgccgcgtccgaaaggggatatttttccgcgcccttcgtcggcgcgctttcggagacggaaaacgctatgctctgtctggtcggggggaagatctgcgcggcggattcggcggggaagctgcccgcgggagaggagtatgtcttcgagacggcgtccgatttcgggattcgggggagaaagctgtggaaaactttgattttgaagggcgcgggcgggtgcgttgcggaggtcggcaacggatatgaaaccaaacggcgggaaatgacgtttgtcgggggcgaggcgcgggcggaaattttgctgaaaggagaaaggttcgctgtgactctgcggctgcaaaaaggctcgcagctttcgggcatggagacggaatttgtcgtttacggttaaacggaaggagaaaaagttgtggaaatagatatcatatcctatacggacgaacaatttgcttcgatgaccgacgaacagatcctcgaggtggaaaacgtgcagctgaaaaagaacaggctgacggaaagactgaaagaaaaaaagcgcggggaaaagttcaggctgctgaaagcgggcgttttccgttcgggaatatgggaaaacatctgcgccgcattggaggaaagctataaccaagaggtggaaagcctcagggacggactgttgttttatctgcgcttcgcctctaaacaggagggggactctgcgccctataccgtggattattcgttgacttacgaacagcggctcgccgtcgtgagagggcattacgattccgcttatcccgatcccaagaaaaaatttgaggcgtttaagggggacaaggttgcgctgaaatatctgggagagctttacgcgcctctgtatgagctgtattcgtttcaggcggaatagagaagaggcggcgcgaaagagaggggaaagagtatccttttgaaaggcacggaaggggaaatcagggagaaatatcggaaaaaacgcatccgtttgaaagatacgtaacgggaagccgcggaggaaaagggaaagcgtatcggtttgaaaaatacgatacgggagaacgagcggggaattttatccgcttgaaaaatacggaacgggaaaacattgcgcgggaagaagtttagcgggcttcttcccgcttttttcgcaaaaatactttacagaaacgactttatgatgtataatagaggaaaaggaaataccgattatgaactatacgattgcgtccattaaatatatcttgaaaaatttttggtacatactgccgttttcgatcctgcccgcgctgtttttgtcgctttcgatcgataaattcgccatacaaaaggtgctgacggattattttacgggaaagcctggcggatcgtttcccatcattttccgtgcggtttccgttttcaatttccgcgacgtcggcgcgtttttcgcggggcttgcggggatcgtcctcatggtggtgtgcgtgtcgctgatgatggcgctgatagaaaaacacatgcgcatcggcaaacgcacgtataacgggattttttcaaagctcaacgacaatcttctctctacctgcggcatctgcctgttttacgtactcatttacgaggtttgggccgtgcttatttccgcgctgctctttctcgcctatctggtggagaacgtcttcgcggtgtatattttgtccgcgattattttcttcggcatgcatttcgtgcttctgtacgtcgtttccctgttttatctctggctgccgtgtcttcagattacgggcttcagagcctttgaggcgcttcgctactcctatcagctggtggcgcccgtgaaaatgaggatcgtgttcgggcagtggatcagcgtgacgatttcggaaattttgatcgggctgacggcgattttcgtgcccgtgagagggttttccttcgcggcggccgcggtgctgtatatgtttatgaccgtgatgttctgcgtgcgtatgcaggtggcgtatttcgaccgtgcccagctggagcgcgccgacctgaaaaagtattaccacttttgagccggcacggcacgaattttaagtaaggagaactattatgcgctttcgcaacagtacgaggcttttgaccgaaaactttcggaacgtttataaaattttgctgtacggcctcatcgtagccgtggtggccatctctctgtccagcgccctgattttgcctaatcttttggatattctgcgcagcgccgaggcggcgacgctggtttctgaggtaaaggagtttctctcggcgctcgtcagcggcgacaacgaatttttgcgggaattccctgcgcgcttcaaagaggcggggaccgagctgtggcggctgatcgattcgaaaatgtcgcagatcgtctggtctctggtcggctgcgcgttggtatatctcgttaaacgatttgccgacacgctgtgttatttctcgatcgggagcattctcaacgataaaatggccacctacgccgagacgccctttgccgccgcgtatatccgcaatctcggaaaagccggcgtttacagcgtggtgtatgttcccatcgtatttttgatcgacctttgcaccattgcgctgtgctggttccttttcttctatctgctgtccttcctcaacgtgctcgtctcgctgtttttgtccatgaccctcatcgtgttgtgtcaggcgctgaagctgacgtttacctccatgtggctgcccgccatggccgccgacaatcagaccatcaaacaggccatgaggctcagcgacaagagcgagcgcaaacagcgcaaaaagatgttttccacttacgtcgtgtccgtgtatatcgtcatcgtcgtcaacgtggtcggcgcgctgtgcacgttcggaagctcgctgctgttgacggtgcccgcttcttacttcctgtttatctgtgaacagtttgtcaattattacacggtgaagggaaagaaatatttcattacctacgacaagatcgccacaaaccgcgaccgcggggacagccagcgcttcttcgagacggtggaggaccccgaggatttcgggattcctcacgccgaaacggaggccggcgggcgttcggttgcggaaaatgatttggagaaggcggaaaaaattctcggcgagctgaaatccaagatcgaaacggcggaaaaaatcgcggcgacggctccgacggcccctgaaacgccagacgatgcggagaccccgaaggagaccgagaaaaaggcttcggaggcaaccgaaagaacgggcgcgggcagggacgccgaggggacggccgataaggaataatttttttcgacggagaatataatgacagggccgttttcgtcggggacaaggtcgcgggcggaacgggagtgccggaaaaaatctgatttgcgaggataatatatatggattatcggaaaaattaccaaagctggctgtccgatccgaggctttcggaagagggcaaaagggagcttgaagaaatagcgcgcgacgaaaaagcgaaggaataccgtttcggaggagagcttgaattcggtacggcgggcatgcgcggcattatcggttacggcatgaacatgatgaacgtctataccgttatgcgcgcgacgaaggggcttgcggattttatcctcgaacagggcggagaggcggcgaaaaaaggcgtcgtcatctcttacgatacgcggagaaaatcggaggaatttgcaaaagcggcggcgggcgttttggcaaagaacggcataagggtatatctttttgacgacgtgcaccccgtgcccatgctttcctacgcggtgcggtatctgcatacggtggcggggatcatgattacggccagccacaatcccaaggaatacaacggatataaggtttacggcgcggacggcgcgcagatgtcccccgaggataccgaaaaggtggtggggtatatcgcaaagataagcgattacctttccgtcggcggtgacgaaaagagcgggctgatcctgcccgtgcccaaaaagctggacgaggattatatcgaggaattgtccaggcttcgtctctctcccgaggcggtgaaaaaatgcggggcaaacctaaagctggtctatacgcccgtgcacggcagcggctatgtgcccgtgactaccgttttggagaaattggggataaacgtcaccgtcgtggaggaacaaacgaccaaggataccgagttttccaccgtgaaagtgcccaatcccgaatttaaggaaaccctgtccatggggattgcgctggcaaataagatacatgccgacgtggtgttcggcacagaccccgattctgacaggctcggcgtcgccgtcaaggacgacagcggagaatttgtagccctgtcgggcaatcaggtggggattttgctgctcgattatatcctcacgcggctggaggaagaaaacgcgatgcccgccaatgcggccgtcgtcaaatcctttgtcaccacgggcatggccaaggcgatctgcgacgatttcggcgtaaccctgtttgaaacgcccgtcggatttaagtttatcggcgaaaaaatcaagcagtgggagacggacggaaaatatgtttacgtattcggcttcgaggaatcctgcgggtatctgcgcggcacgcacgcgcgggataaggacgccgtggtcgcgtctatgctctgcgcggaaatggtgtgctattatacctacgtcggaaagacgctctacagccgtttgcaggaaatttacacgaaatacggttacgtcctcgataaaaatatttccgtgcaatactcggggctcaatgccatgaaggaaatgaacgccgtggtggatgccctcaaacgcatgaaaacgcaaacgctcggcgcgctgaaggtggaagcgttccgcgattacagcgcggcgaaacgggtctcctatctcacgggcgaaaccgaggaaatggatatcccgaaatgcaactgcgtctattacgagctggagggcggctcctttgtctgcgtgcgcccttcggggaccgaacccaagcttaaaatttattattccctccgcgacaaatgcgaggcggcggcaaacgaggcgttgatcggacttcaggcggctgtaaacgaactgttggaaaaggcgaaaaaataagagcggcgggataaggcgatggaaagcaatgggaagcctaagggaaacgcaaaaaatatcgtcgcgggaattttggctcttgtcggggcgataggaagcggattactttggcttggatttatattggcagaaggagctttggggctgcttgttatcttggcagtttcaatgtcggaagcagaaatatcggatatctcgacggttttaccgtttgaactttatatgacgtatttcgaaattaatataaattttttgctgcccgctttcgtcgcggtatttgttttgctcgctacggcgtcctttgcctgtctttcccgccgggaacaggtaaaaaagacgggaattgttttatccgtcgtcggatcggcgctgttgcttggatgtatagtcggggcgacggccgtttatcggatttcaatagggatatgcttttgctttgcgtatatcggattaaaaatattctgtgtcgcggcggattggaaaaaagcgttcggaaacaaggaaaaaaggttgacataaataaaaggcccccgcaaaattgcgggggctttgccttaacaaaataaaggacatacgtattcgcaaaaaagcgcagaaaaaagacgggaattttattgactgccgcgcaatacgcacaaaaagacctcccttaaggatatactgaaaggggaggcgtggggttatgcggatttgttttgtgagcagagggtcgctcaacagtttttgggacacttacggcggcagcgacgcggatatcgttttcttcgggtttcaaggcatcggagaagtgagctacgaaaaggaactgcgcggagaaacgggatatttcgaggacgcggcaatcctttcgaaagaaaatcacaacgtcgtcgtctgcgggtgcgtcacggacacgcgcggcgtaaaaagaaaatccgccgtggtggcggaaaacggacgtttgctcggggtgtccgacatgctcaacgccatagacggcgaatataagagcggcgcgggcctccgcgtctatgaaaccaaggtcggccgtttggggatagccgtcgcggaggatttatatttccccgaaattttgcgtaccctcgccgtctgcggcagcgatcttattttgtgcccgttcgggatcgtctccgattcgacggagtccgttcttctgcgcgcggccgcgttttcctacggcgtacccgtggggttctgcggcgcgggatacagccagcttgccgacgtttcgggcgccgttgccttcgcctcgcccgacagccccgtggaattttccctcgataaaaaacaggaatatcatctgatcgagacgcggcgcagagggttttataaggcgcccaaaaaggatttttgaaaggccgcggcctcgaagcgatacgaaagacggcgcgccgcgaaaagatttttcggaaaagaaagcgcggaaaaaatcaattttcaaagcggtagggcgttacctgatacacacagtaattcagccaattgttataaaagaggttggccgtggaggtccaattcatttttaccctgttacaccccttgtcggcaaaataggaaaagggcttcccgatcggcaggcctttcgccaaatcccgctcgtattccttttttaacgtatcgcggtcgtactccatatgcccgaacacgaacacctgcgaatcgtctttcgacgcgatgacggacgcccccgcccgcgcggacacggcgagaatttttaagccctcgatgccttttatatcgctcaccttgacggtggagtggcgggaatggggcatatgaaattcgtccgagatcccgcgcatcagcggctcgggctccgcatagggcactttatggtgcgtgaataccccgaagagcttctccttgagcgggtatttttttacaccgtaaaaataatgcagcgcggccatggctccccagcagatgaaaatggtggaggtgacgtgcgttttggtataggcgaaaatgcgtttaagctcgtcccaataggcgacggaggaaaaatccatttgctcgacgggtgcgcccgtgacgatcatgccgtcgaaatgcttgttttccacgtcgcggaaggattgataaaacttccccagatatccctccgccgtgtgcctgccgtggtagctttccgtgcttaaaagggtgacgttgacctgcaggggggagttggagagcaggcgcataaactgcgtttccgtctcctccttggtgggcataaggttgagtatggcgatctcgatggggcggatatcctgcgataccgccctcgtcttgtccatgacgaaaattttttcgccgccgagtattttgtacgcgggaagcgcgctgtctatgacgatgggcatggcgcgcctctcaaatcctgtccagcgcccgggaaagatccgcgaggatatcctcgggattttcgatgccgacggaaagacggacgagattttcgggtacgcccgcttttttcagatcggcggcggaaagctggcgatgggtggtggaagcggggtggagtacgcagctccgcacgtccgcgacgtgtgtttcctgcgtgataagcttcaaggcctccatgaaacgtgcgcagcgcttcgcgtccccttttatcccgaagctcagcatgccgcccgtgcccgcgggcatatattttttcgccaaggagaagtaattatcctctcggagtgacgggtgcttaacccattccaccttcgggtgctccttgagaaacgccgccgcggcctttgcgttggagcagtgcttttccatgcgcagggccagcgtatcgcagcccagccaggtgaggaaggcgttttggggggacatgatcgcacccatgtcgcgcatcatctgcgcgcggcatttcgtcgcaaacgcggcgggcagggacgcatagaccaatccgtgatagctttcgtcgggcgtattgaaggaggcgtagcggggattgtccttgaagtcgaagctgccgccgtcgatgatcattccgccgagcgccgccgcgtggccgtcgatatattttgtcgtggaatggataatgacgtctgcgccgaagcggaagggattgcagagcacgggggtggcgagcgtgttatcgacggcgaatacgacgccgtgccgccgggcaatgcgtgcgattttttcgaaatcgagcacgataatcgcgggattggccaccgtttcggcgaagatcaggcgggttttgtcgtctataagcttgtcgatctcttcctccgccgcatcgggatcgaagaagcggcacccgatccccagcttgggcagggtggtgccgaacaggttgaacgtgccgccgtaaacggcctgcgcgcacacgatgttgtcgcccgcctcgcaaagggtcgcggccgtgagcagggtggcggacatgcccgacgaacagccgatccccgcaattccgccctccagggccgcgagcttgttttccagcgccgccaccgtgggattggccaggcgggaataaaagtatccctcccctttaaggtcgaataaatcggccatggtttttgtatctccgtagaaaaaggtggtgctctggcagatgggcgggatacggctttcgcccgtctcggggcgataacccgcctgcacgcataaagtgtctttgcgatagttcttttccctttcgtccatagtgcgttctccttgtataataaaattttgacgttaaaaacccgtgcgttttgcttttaagcctcaaaagcccgcgttttttacggcccgatcggcggcgcgctttaagtcgcgttccgcgatcgattgctttttgtcgtaggtgtgtttgccgcggcagagcgcgacttccattttgacgagcgaatccttgaaatacagcttcagcggcaccagcgtatagccctgtcggttgattttacccgaaattttggcgatttccgcgttgtgcaaaagcagccgtctgtcccgccgcgtatccttggtgctgaaggcgtccgatttgtcgtacagggcgatgtgcatgttttttacggtcacttcgccctttttcacaaaacagaagctgtcgttcatgttgacggccccctggcgcagggacttgatctcgttgccctgcaggacgatccccgcctcgtatttgtcctcgatgaaatattcgaaagacgccgttttgtttatcgcgatgatcttcatggctatgtctccttaagcttcctttgcaagcagggaaaaacgggtgcgccgctgttcgaaatcgacgctctccacctttacgcgaaccttttcgccgatagaatagctttccttgtttcctttcagcaggaaacgttcggggataaactcaaattcgccctccagcgtttcgagggggataaacccttcgatcgtgttgggcagctcggcaaacagcccgaaggccgctacgcccgagattacggcctcgtagttctctccgattttgtcgctcatatacatggtcgtatataaggcgtccacctcgcgttccgcttccgcggctctgcgctcgcactccgaggactgcacggccgcttcgctgacaaacccgttgtaccgctccgcgccctcggcgtacttcccgtccagcacttccttgatgatgcggtggatacacaggtcgggatagcggcggatgggggaggtaaagtggcagtagcaggcgctggccagcccgaaatgccccgcgttgacgggggagtaccgcgccttttgcatggaacgcagcatcacgcggttgagcacggggaagatcggaagctcctccgcggccttcagcagtttctgatagtcgtaaggctttacctcgtcggcggaaaattttgctttcaggccgagattctgcgcaaattcgcggaacatggaggccttttcctccgagggcttttcgtggatacgatagacgaagggcatttcgatcgagtgcatatattccgccaccgtctcgttggcgagcaccataaactgctcgataatttcgtgggagagggaacggtcgtaatcgggaatgacgatttcgccgtttttatccagcataattttggcttccttgacgtcgagctcgatactgccccgcttctcgcgcatggctttgagaatgtgcgtcacctcggcaaagagggataccatgtctttgacgtccgcgtatttttcgcacgtctctccgtcgccgtccagcattttcgtcacttccgtataagtcatgcggtgggtggagcgaatgacggattcgacgatttcgctgtccttgacggcgcctttttcatcgatgcgcatgatacacgaaagcgccagtctgtcctcgccctcgttcagcgagcagatgccgttggaaagggcgcgggggagcatgggcagaacgcggtcgggaaaatagacggaggtgccgcgggcaaacgcctctttatcgagcggcgagcggtattttacgtagtgcgaaacgtccgcgatgtggacgccgagcacgtaaagctccccgtccttttcgagggataccgcgtcgtcgatgtcccgcgtgtcctcgccgtcgattgtgacgatcgttttttctctgaaatccctgcggttttcgatttccgcctgcgaaggcttttttgcggcctgacgttcggcctccgcctctatcccctcgggaaactcctcgcggagcttataggaacggataatcgaaagctcctcggcgaaaaagtcgtctccttcgcccaaaacctcgacgatctcgccgccgggggcgcggccgaagggatactcggtgatccttgcgacggcctttacgccgtcgggaatgttgaagcacttcgacaggggaatatagatatcctcgaaatactttttttcgtcggggtgaaggcagcccgcgtttttatctttccaaaaggtgccgacgatttccgtatagccgcgttcgacgattctcaccacctccgcttcgtcgtcgcttcggccgtaaacccgttcggcatatacggtatcgccgtgcagcgcgccgtgcagatttttatgcggaataaaaaaatcgtcgccgtagagagccttgttttcggggacgagaaacgcaaagccgcgttcgttgcccgaaagggtgcctttgatgaggccgagctgctccggcgtgccgtattttccgccgcccgtcacgtaaagggcgccctcgtcgcagagggaatcgagaagggccagcaggctctttttttccctatgggaaaccttgagaaattttgcgatttcggtaaaggtctttcccgacagggtttcgttttcgaagtattgaagtaaagtttctttcgcgctcaatgtgcgcctcccgtaataaaatgatatgtaggctgcggataaagaaaaacggcggccttttcctgaaaagccgccgttcgaattcccgtttatgcctgattaagcccagatcttttcgagctgaagaatgtagaagcagatagagaagatcaccaaaatgacaagacagatgatcgtccactttttcattctcgcctcgatggatttgcccttgttcttgccgaagaaggtttcgctggatccgccgagtgcgtcgataccggtcgagttgccgggctgcaataatacgaggacgattgcggcggccgccgacaggaacattagagcgatcatggtgacgctcaggcccatatacagattataaaaagcatcgcttttcgtaggaagcaacaagtttatgaaatccaacatttccgtttaatccttttgaagcatttttcttttgacggaacagaccgttatttcaagatactcgtaaattataccatactcttaaaaatagcgcaactgtttttttgccctttttttaatcttttcccaaaaaacttcgggaaagggcggttattttgcgatgaagccttttcgcggaaatgccgcggccgacgcacttcgaaagaaggttatttttcgatgagggtctttcccgtcatttccttcggccggggcaggttcatcatatcgagcagggtgggcgcgagatcggccagcacgccgccgtcgcggagtttgacgcttttatatttctccgaaaccagaatgacgggcacgggattggtggtgtgctgggtaaaaggcgtaaccccgtcgtccgcgatcatctgatcggcgttgccgtggtccgccgtcaccagcgcgctgccgcccatggcgagaattttgtccgtcacctttttcacgcattcgtccacggtatgcaccgctttcaccgccgcttccatgacgcccgtatggcccaccatgtcgcagttggcgaagttgaggatgagcacgtcgtaaattcccttgtcgagctcctcgagaaccttgtccgtcacgaggtaggcgctcatttcgggctggaggtcataggtggccaccttcggggagggaatgacgatgcgggtttcgccctcgacgggcgtttcgattttcgcgttgaagaa

SEQ ID NO: 2221 - DNA, 32759 bp, Unknown
  16S sequences of unknown bacteria
tcaggctgctgacaaagtgcggggtgcagggggatcatccccctgccggggtttggggcagagccccaaagccttatgccgcagcatttcttgcgagcgttgcgagcgcctgaaaggcgcaagaaacgcggctctccccaaaatcaggggtttttcaacggtctgaggccccgccagatggcggggcctcaatgcgtttgcgcgtatacgtctgacgctcaatcgccttccaggaagcgcttcagctgcgagcggttggaggaaaggtccggggtgagcaccatcatgccgccgatggtttcgtccgcgtaggcgccgtcaaaaggcacatgcgcgccctgaatatccagcgtttcacagcccagaagcggcgcgagcgcggccagatcggccagcgtcaggtcggtttccacctcgtcaagcagcgtcacggccagcttcagcaggtcgaaaagcttcatctgcgtcagcttctccgccgcgctctcgatgatccgctgctggcggccggtgcgctgaaaatcactgtcgattttgcggatgcggcagtagctcagggcctgccggccgttgagcagatgctcgcccgcggtttccagcaggccgtcgtccgccgcaaggcccacctggcggttgtaatcctccagaattttgttgagctgctgacgctcggactcggtgatctccgcctccacgccgcccagcaggtccacagcctgcaccagcgtgggaaagtgcgccgtgacggtatgctcggcgctgacgccgaagttttcctccagcgtttgcaaaagcagcgtctccccgccgtaaaaacaggccgcattgagccggtccttgccgtgcccggggatggagacatacaggtcgcgcaggaacgataccaggcgcaccgtgccggcgtcgggatcgatgcgggccagcatcatcacatcgctgcggccggcctttcccgatgtgtccacgccgatgaacagcacggtaaaggggtcttccccggccgcatggaccggcggggcggcaacgagcagcagcgccgcgcaaagcagcgccgcggcccgttgaaataaacgcttcatacaaaaaccctcctttgcgttggtgcctagacaacgcaaaggagggcggttttgttgcagctggacggatttggtcaggtgtagtcggtatcgaactgcaccaccagacggtagcggtcgtccagcgagcgtgcgtaggcgttaagggacttgagcagctcgtcgcggcccttgtagccggcgggggtgacgcagtcgaaaatcaggttgatatgcccctggcccggcaccatgcgaaaatcatgcaggctcaggcagggatcggtatttttgagaaagtccgacatctgctggtggacgtgattcaccttttcatccgaagtgacgatggggtccatgtggatgcaaatggccatgtgcatcttttggccgatttcgcgctcggcatcgtcgatcacctcatggatggccacgatattggcatctgcgctgacctccgcatgcaccgaggcgatgcagcggcccggtccatagtcgtgaagcaccaggtcatgaatgcccagaatcccgtctcgcgccagcagcagctcgcggatctggcggattttttccgggtccggcttgccgcccagcaggctgtccaccgtatcgcggcatacgtcgaagccccccttcagcaccacagccgccaccagcaggccaatccagccgtcgatggcccagttgaaagcaagataggccagcacgctgagcagcaccgcgccggtagagagcacgtcgcccaggctgtccttggaggcggccagcagtgtgccgttatgaacggcgttgcccagcctgcggtagaagaagaacaaccacagcttcagcagcacggatgccgccagagtcgcgaccaccacccacgacagggtgagcggttcaggatggaggatggaggacaggccatcgcgcaaaagctgcaatcccatcagcaggatcagcacgcccaccgccagcgaacccaggtactccatgcgtccatggccgaaggggtgctcctggtccacgggcttgcgggccaggcgcgtggtgatcagcgtgacgatgctgccggcggcgtcggaaaggttgttggcggcgtcggccatgatggccagcgagccgctcaaaagccccatgaaaaacttgccggcagatagaagcaggttgacggcaatgcccgtcacggcggccagggtaccataggcggcccggacatccgggtcgtcgacgcggtccgcctcccggatgaagcggcgaatcagccatgcggtcaaggcaaggcgcctcctttggatggatatggccggtatatgcggcaatgtctcatcattataccaaaaacggcacgtttgcacaagatcaggatatgcaggcttcgccggacacgggacgcatgggccctcaccgggaacggcgcgccagctccgcggcaaaggccttcaggtgcgcgggcacgtcgatgccctgcggacaggccttcacgcactggccgcaggccacgcaggccgagggctgcctttcggcgggcagcgcttcgacgcgggccgcttcggaggcggataggcgaaacgcattgtaggccgccagcagcatggggatatccagcccggcggggcagccgtccacgcagtagcggcaggcggtgcagggcacggtattcttcatccgctcggccagggacaaaagcgcctcccgctcggcaggggtcaggggctggggatgggaaaaggtttcgatgttctcccgaagctgctccatattggacatgccgctgagcaccatgtgcacgttgggcaggtccttgacgaagcggaaggcccacgccgaggggctcaggtccggattcagggcgcgcagcgcttcctcctccgccgcgtccaagcgggccagccgtcctccgcgcaccggttccatcacccacaccgggatgcccagcgaggtcagcagctcgtatttttcctttgccttttgaaacgtccagtccagatagttcagctggatctggcagaaggccatctccttgccatacaggtccagaaaggcgcgcaggttgtccatctgcccatggctggaaaagcccaggtaccggatgcgccccaggcggcgctgctcaagcaggtaatccacgatgcccagcttcgggtcgcagaaagcgggggttgtggtttcgcacacattgtgcagcaggtagaaatcgaagtagcttaccccgcatttctccagctgctcttcgaagatggaggcgggagtgcgcccggcggcggccacgtggctgggaaacttcgtggccagcaggtagctctcgcggggataatccgccaggatgcggcccatgatgcgctcggattcgcccccgtgatagggataggcggtgtcgaagtagttcaggccatgttgcatggcatacgccaccatgtcgcgcgtccgggcctcgtccacccggccggagccgtccgcaagcagcggcaggcgcatggcgccgaagcccagcagcggcagcgtgagatcatgaaactttcgggtcatcatcgtgttttccctccctgagcagccgcgcgggcgcgaccggtatcgatcccagcataccacgcgcgggaggcggtctgtcaagagccggacgccaatttgggcgcgctccgcgaagaaaataggctttgcaaaacccaggcaactgatatatactgttggatgacaggaaaggcgaaaatccgccattccgcataagtattgcgccatagagcgacaggagccacgaaatgcagaaagtatggattatcggagccggccccgccggactgacggcggcgtacgagctgctcaagcacggctatgacgtaacggttctggaacagagtcacgaaatcggcgggatctccaagacggtgcgctatcagggcaaccgcatggatatcggcggccatcgctttttcagcaaggaccagcgcgtgatggactggtgggcggacatcatgcccctgcagggcgcgccttcctttgacgacagggtgctgggccgctccgttccgctctccgccggcggtcctgatcccgaaaaggaagaccgcgtcatgctggtgcgcaaccgcgtcagccgcatctattacggcaagcacttcttcgattatcccgtcagccttaagatggagacgctcaagaccatgggctttgccaccaccatgcaggtgggcatgagcttcctttgcgccacgctgcacaagcgtcccaacgacaacctggaaaattactacatcaacagcttcggcaaaaagctctacggcatgttctttgagggctataccgaaaagctgtggggacgccacccccgcgagatcgatgccagctggggcaagcagcgcaccaaggaactgagcatcttcggcatcctcaaagacatgttttccaaggtgttcgtctccaaggagcagcgcagcaagcatgtccagacctcgctgatcgaggagttccgctatcccaagtacggccccggccagctgtgggaaaccgtggccaccgaggtggagaagatgggcggaaagattctgctgggtgcggaggttctgggcctgaccacggagggcgggcgcgtcaggagcctgcgctaccgcgacgaaagcggggagcacacggtggagggggacgccttcttctcctccatgccggtaaaagacctggtggccggcatgaacgatgtgccggcggacgtggcgcgcgtggccgcaggcctgccctaccgcgatttcgtcaccgtgggccttttgctggaccgtctgaatctgaaaaacgaaacgaatcacaagacgcttggcaacatcgtgcccgactgctggatctacgtgcaggacaccaatgtgaagctgggccgcatccagattttcaacaactggtcgccctatctggtggaggacccggagcacaccgtgtggatcgggctggagtatttctgcaacgagggcgacgagttctggaacatgagcgaggaggaatgcgtcgcgctggcggcccgcgagctgtgcaccatgggcgtgatcgacagcccggaccatgtgcgcatgagccaccgcgagcgcgtcaagaaggcctatcccgcctactttgacacctatgacgagatggacaaggtcgtctcctatctaagcggctttgaaaatctctactgcgtgggccgcaacggccagcaccgctacaacaacatggaccactccatggccacgtcctttgaggcggtggacaacctcgtatccggcgtcaaaaccaaggacaacatctggaacgtcaacaccgagcaggagtaccacgaggaaaagaaggcctgattccttcgctccgtgaatccccgtgcaaggaggcaccgcattgcttcgtttcatcccacgtcaggcgcgcccgctggacgggcgcgccgcggccgcgcttcgcccctatgagggggtaacggcgcggcttttgtacgcgcgcggcatcaccgacgcggcgcaggccgacgcgttcctgaacccctcgctggaccggctgcacgaccccctgcgcatgcacggcatggcggaggcgctggacattctgacggatgcgcgccggaaggggctggctgcggcggtctacggcgattacgacgtggacggcatctgcgcctgcgcgctgatgacgcaggccctgcgccgcttcggcctcagggccgatccccatacgccgctgcgggaggagggctacggcctgaacctggcggcggtggagcagctggccaaagaccatcgcgtgctggtcacggtggacctgggcatcaccaaccacgaggaggtgcggctggcccagcggctgggcatgcgcgtgatcgtgaccgaccaccacggcctgggtctggaggccagccctgctgacgcggcgctcaatccgctgctgggggactatcccttccgccgcctgtgcggaacgggggtggccttcaagctggcgcaggcgctgctgggtctggacgcgtgccgggactacctggacctggcggccctggccaccgtggcggacatcgtgcccctggaggacgaaaaccggattctggtgtcgctggggctcaaggcgatcgccgggcgaaagcgggcgggcatgcgcgcgctgcttcgggtgagcggcgacccggaccccgtggacagcgaggcgctgggctatcgcctggggccgaggctgaacgccgccggccggctggacgacgcgggcaagggcgtgcgcctgatgatgaccgacgaccccgccgaggcggaccggctggccgaggagctggacgcgctcaacaccgagcgccgggccgccgagcagcagctggtcaaggccgcgcaggcgcaggcagcggggcatgacttcatcggggaaaaggcgctgatcgtgcgcggccgggactggcacgtgggggtgatcggcctggcggcggggcggctgtgccagcagtattactgccccacctgcgtgctcagcgagcatgaggggctattgcacggcagcctgcgcagcattcccggcgtgcacatccacgaatgcctcaaaacctgcgacgacctgctgcttcgctacggcggccacgagcaggccgcgggcgtgacgctggaggcggaccggtacgaggcgttctgcgagcgcctgcaatcggccgtggggcgggcggaggaaagctgcttcgtacccgcccagccctacgacgcggagctgaccctttcggactgcacggacgcgctgctggacgagatcaaccgcatggccccctttggctgcggcaaccccgcgcccctgtttctggcgcgcgggctgcggccggaggagcgccgggccgtgggcgcggagggcgcgcacctcaagctcacgctccggcagggcgggcgcatgctgggcggcatcgccttttcgcagggcgcgctggccgcgacgcttccggacgaggtggacgcggtgttcagcctggggcgcaacaccttccgtggggtgacgtcgctgcagctggacgtcagggcgctcaagcccgtgcgcgaggcatgcgcgcaggcgctggaggcacccgacggcccggcggagcgggatgcgctggtgaccgctctggccgacgcgttttccatgcaggcaggaaaaaccctttcggatacagaatccatacaggaatccgactggcccacgctggaagccgcgctccgggaggggcggcgcgggcatctgctggcggcgcgcacgcatgcctcggcccgccgggcgctggccctggccgacatggacgtatgcgcccaagccccggacgatccccgcggctttgccacgctgctcaccgcgccggcattgccgctgatcggggggcactggcggcacgtatggctgctggacggcgaggcgtttccgggtgaggcggcgctgtggcgcagccgcctgccggacgcgcaggtgcatgtgctgccgcgcagcgaggcgctcatggccctggcccgcgccgtggatgcgggcgacgccgcctaccggacgctgtacaaggcgctgcgcagcggcatataccgcacgcttgggcagctcgcgcaggcggcggggctggaggatgcgcaggcgcgcgcggggctgcacgccttctgccagctggggctgatcgactatgcgccctcgccgctgcgctacacgatccgcccggcggtcaaatgcagcctgggcgacagcccgatgctggcggccctgcgggccgtagcgggcggtgcccgacaaaacgacgacggaaaggaacgatgcggttgagtagacccaacgggcgaagcatgctgcttttgcacggcacgctgctgatctatgcggtggtcagcgtgtttgccaagctggcggggctgcgtctggcggcgcaggacgcgggcatgacgctggcgtttctggcggcggaggcggcggcgctgctggcgtattcccttttgtggcagctggtgctacggcgcatgccgctaagcttcgcttacagcaacaagggcgtatgcacgctgtggaccgcgctgttcggccttgcgtttttcggcgaacaaatgacctggggaaaggcggccggccttgtggtggtgctggccggagtggcgctcgtggtgacggaccatgaatagcggcgtcctgatttacctgatcacccccctgctttcggcggtgagccagctaatcctgaaaaaagccgccgacaatccccgctacacgggtgtgcgcgcctatctcaacgccccggtcatcctggcctatgcgctgttcttcggctgcatgctgctcaacgtcgtggcgctgcgcacgctggagctgagcgtggccagcattctggaagcctccggctacatctacgtgatgctgctgagctggtggttcctcaaagaaaagatcacccggcgccgcctgatcggcaacctgctcattatcgtgggcatcgtgctcacgctgactttataacacctcaaaaggaggaaggccccatggatacgcccaccgaaaccaaaaaaatcattttttccggcattcagccctccggcacgctgacgctgggcaactacattggcgccctgcgcaacttcaagcttctggaagacgagtaccagtgcatctactgcgtggtggacatgcatgccatcaccgtgcggcaggaccctgcggctctgcgccgccgctgtctggaactgaccgccatctacatcgccagcggcctggaccccaaaaagaacatcatctactgccagagccatgtcagcggccacgcggagctggcctggattctcaactgcttcacctacatgggcgaattgcagcgcatgacccagttcaaggacaaggcgcagaagcacgccgataacatcaacgccggcctgttcacgtatcctacgctgatggcggcggacattctcctgtatcagaccaacctggtgcccatcggggcggaccagaagcagcacctggagctgacgcgcaacatcgcccagcggttcaacggcatctatggagacgtgttcaccgtgcccgaggggtacttcggcaaggtgggcagccgtatcatgagcctgcaggaccccagccgcaagatgagcaagtccgacccggaggaaacgttcatctcccttctggacccgcccgacgccatccgccgcaaggtcaggcgcgccgtgaccgactcggaggcggacatccgtttcgacccggagaacaagcccggcgtgagcaacctgctcagcatcatcgcggcgctgaccggccagagcgtggaggaggctgcggcggagctgcagggccagggctacggcaagctcaaggaccgcgtgagcgaatgcgtgatcgaaaccctcgcccccctgcagagcgagcacaagcgcctgatggccgacaaggcctatttgcagggcgtgcttaaggaaaacgctgagatcgccaaccggatggcgctgcgcacgctgcgcaaggtgcagcgtaaggtgggttttgccgagcgcctgaaatgacggaggagacagcgcatggaaaacaagaattttgatttcatcatcatcggcgcggggccggcgggcatctttgccgcgctggaaatggcgcagaagcgcccgcagagccgtgtgctgatcgtggatacggggcgggcgatctcccaccgcgcctgcccggcgcgcatcgacgggcagtgcaagcactgcgacccctgcgccatcgtgcatggctgggcgggcgcgggcgcgttctcggacggcaagctgtccctcagcgacgaggtgggcggccatgtgagcgactacatcggccacaagcgcgcgatggactatatccaccaagccgacgacatctacctcagcttcggggccagcaagaccgtccacggcctcaacaacagccgtgtggatgaaatcgcctatgaggccagccgctacaacatccgcctggtcccctgcccggtgcgccacctgggcacggaaaatgccgggcccgtgctgggcgcgatgcatgactatctcgtcaccaaaaccaacaccacctttctggagctgaccagcgcggaggacatcctctgcgaggagggaaaggtgacgggcgtcaagattcatcagcgcgggcacgagccggaaatcgtctacgcgccctatgtggtcaccgcccccggccgcggcggcgcgcaatggctgtccgagacggtgagcaagctgggcctgcgcacccagaacaacgaggtggacatcggcgtgcgcgtggaggtgcccaacgccattatggaccacctgacccgcgacctctatgaggccaagctcgtctactacagcgacacctatgaaaacaaggtgcgcaccttctgcatgaaccccggcggcgaggtgagccaggaatactacgagggcggcatcgccgtggtcaacggccacagctacgaggaccccaccaagcgcaccggcaacaccaactttgccatgctggtatccacgcagtttaccgagccgttcaaccagcctatcgaatacgggcgctatatcgcccagctgggcaacatgctcaccggcgggcccatcatggtgcagcgcctgggcgacctgctcaagggccgccgcacggacgtgaagcgcctggccaaatccaccaccatccccacgctctccaccgccgtaccgggcgacctgagcttcgttctgcccgcgcggcacctgaccagcattgtcgaggcgctcaaggcctttgaccacctggctcccggcctctacagccagaacacgctgctctacggcgtggaggtcaagttctattccagcaaggtgctggtggacagccatatggaaacggccatcaagggcctgttcgccgcgggcgacggcgcgggcatcacgcgcggcctgatgcaggcgggcgtaagcggcatggtcgtggccgacgaagtggcccggcgtctggacaactaaagcagtatacaggggcggcccgcgcaggatatcgcgggccgcctcagcatgtcgaaaaagtccggctgcaccggccttttccgccaagacacgtttccccggccgcgctgaaagcgcaggggaaacgcgttctgtcggaaaaatcgccgcaggcgagctttttcgacaagctgaatatatttccgcttttatgccaaatcaagcgtgccggaagggcggaagcgtctttccacccgcccggcacgggaatcattcgtatggcgaaagccttaagtcacgcacaccacgcggcccggcacaaaatctccgggggccagcatggtattgatcagcagcagcgcgccgggggtcacgcccagcgactgggcgagggtgtaaaggttttcgcctgcgcccattacgtggctgtagctgccggtggggcacaggcggcggctgccggcaggcggtacgcaatagcgcgtcccggcctgcggccgggtgacggacaggtttgggttggccgcgctcagggcctgataggaaacattatggagaagcagcaggtcggtaaaggtctggccgcggccgacggcggcggcagtgtagcccgcggggcagcagaagttgccgggacaggtgatctgcggccggctgggcagggaaggcgtgggcaggccctccggtcccggaccgggggaagcgggctggttgatatctggcaaagcaggcgtaggcaatccctccggccccggaccgggggaggcgggctgatttatgtccggcaaagcgggcgtgggcaacgcctctgcctccgctgcgggggtggcaggctggttgagcatcatggtcaagggctcctttcaggattgaacggttgcggctgcgccatggggcgcgcctgtaccatcctatgccgcggcccggccggggtgcgggggaatctttgcccgattcatggtgcgtgtggcttttttgggcgaaacatgctataatctaaacttggtactctatgcacatgatgtgaagggagggagcggcatgcaggcggtcaaccgggtaaaacggctcaggcgcgggctgctgtggctgagcgtggcggcgctggtgctgggcgcgctgccgctgtacgcaatctccctgtacaaccatccctactatgacgattacggcttttccgctaaggcgcatcaggcctggcgcgacacgggcagcgtgggcgaggtgctgcgcgcggcctgggagagcgcgctggaaacgcgccagagctggcagggcacctatacgggcacgctgctgagcaatgtgcagcccggcattttttccgagcagctgtatttcatcggcacgtttgtgctgctcacggcatttatcgcgtgctttttgtacttcttttcggtggtgatgggccggctgggcatggaccgcacgggccgctggacgctgggctgtctggcggtcacgctgatgatccagttcatgccggacgcgggcgaggcgttcttctggttcaacggcggcatcggcaacaccttcgtctactcgctcatggcgctggccgccgcgctgatggtgcggctggcggaggcgaagggccgcgccgtggggctgacggcggcgctgtgcgtgctgatggtgcttttgggcggcggcagctacggcggcgggctgctgagcgtgtgcatgctggcggtgtgcctggtgtggatgctgcgcgtgcggcatccgcggcgccggcgctttgcggggctggcggccctgctgctcatctgctttgcctacagcatgtccgctcccggcaacgcggtgcgcgccggggtgatcggctaccgggcctcggcggtcaaggcggttttgcaggccctctattacggggtggcgcagatgagcgcgtacctgcggcctgcgctgattgcgatcacgctggcggtgctgcccgcgctgtacggggcggcgaagaaaagcccctggcgcttttcgcatccctggctcgtcctgggcctgacgggcgcgctgtactgcacgcagatgaccccgccgctctacgccatcgcctccatcggcgcgggacgcatcgtggatacctacttcatcagctttgtggcgctgtggttcccggtcgtgtactatctggcgggctttgcggcgcggcggcttgaggcggccggccgcgggcagctcatccgcccgctgacggcgcggagctacggcgcgctgctggcggtcagcctgtgcctgctggggatgggctgtctggcgtgcaggcccgcgggcgaggcgctctacggcgtgcagaacctaagcggccccagtgccgccctctcgatcctcagcggtgaggccgcgaggtacgacgcggaaatgaccctgcgcgaagaggcgttgaacgaccccacgcagccggtggtcacgctctccccgctcaccgccgtgccggacgtgttcatggacgacctgatcgtgccgggcgcggaatacgacgtgcggccctctctggcggcctattacggcaaggaggccatcctgatcgcgggagaggagggggcgccatgagacatgcgcttgcccggcgccgcctgtccaaccgggcgctgatgtggctgtgcgtggcggctctgctgctcagcctgatgccgctgtacgccctgtccgcgtacaaccatgcctgctatgacgacttcggtttttccatccgcacgcatgatacctggcgcgaaaccgggagcttcctggagacggtacgcgccgccgtacagaacaccgtgagcatccgcgacacctgggagggcacctacaccacgtccttcctgagcgcgcttcaacccgcgctgttcggcgaggacctctactgggtgacgacggccctgctgctgacgtttttgctgtttgcggtgtggttcttcctgcggcaggcgctggtgcggacgctgggcgcggaccggcaggccttctggacggcgttctgcgcggtgacgtttgtgatggtgcagtttgtgccggaactgagcgaggcgtttttctggttcaacggcggcgtggcctacacgctgctgtgggccgtggcgctggttcggctgggcgtgtggctgtgctttgaacgcgcgcagcggcggggggcgaaggtcgcgctgtatgcgctgcttcttgtgctgaccgtggcggtgggcggggccaagtactccacgctgcttttgtgcctgttggcagacgcgctgctggtggcgcgggcgctgctggtgcggcggcgtgaccgcgtggccgaaaccgctgtgctcgtgctgctgctggcctgctttgccttcagcgcgtccgcgccgggcaacgccgtgcgtgccgctactctttccggcggcatgagcgcgcccagggccgtgttgcaggcgttctacttcggtgtggcgctgatgggcagctggttttccctgccgctgctggtggtgtgggcgctggtggcctggcagctgagcgaggccatccgcggctgtccctgccgcttcaaccatcccgtgtggatcacggcgctgagcgtgtgcctgttctgcgcgcagctggcccccacactttacaccggcaactacctgggcgacggccgcacgctcaacacctacttttacaccttcgtgctcatgagctgcgcgctcgtgctctactggctggggtgggcgcagcggcgcgcggaggaccgcctgcccttcgcggccatcggcacggcccggcgcgacggcctgcgccttgccgcgtttgcagcggcgctggtgctgctggcggtggggtgcgtgagctaccgtccggagggcagcgcggactggagcctgtggaacacggcttcgggcagcgcggtgcgctcactgatgaccgggcaggcagcggcctacgacgcggccatggacgcgcgcgacgccgccatgaacgacccgaaaaacacccggcccgtgctcacgcctgtggaaaacgtgcctgacgccttcatgggcgacgcgctgaacgcggacaacctcgattatgtgctcagcctgtacgcggagtattacgaaaagcagcaggtcacggctgcggagggggaatagcatgctcttggaaggaaagaacgcgctgattaccggcgcggcgcgcggcatcggcgcggcgatggtggaggtgttcgcccgcgagggggccaacgtgtgggccttcgcccgcacgccggacgcgcgctttgaggcgcggctggccatggccgccggaaagtacggcgtatggatcaagcccgtctactgcgagctgaccgacacggcggcgctcaaggaagcgttccgccaggtgatggcggacaagcagcccctgcatgtgctggtcaacaacgccggcatcatgggcgaggaccgcatgtttcagatgacctccgccgaggacatgcgccgcatcatggacgtgaacttcttcgccatggtggaggtcagccgcctggccacgcgcctcatggcgcgaaacaaatgcggcgcggtggtcaacatcgccagcgtcgccggcatcgagggcgacagccgcctggactattccgcctccaaggcggcggtgatcgccgccacgaagaagatggcgcgcgagctcatcagcgtgggcatccgcgtcaacgccctggcccccggatttacggacacggacctggtgagcgggctgagcgaaaaggtgacgcaggagcagctgggccgcatcctcatgcaccgaaaggcccggcccgaggagatcgcggacgtggcggccttcctggccagcgacatggccagctacgtgaccggtcaggtctggcgcgtggacggcggcatgctgtgagccggcatccccgcagaaaacaacgaccccatcatcagagaggagcgattcacatgacgaatctggaaaagtacgtaaaggcgttttccgaggcgctggaggtgcccgaaagcgacgtgcccgccctcaaatacggcgagagcgaccagtgggacagcgtgggccacatgaccctgatcgccgcgctggaggacgcgttcgacatcatggtggatatggacgacatcatcgacctgagctcgtttgagaaggggaaggagattctgcgcaagtatgatgtggagatttgaccgcttcggcgacgccgtggcgctgcttgacgagcacggccagagcctgacctacgcgcagcttgcgcgcgagggcgaggcgctgtgcggggccatcggcgggcgctgcctgtgctttggcctgtgcggcaacaccatcggcagcgccgtgggctacgcgggcatggtggagggtggcgtggtgcccgcgctgctggccgcctccatcgaccgggagctgtttgccgcgctgtacgaggcgtatcacccggcgtacctgtgggcgccggagggttttgaatgggaagcgtgcgaaagcgtctacgaacgctttggctaccgcctgctcaaaacgccctttggcacggagacgaagctgcatgacgaccttgcgctgcttctgaccaccagcggctccaccggcagccccaagtttgtgcgccagagctacgcaaacatccgcgccaacaccgaaagcatcgtggaatacctcgcgctgaccgcgcaggagcggcccatcacgacgctgcccatgaactacacctacgggctgagcatcctcaacacccacctgtgggtgggcgcgaccgtgctgttgaccgagaagggcatcgcgcagcgcgacttctggaccttctttaaggaggcgggggccaccagcatgggcggcgtgccctacacctatgagatgctcgaccgcatgcgcttcacccgcatggacctgcccacgctgcgcacgctcacccaggcgggcggaaagctcctgcccgacctgcaccgccgatttgcccagtggtgcagggacacggggcgcaagttcgtcgtcatgtatggacagtgcgaggccacggcccgcatggcctacctgccctgggagatgagtctggacaaggtgggcgccatgggcgtggccatccccggcgggcgctttgagctcgtcggcgtggacggcgaaatcatcaccgagccgcacgtgacgggcgagcttcgctactacggcgagaacgtgacgctgggatacgcccagtgcggggccgaccttgccaagggcgacgagcgcggcggcgtgctggacaccggcgatatggcgcaggtggacgaggacggctgctacacggtcgttggccgcaagaagcggtttttgaagatgtacggcaaccgcgtgaacctcgacgaaaccgagcgcatgctcaaggcggcgttcccggacgcggaatgcgcctgcgcgggccgggacgaccacctgatgatcttctccaccgacgcggacgcgctgcccgccatgcgcgcctggctgtcggaaaagacggggctgaaccagagcggcttccatacgatgcacctggacgccatccccaagaacgacgcgggcaagaccctctaccgggagctggagaaataccatgtatgacgtcaacgacctgccctctctgcccgtctacgaatgggaccgggcgaaaaagcgggcctttctggacgcggagctgtcggacctgacggactggcacgccgcgcgctgcccccagtatgcgcgcatgcgcgacgcctggcccgcatgcggagagggccttgagacgctgccctttctgccggtgcggctgttcaaggagcttacgctcaaaagcgtgcccgacgaagccctccaccgcaccatgacctcgtcgggcaccacgggccagcaggtgagccgcatctacctcgaccgggaaaccagcgccctgcaaagcaaggtcttaagccgcatcatgggcgagtttctgggcaagcagcgcctgcccatgatcatcctggacaccagcgccgtcatcaggaaccgcgccatgttctcggcacggggcgcgggcattctgggcttcagcatgttcgcgcgcgacaaggtgttcgcgctggacgagcacatggagctggacacggaggggctggaggcgtttctcaaaaagcacgagggggaggacatcttcctcttcggcttcacgttcatgatctggcagcacttcgtggccaggctgcgggagacgggctaccatccggatctcagccgcggggtgctggtgcacggcggcggatggaagaagctggcggaccagcagatttccaccgagcgcttcaagcgggaactgcgggagacctgcggcctcacccgcgtgcacaactactacggcatggtcgagcagaccggcaccatctacatggaatgcgagcacggccacctgcacgcgcccgtgtggtcggacgtgaccatccggcgggcggcggatttctccgtggccgacgtgggggagacggggctgattcaggtatccagcgtgctgccgcgcagctatccgggccatgtgctcctcaccgaggacgaggggcgcatcctcggcgaggacgactgcccctgcggccgcaagggcaaatactttgaaattctggggcgtgtcaagcgcgccgaggtgcgggggtgcagcgatacctatgagcagaaatgagccctatacccgcctgtgcggcggggactggcagagcgcccgcccccttgcgccctttgacggcggcgtgatggccttcctttccgacctgggcgcggccctcatcgccgaccgcgaggcgcgcgcctacccggacgtggtggccttcggcttcttctgccggcgcgcgaatctggaggcgctggcgcgggaatacgagggcgcggtttcggaccggctggggcgcgggctttcgttccacatcgcgcccagcaacgtgccggtcaacttcgcctattcgctggcggcggggctgctggcgggcaacgcctgcgtggtcaaggcctccagccgggattttccgcagacgcgcatcatctgccgcgtgatggacgcgctgcttcgcggcgcgcacgcggcgctggcaaaccacgcatgcgtggtgatttacccacgcgaccgtcaggacgtgacggagatgctgagcgcccagtgcgacgcgcgcatcatctggggcggcgacgagacggtgcgccgcgtgcgcatggcgccgctcgcgccccgcgcggtggaggtcgccttccccgaccgctacagcctgctggccgtggacgcaaagcgcgtgctggccctggatgacaaggcgctggccgccgtggcgcgcggcttttacaacgacacgtatctcaccgaccagaacgcctgcacctcgccccggctggtgtactggctgggcgggcgggacgcggtgacgcaggcgcaggcgcgcttctgggaggccgtgcgcgcgtatgccgcgccgcgctatcccatcgagccggtggtggcggtggacaagctgaccgcggccttccgggcggccgccgcgctgccgggcgcggccattgcgcccatgccggacaacaccgtggtgcgcgttcaggtgagcgcgctcaccccggacatcgacgagcaccgctgcgcgggcggcttctttgtggagtacgccgccgaaacgctggacagcctgattccggtggtgaagcgcaagtaccagacgctcggctatctggggctggagccggaggcgctgcggcgcttcgtgcgcgaaaacgccctgtggggcgtggaccgcatcgcgcccgtggggcacaccatggacttcgcccttacctgggacggctacgacctcatccgcacgctcagccgccgcatatccgccatctgacgaaacgaggtgcctttatggccaaaccgctgctttcctttgtgattccctgctaccgctcggccaacaccatcggcgcggtggtccgggagctgaacgacacgctcgccgcccgcgcggacgagtacgaccatgagatcatcctggtcaacgacggcagccccgacgacaccgccgacgccatccgcgagctgtgcgcgcgggaccccgccatcgtgtttgtggacctgtcgcgcaacttcggccagcacagcgcggtgatggcgggctttcatcaggtgcggggcgatatcgtgatctgtctggacgacgacggacagacccccgcctgcgaatgcttcaagctcatcgacaaggtggccgaggggtacgacatcgtctttgcccagtaccccagacgcaggcaaagcgcgcttcgcaacctgggcagccgcttcaacgccgcctgcaaccactacttcttcggccagcccagggagctgaccgtcaacagctactacgcctgccgccgctttgtggtggataccgcgctccagtatcccaacccctttccctacgtgacgggccttttgttccagagcgtgagccgctatgccaacgtgcccgtggagcaccgcgcccgcgcggagggccgcagcggctacaacctcaaaaagctggtggccctgtggctcaacggcgtgacggccttttccatcaagcccctgcgctttgccagctacgccggctggttcacggcggtggtgggcgtggtgttcgcgctggcgacggtgattcgcaagctggtaaatcccgacatccccgccggctgggccagcacgatttccgtgctgctgctgctgggcggcatgatcatcgcgctgatcggcgtggtaggggagtacatcggccgcatctatctgagcatcaaccgttcgccgcagtttgtggtgcgcagcgtgacgcgcggggcggcggagggaatccatcagccagaggaaagggagatgaacgcggatgaagaccacgcatgcggtctgggagcgtgaaaacctgggcgtggacgcctacgagatcgcgctggacgcatccgacaccccggacctgctccgtcaggaggaggcgcgcatcatcgcggcgggcgcggaatatatcgtggtgaaaaccccggtggactgccccgcgctgctgttttcgatgcagtctttgggctatacgtttgtggagacggtctttcatgtgatgatccggcgggacgagtaccacatgccggcctccatcgcccggtttgaccggggccttcgcgtggtggagcgcagggaggaggccgaccgcgagcgcatctacgcgctgatccgccggggcgtgttcaaaagcgaccgcgtgagcatcgaccccgccttcggccgcgcaaagggcggcaaccgctacgccaactggctgcgaagcatgctggcgcgcggcggctttctctacgaggtgctctcgggcgacaagcccatcggctttttcgtcatctgccgcaaggatgaaaccacggtcgatcccgtgctcatgggcatgtacgacgaggagggcgaccgcggcatgggcgcgctgcttcacaaaaagacgctggatacctgcttcacccacgactgcaagcgcctgacctccaccatcgtcagcaacaacgccaaggttctgcgcgtgtacgtcaacgccggagcgaccatcaccgacaccctgtacacctacgtcaagcatgtgggctgacgccggggaggaatgactatgacaggcgcgatctgggtgctgctgatgaccggcggcgtggccgcgctgctggcggcggtgagccgcaggcgctttgaggaatgggcggcacccgcggtgtttttgctcacgggcgcgatctacgtctttgcgctggcgggcgcgccggagctgggatgccgggccgcgcaggcgatgggcctcttgtctctgctggccgcggcggtgctggccgtgcgtagccgtgaggcgcggtgccgcatcctcacgccgggcgcggcggcctttgcgctggtggtgctggtggccgggtgggcgcaccggggacagctctacacgatttgggacgagttttcccactggggccgggtggtcaaccggctctgcgcgctggggaccctgccccatgccgtgcccggcgcgttggactttcccagctatccgccgggggctgcgctctgggaatacgcgtgggtggtcctctccggcggcacgttcagcgagggcgcgaccatcagcgccaacaacgtggcgctggccgtgtgcttcctgccgctgatgcgctacgcggactggcggcgctggaagcgcgccgtgccgctgctgctggcgtccgtgatgctgcccctggcctttctggcatacgcttatcaggacgtgtatgtggacgcgctgctgggcgccgtcgccgcctacgcgctgatccagtggttcaccctgccgcgcggctgggagcggagtgctatgaccggcgcggccatgctggcgctctcgctggtgaaggagagcggcgcgtttctggcgctgctggccatggcggtgatgacgctggacctgtggcgggaaggcaggggaacgggcgcgcggcgcttcgcggccctggccgcgcccgcgctgtgccttttggtgggcgtggcgtcgtggaagatctacctggccctgaacggcatcgggagcgagaagcccttccgctactgggagatcggcgagaacatcgccctgttcctcgccggcgaatccccctggcaccagcaatacctgttcagcaacttcttccgctacctgaccatgccccagatgatgggcgaggggcacatccttaagccctgctatctggaatgggtgatgatcctgtgcctggcagcatgctatctggcgcgccgcaggcgggccgggggcgagctctgccccaaggcacggcgctacgggcgggccgtggctgccatgaccgccgccacagcggtatacgccgtgtgcctggtgcatctctacctgtatgccttcagcgagtcggaggccgcatcgctgcattcatttgatcgttacatggcaagcgtcatgattccggcattgtcgctggcggtcgcgctggcgctggaaagctgggaggcggatccgccccgcgcggttccggccgcactggccgtgctggcgggcatgatgctgctggtagcgcccgcgcagctgatgtcgctcacctttaccgcgcccctgcaggtggaagccacgcagtcgctgcgcggcggcttctacccgcccgcgtgggtgctggaggcgcttccccaggacgcgcgtgtggcctggatcgcctgcgggcgcgacgaggagaacatctaccgcacatatgtgtgcaaccgctatgagttcatgccggtggagctggaggccccctgcgggatgacgctggaaggcagcccggaggatgtggccgccgcgctggcggactatgaatacgtctactgctttgacgcggacgaggccttcatccaggcgtacggcggactgtttgaaaacccggacgacatcgccgacaaggcgctctaccgcgtggaaagcgcggagagcggtctccggcttgttagggtcgagtaggatccaatcccaggatataggcgaggatgtgatacgatgctgacctacatcaccaacgagtgcatgccgctggaaaagatgctggcgcgggtgcagaagcaccaccccggcgacggctgcctgctggtcaaaaaggcctacgagtttgccgaaaacgcgcaccggggacaggtgcgcaaaagcggcgagccgtatttcattcacccggtgtcggtggcgagcatcctcaccgacctgatgatcgacgcgccgaccatcgcggcgggctttctgcacgacacggtggaggactgcaaggacatcacgctggacaccatccgcacggaattcggcgaggaggtcgcccagctggtggacggcgtgaccaagctggacaagctggatttcaccaaccgcgaggagcagaaggccgaaagcctgcgcaagatgatcctggccatgagcaaggacatccgcgtggtcatcatcaagctggcggaccggctgcacaacatgcgcaccctgcgcttccagcccgaggagcggcagaaggccatcgcccacgagacgctggacatctacgcccccctggcgcaccgcctgggcatgaactccatcaaatccgagctggaggacctcagcttcaagtacatcgatcccgaagcctttcacgacatcgctcagaaggtgggcctcagacgaaccgagcgcgaggaaaacatccgcatggtcatctccgagctgtccgaaaagctcgacgcgcagcacatccactacgagatggacggccgccccaagcacctgtattccatctacaagaagatgaagggccagggcaagaccttcgaccagatctacgacctgatcgccgtgcgcgtgctggtggataccgtgcaggactgctacacggtgctgggcatcgtgcacacgctgtggaaccagatccccggccgcttcaaggactacatcagcgtgcccaagggcaacatgtaccagagcctgcacaccaccgtgatcggcgggcgcaagatgcccttcccctttgagatccagatccgcacctgggagatgcaccgcgtggccgagttcggcgtggcggcgcactggcgctacaaggagggcggcacgggcggcggcgatctggacaacaagctctactggctcaggcagatcctcgactggcagggcgatacgcgcgacagtcaggagttcatcgactcgctgaaaaccgacctgttcagcgaggaggtgctgctcttcacccccaagggcgatatcgtgagcatgcagcgcggcgcgacccccatcgacttcgcctaccgcatccactccggcgtgggcaaccactgcgtgggcgcgaaggtcaacggccgcatcgtgccgctggaaaccgagctggaaacgggcgaccgggtggagatcatcacctcgccctcctccaagggccccagcaccgactggctgcgcgtggtcaaaacccagcaggccaaggccaagatccgccagttcctcaagcgcgagctgcgcggcgaaaacgtcatcaagggccgcgacatgctggaaaaggaggccaagcgccgcggcgtggcgctctcggcgctgaccaagccggaatactatgaggggattctcaagcgctatgccttttccgagctcaacgacatctacggcgcggtgggctacggcggcatcgccagcgcctatgtgatcagccgcctgctggaggagcagcgcaagaccgagacccccgcgctgcccaaggtgcaggaggtttcccacgaggaggcgcagagccatctgggcaagcccacccacggcgtctacgtcaagggcgaaagcggcatgctggtgcgcttcgcccgctgctgcaaccccgtgcccggcgacgagatcatcggctatatcacccgcggccgcggcgtgaccgtgcacaaggccgactgcatcaacgccaccaactccgagcaggagcgcatggtggaggtgagctgggcgggcgggaacgagctggccaacttcaacgcctccatcaacatcatcgcctacgaccacgtaagcctgctgggcgagctggccctgtgcatcggcaacatggacgtgcccatcgtggcggtgtcggccaagcgggacgaaaagaaaaaaaccagcaacatcaccatggtcatccaggtcaagagccgcgagcagctggaccgcgtctttacccagctgcacaagcgcagcgacatcatcgaggtctaccgcggatcgacctgagaaaaggtacaaaggagatgggaaccatgcgtgcaaagtcggcagcccatattgtcgctgaggccgtgtgcctgaccgtggtgctggtgtgggcgctttcggcgtttccgtgcacgaatccggcgtatgagaccgttggggcggacagcggcatcttcctgtgcatgggccgcggcatcgtccaggggtatacgccctatgtggagatcacggaaaacaagggacctctgtttttcctgatgatggcgataccacagaggatcgtggagggaacggcgggcgtgtatgtgctggaggtgctcttcgccctgggcaactgcgcgctgctgatgctgatggcgcgctggctgatgggggaaaggcgcaacatcctctgcgtggcggcctgcataccggtgctgttgcgggtctgcggacaacacctgcactgcgaggaattcaactttcttttcatgctgctgggcttcgcggtgatgatccacgcctataccggacagacgcgcggcgccggggcaaggccgtttctgctggggctggccacggcggcgattgcgctcatcaagatcagcgacatcccggggctgggcgtgatggtgctgttctacatcggctatgccgtccgcgcccggcgctgcctgtggaaggatgcgctgcgctatctggcgggcatggcggtgctcgccgtgccggtcctgggctatctgggagctgtgggcgcgctgggggccatgtttgaggagtacattctcaacaacttcgtgcatgtggccagcgcaaaggacgcgggcttctgggagatccgccgctacctgattgaaaacggctatggctgggaaagcctcaaacccgtgctgctgatggccggagcggtcatcgtacgcctgttgatctatcgcggggaaccggagcgcttcaagcgtgaaaaagggctgctggcctgcgcggcaactgtggcggtggccaacatgcttgcggcctacgtgtccggtacggggttcgagcagcatctcgccatgggggactgtaccctgctgatggcctgtctgctggctctgagcgccgtgctggaccggctgaacagaaaggtccgctggatgaaatggctggagtacgccgctgcgctgtgcgtgctggcgtctgtcgcggtgccggccgtgaacgcgctggcgccgcaacagcgggaggcggccaggacggagcacgaggcgtatgtggcggtccagcgcgaacttttggattatctgggagaggacgaaacggtctataccatcggcatatggccggactggtactggttcgcggaccggcagcccgccttccgctactataacctgatcggatttatcaccgataacgtgggcgaggggctggagaatgaatttgaggcgtttctggaacagcatccgatcgacgcccttttcatcagcgacgatgtggagacataccgcggcattctgacggataaaacggtggagtatattctcaataactatcaggtcgtcagcgtggacagccaggggcgctcgctgtggaagctgatctgacggaagaggaaggaattacagatgcgtgcagtcattcagcgggtggagcgggccagcgtgagcgtggagggagaaatcaggggccagatcggcgcggggtttctggtgctgatcggcgtggaggagggcgacggcgacgccgatttcaggtatatcgccgaaaaggtgcccaacctgcgcgtctttgaggacgagcagggcaagatgaaccgttcgcttttggacgtgggcggcgagctgctggcggtcagccagttcactttgctgggcgacgcccgcggcgggcgcaggcccagcttcatcaccgccgcgcgtccggaaacagccgaccccatgtacgagcggctggtggcggactggcgcgcgcgcggcatccgggtggagacgggcgtgttcggcgcgcacatgaaggtgtcgctggtcaacgacggccccgtgaccatccttctggattcacgccggcggttttgaagaaagcagggagcggtagagatggctgggatctatgtggaatgcctgcccgtaggggcctttcaggaaaattgctatctggtggtgaacaccgaaacgcggggctgcctcatcgtggaccccggcgcggagggggagaggatcatccgggcggcgcaggagtacaagcccgccgccgtgctgctcacgcacgcgcattgggaccacatcggcgcggtggacgcggtgtgcggccatttcggcatcccgctctacgtgcatgaggcggacgcgcccaagctcaccgacagcacgaagaacgtggcccgccagttcggctgcgatgtgaccgtggccacacgtccccacctgctccatggcggggagacgctctttttggccgacatggagatccgggtgctgcatacgccggggcacagcgcgggcagcgtgtgctacctgctgccgcaggggcagggcgtactgacgggggacacgctgttcgcccacggctatggccggaccgactttgcggacggcagcttccatgagctcaaggaatcgctgcgcgcgctgtttcacctctcgccccggcaggtcgcctatccgggccatgaggaagccggcacggtggggcacgaccccgcggagggctgaagcatggaaaaggtgcgcatcgcgctgtatacgccgcttccgggattcgccaacgacctgtgcgacgtgctcaagctgttttttcaggtggaagcctttgacgtcaatcccgaaggcgagggcggcgagccgctgcgccatgactatcaggagcgcggcggcgtggcgcggagcgtgatgcatctgcgcggccgcagcttttcgatggagcaggctttgccgcaggccgcccccggcggggacggcgagcatttggcggttgcgctcaagcgggtgcgaaagcgcctgtgcaagctgtcgctgtaccgcctgctaaaggagctcacgggcgcgcatcccccgtggggcgcgctcacgggcatccggcccacgcggctgctctgtcaggccatggaggaagggcgctccatggaggaggccgaacggtatctggaatcgtttttcgacgtgacgcccggaaaggcggcgctgcttgcccgcatcgtgcgggagcagcaaaagctgcccgcgccctgcacggcgcaggcggacgtatatatctccatccccttttgccgcacgcgctgcgcctactgctccttccccggcgaggcggtaggcaagggtgggcgcatcgccccgtatctggaggcgcttttcggggagatgcgggagggcgcgcggctgatggagcggtgcgggctttcgctgcgcgcgctctacgtgggcggcggcaccccctcggcgctgggcgaggaggacttcgcccggctgatggacgaggtgacggcgcgctttcccggcgcgcgggagtacaccgtggaggcgggccgcccggacaccatcacccgcggcaagctgcttgcgctcaagcggctgggcatcggccgcatcagcatcaacccccagaccatgaacgacgaaaccctgcgcctcatcggccgggaccacacggcccgccagacctgcgaggcctttgcgctggcgcgggagctgggatttgacgacatcaacatggacgtgatcgcgggcctgcccggcgaggacgaggcggccttcgcccgcacgatggaggcggtgcgccgcctcgcgcccgacagcctgaccgtgcatacgctggccatcaagcggtccagccggctcaatctggagcgcgcgcccctgccggaccccgccgtggccgccgccatggtgcgcctgggcgaggagacggccgaggcgctcggccttgcgccctattacctctaccggcagaagtacatggccggacagcagcagaacgtgggttacgcccgccccggcgcggcgtgcctgtacaatgtggatatcatggaggaaaccacctccatcctcgccatgggcgcgggggccatcagcaagcgcgtgctgccggaccgggagctgcgcatccgccgcgcgcccaacgtgaccaatgtgagcgtctatatcgaccgcgcggaggaaatggcgcggcgtaaggaaatactttttacacaaacggagggagagaaaccatgcgaatcctagtggcactggaccagggcaccacatccagccgcgccatcgtctttgacgaggcgggacacacgcttgcctcgcatgccatcgagttcaagcagcactatccccagcccggctgggtggagcacgacccggacgacatcctcggcacccaggtggaggccctgcaaaaggccgtgaagatgagtaaggtggacgtgcgcgacatcgcggccatcggcattaccaatcagcgcgagaccaccctgctgtgggagaaggacacgggtcgctgcgtacacaacgccatcgtgtggcagtgccgccgcaccgcgccctatgtggagaagctggtgcgcgaggggcatggcgaaaccatccggaaaaagacgggccttgtgccggacgcctacttcagcgggacgaagctggcgtggctgctggatacgctgaacctgcacgagcgcgcggagaagggcgagctgtgcttcggcacggtggacagcttcctggcctggcatctggtggagggacggccgcacgtgaccgacgcgaccaacgccggccgcacgatgctctttaaccttcacacccaggagtgggacgacgagctgctgggcatgctgaacatcccccgcgcggtgctgccccaggtggtggacacggcgcaggtgatcggaaacctccggccggagattctgggccggcccattcccgtggcggccatggcgggcgaccagcatgcctcgctgttcgggcaggcgtgctttgagccgggcatggtgaaaaacacctacggcaccggctgcttcatgctgatgaacacgggcgaggtgccggtggagagccagaacgggctgctcaccaccatggcctggcggctggacggcaagcccaccttcgcgctggagggcagcgtgttcatgggcggcgcgacggttcagtggctgcgcgacgagatgaagctgatcaaaaacgccgccgagagcgagcagatcgccgagagcgtgccggatacggcgggcgtgtttctggtgcccgccttcacggggctgggcgcgccgtactgggacatgtatagccggggcaccatcgtgggcatgacccgcggcacgggccgggcgcacatcgtgcgcgcggcgctggaggccatctgctatcagagctgcgacctgttccgcgccatggtggcggaccggggacatcacgcgcccaaacacatgaacgtggacggcggcgcgagcgccaacggcttcatgatgcagtttcaggcggatatcctgggcgtgccggtgatccggcccgtggtgctggaaaccacggcgctgggcgcggcgctgctggcgggcatcggtacgggcgtgtatgccagcaaggaggaagccgcggccatggtccagccggacctgaccttccatccgcgcatggcggaccgcgaccgcgacctggccctctacgggtggcatcgggccgtggaacgcagccgcggctgggtggagccggacaagtaaaaaaacagcggggccgggagggcgtgtgcctttccggctccgtttcaaccgcgcaaagaggaggtgcggccatgaaaatcgagatctccgaggccttccccgaacatttccggcccgcgtatccggaggaattcgagctgttttcccactttgagacgacggcgggcatcccctcgccgctctttgccatcaccacatggaaggaaaacggcctgcccaacgtgtgcttccacgcgtggagctgctttcacggggacaggaccgcctttttcgccgtgatgggcaacctctaccagcacacccacacctatgccaacatcctgcgggaaaagtgcttcgccctgaatttcctgcccatcgcctgctatgaccggctggtggagaccatccgccgaaacggcatggacgaggacgagtttgaggcgggcggctttgcgctggaggaggcgcggaccattcatgcgccgctgatcgcggaggcgtttctgagtctggaatgcacgctcacggaggccaaagacctcaccggcgcgggacagaccgccatggtgacgggacaggtgcggcatgcgtgggtcgagaaagcctatgcgcgggggtatgaccggcgctacggcaaagacggcttcatgctgctggtgcccgcgccgcaggacctgctcaccggcgcgccgggacagtcgggcattgcgacggtggacatcaaacggctggactaaagcgcgcgcatcgggggcatcctgtttacggaggtgacggaaatgcttcccgaaatggagctgtttcagtacatttacaagacggccgacatgggctgccagggcatcgacacggtggaggagcacgccgaaaagcgcctgcgcgaggagctcaggcgcgagcggcaggagtaccagaccatccgtgacgaggcggacgggtatatccgccagcggggcgatacgcccgcgggcgtggggaccatggcgcgtgtatccgccgaatggatgagcaagggccagctggccatggatgattcgcgcggaaagatcgcggaaatgatgattcagggcaccaccatgggcatcgtcaagaccatccgccatctgaacgactatcagggcgacgacggcgacgcgcgcaggctgggcgagcgcctgctggatacgcaggagcagaacgtggagcgcatgaaagcctatctctgagccccttacaggcgccacaggcgcttgagctggctcaggcagcgcacagccatggccatgtcatcctccggggtgcatggcttttcgtttgcaaagatggtgtccagctccatttgtgcggtgggggtcaggcgcacgccgtccgcctcctcgaaggcgcggggcatcaggcgctccgccgcctggggaaagacgcggtaaaacaacggcagatagccgctcaaaaggtcctcgcgctccggcccgccgtaggggcgggtgccgttccaccggtccgcgccatggacggcgctctggagcgcgtcgtcccgcgccagcaggccgcgcgccacctcctgcttggggtggcggctctgcaccggcagcagcacgcgcaggggatggtccgtgctcaggcgcgtcatggccagcgagcacaggcgggt

SEQ ID NO: 2222 - DNA, 2414 bp, Unknown
  16S sequences of unknown bacteria
aaggaagcatccgacttgtcatatctggtggcgattctgcgaaaccacttgattttctggaaaaacactccaccagatggcgttccttatacaggaaccagtctaccggccatggatcggaaacgttgcttttgggcggaatcacatagctggccctgtgatcccaaatatattcccgaatcgtccgggcgccataggcccggtctgccagcacagcactctcgctaattctgacctttttcagcagttcaacagcgtgaagcgaatcgtgggcatttccagcggagagaaggaactttaccgggttttccaaaccgtctacgaccgcgtggagttttgtgttccacccgcctttggtacggccaaccgccttatccgccgttttttccccgccatttggcgaatcgggcgtacatagactgccaggggccataggcctccggcagctcacgccactgagcaccgctccggacgatccagagcatcccgttgagcatgatccggttatccttccggggacggccccgcttccccgtttcttccggcggcagcagcggcttgattcgtttccattattcttttgttaattcatatcgtttcatgctcgtagcttcgcataacttggtttattgtgcaacttttatttttcaaacaaggcctaataaaaagcaaaattaggaggattattatgcttaacaacaatttcaatttgcccggtaaggtagcgatcgttactggcggcggcggtgtgctcagcggtgtctttgccgaggctctggcctctaacggcgccaaagttgccctgttcgatatcaacgaggaagccgccaacaaggccgctcagcggctgaccaacaatggctgcatcgccaagggctatagggccgatgttctggatgcggatagcatctctgcggcttatgaacaggtgaagcaggatttcggcacctgcgacatcctgctcaactgcgccggcgttcatcaccccatggctactaccggtcatgagcagctgactctggaaaacatgaacgacgatacccggagtttcttcgacctggatctggagaaggtcaactgggtgtaccgtctggacttcatcggtaccttcatccccactcagatcatcagcaaggacatggtcggcagggaaggctgctctatcatcaatatttcctccatgaacgccatcagccccaccaccactgtgcctatctactccgccgccaaggccggcatcagcaactttaccgcatggcttgccaactatttcgccctggtcggcatccgcgtcaacgctttggcccccggctttttcgttacgaacctcaaccgcaatatcatgtaccatgaggacggtaccctcaccggccgttccgagcgtattctggctggtactcccgtgggtcgcttcggcgatccccaggagtgcgccggcaccctgctgtatctggtggatcccgagctgtccggtttcgtaactggtactgtgattcccatcgacggcggcttcagcgcctattgcggtgtgtaattattccatatcaggccggggcaaaggctgggcaagctttcccttacagatatggaatgtggtggccagggaataggcaaaaataccggaaagcgcttcgtttatcccgcagaacaactgccggtaaagagaggatgcactgctgtgtattatgttggaaaccttgaaaatgcccctaccgtggaaacagctgatccggaaaaacgaattcgccgctgcctcatttcgccgttgctggatccctcaaatcgggatattgcgcttggcatgacagaaatgcatcccggcgctgagtcaaattttgcctggcatcccgaaggagaactgtttatctgcacatccggcagcggccatgtccgaatcgaagacgaggtcattgagctgaaagagaattctacggtttatgtgcctaagtttgcaaaacatcagcttttggcagatagcggggatatcttcaccgtatactgggtcctgacacctcccttcggcggcgacaaacagattatcggccttgccagtagaacagaggaacctgaccaaccgcagacaaagggtagataagccacggttccgccacggaattccctgatatttctttctagagaacaagataaaccggaaagccacggagcttaccgtttcggtacaactccgtggctttttctatgtcaggaaggaaaactataacaaagaaatatttcttgcttgatttggagtaacaacaaaaccaactggtagtgtcaaggatttttcgcttacaaaaaatccggcgtccctatgctgtataggacgccggatttccattatgcctttgtcagtagcgcggataaggtaaaataagttgcgcaaatataaaagaggataaaaagagacatggttt

SEQ ID NO: 2223 - DNA, 32759 bp, Unknown
  16S sequences of unknown bacteria
aggatctatgctaccatagccgaccgaaaaaagcaaaattacgggggcgtaacacaagaaaaatgcaataggaaaaaggattaaaacaggaaaaacggacaaaagacgaatgtcggaaagcattgcgcggcgggaaaagcggcagccgatcccaagcggttcagcggggatggctcttccaccgccgcgcttttcggttcgggttttcctattttctttgggggcgtgggcttgtctgcggcggcgcgcagcgccgccgcactcgtctatgacaagctcacacctaactgccaacagcttgctttatagttttttgcgaataaaaaaataatgtgtttaacgtttccggcagagacaggcgctgcaaacaattcgccttcgttacgatacttcccttttgagaactttgtcaccaacatatccatcttttcacttctgaattcctgatgcctatgatttgcaatagttcattgatccgtatcgccatcgcatgatgtatttcatctgatcccctcttcgtttgtattcttggtaaagcgcaaacagttcttcttccgcgcgtatgatgcctcgacttttgatttaatatcaggataattggagtagcatcctgttaaaatcacctttcccccgcacatatatctatgagtggattaacgagggtacgtatccttgtgttgattatctttatgcccttgcaaaatttttaaaagataatgttgactatctcctcgggcgtactgattatagagattaaaaaggagaactcatgaaaaaaaagaataaattagtcctatttctgattgccatatccacactgctctttatcataacatctatcaatattcaaggtaataatagcaacttctttttcttctttctataataaaaaggcgaataaaatttcactcgccttttcaaacacaaacgcttgtatctgacagaggccgtaagcgtgactgccacaatacttacagacaatgttggaaaatagcatttaggaatttcattttgtaattatacaagatgggggagagcacaattaaccgagttttttggctccgaaaatcacgcgcagtttattttcaacaagacaaacgcgccgtaaagaacttgcttgccttccgccgatgtacacaccgtttttataccgttgttatttattttcgtgaacaacaaatcgccgctttggcaaacgctgccgccgaagactatcaaatcgggatcgatcatagctgatatcacgcgtacagcatacgcaatatattcagccgcatccgaaaaaatctgtttggcccacacgtctccttcgctcgccatacgggcgatatccgcacaagggtacgcacgcccgctcttcattttatatcggttttcgatccctgaacccgatgaatataattccaaacagtctatttgcccgcaaccgcataccagcccttctcccgcaacgggaatatgaccgaaatccgaggcattccccgcgccgtttaacactttgccatgtacgacagtacctccgccgatcccggtgcttatgcttatataacacactgtgccgcgctcggcaaacccaaactcttccgcaacgcccaacacacccgcatcgcaatcgtttatgagcgtaaaagcgatatgaaatttttccacgaacagttttataatcggaatatttttccagcccagagtaacaaggttaattagaattcctttttcacaatccaacggtcccggcgcggctattacgccttctgatacgtcgtatccgcgcaatttatctgcaacaaattcatatacccgttccgtcaatgcggctgcgccttcggcgggacgcgtaggaaatgcaccgtaaaaccgctcttctctgttctcgccgaaaatcgctaccgctgtctttgtcccgccgatgtcaacgcataaatacgccttttccatctgaatattatacctttgccaaaatttcatccgtaacgccatataaattgaaacaataaatatagcggtctatcgaatcttttatttttttgataatatatcgttccggctttaatccgagatctgcgatattccgattcagacaagcaaccgcctctttgactttgttatcttccagagtatagtgcccgcacatttttgttattaaattcaaatcctctgcgtctttcatgatttcatcgaccgaagctgttcttttttctccgaccatccacttacgccagcgctcccctcggacggcgtgctccgcaatgatactgcggatattgcttcgcttgtacggcgctgtaaatttttcttcgatttgcgccaattccaaaagcgcttccgtttcgaccaggccgaactcgggcgctacgttcatcgcgtcgagcccgataacaggatgctctaacaaaatggaattggaaagataatcgccgttatgctctttcagccccgtcccatagcaatgcgttatatcgctgagttttgttgcggtaatcgtgtcgtaatgcccgacgttagtcgttaatcgcgttaaagttcctgtttgacctaccacaaacaacggcatcggcaaactcttcttttccaaccttgctttcaattctttaataaacccttcaaaagcacgcgcatctattaatccgcccatcgtttcttccgttccgacttcgtaggaaatttctttccaaccgtatttcgcgcgttcttcctcgattttttcaataaatacaaccgtgcgctccaaaacggtcgataaaggcaccacgtccgtacaatgcggatccttggtcggatcgatatgtaacagatcgaaaccggcttttacgtcatccatgtacgattccaagccaattctcattgcctcgtcaacaggcaatttatccgacctttctttatcccgctgccacgggccgccgtgatcccgacaaaaataacagagaccgtcgaacccgatttcctccgcaattttttcggcggatctcacaaaacggttttggtcaaaaccgcaaacgtatccccctcccaaacgatcgctgtcaacctgatttctgctcgctattaaaatgagagggaatctcttttcctgcgcgagttccaaagccgctcgcagcaagttatatgacataggccctaccccgatatgcgtaaaccgtttcccttcttcacgcagtttttggcttgctcgcatcatttccgctatcgttattttatttttcataattccgcatcctctttatcctgtatataattttcatattttatcttgttcagcggccgaatcccgagccatttattcatttcggcgatctcgtcggaataatcgccccaaacaatgggataatgatgttcgaatccccccgaaagtatggtgttcgcaaaatccaacgctccgatatcttttccgtttagttttaattcgttcatccaaccgcggctgccgcaattgctgtcttttttccgatctataaatttccccgtaagattaatataactttccatatctccgctgaaacggaataccgttgctttacccgcatcgaacaccatatcccgcacgacgccgcaaccgttgatcttcccaggttcatgaggcattccgctataattttcgcccagcgtgtatccattcttacggcaatacgctttggatgaaggaccgcagtgccaaaacagaacggactcgtcttcctcgtcaaacgcggaaaaatccatgagcgtcgtgctttccccgctcatttcctgcaacgcaagcatactgatcgcgctcataagatcgccttcgcacgcggcgacaagtttatcgtcgttaagcataccgagcaccgaacacaccgaatatttgtagtcatcctgaaatttcggccagcaagaaaccgcgatcgcatcatacccgtattcttctgtcaatcggcgatacgccagataaatgcggatactcaaatcgcgcaagtttgccgcaacgggagtggccttgatccctagggcgtcgagttcggcaagataaggtttcacgtcttgatcggtcactttttccgctaacttgataacttcgtcgtattcatgcaaacggttgatataaatgccgtttagtttggaaaatacgctgcgttcgtcgaaatacaaatcataaaacccgggcgcaaaaccaccaatgagtgcaacgcgcgcatttttcaattttttgattgcctgcaacgcttttaccgttacggaaagacgtttgcgaaacatttgatcgtcggcaaagccataaaaccattttgcctgaatatgatgatcccttaaatatttatcgttaatgccttgatacatattgttagaacagaaagaattgaacaatacgggaccttttttagtttcggggatggaccagataccgacagcggcgtttttaattctgtagagcacgggggctaaaaatccggatgaataagaaatgtttaaaataagcaaaaaatcgatcttttcgccttccataaaatcaaccgcacgttttgcgtcaggctcggaaattatctgttccggccatatgaccaaatcaaaattcatttcagcggaattctttttcatctgatcgattatttttgcataatcctcttgtttaggtcctgcaaaacttaactgtgacgttcctactaaaccgacttttattttcatattaacttcttcctttcggccggttttcataataacccttcattattttccgaaaaccgccgttttttatttttttatccgcactgaaagtgcagatgaaatgcggtaaatatttaatcgccgcgcaaatttctgattgtctgatttacaagcaagaatttttcggtattcacgtaggcaggaatggaattaccgctgccgatggcaaaaccgccctctttttgttcggccaatttatatatctgcgtgacgtattcttttaaatccgcatcactcatacgcacatacgcgtccgtatcgattccgccgaaattgccgattctgcttccgtaagaattcacccaacgcgacatcaaagcaatctgatcttcgttggaatgtttcgcgtcgatatgaacttcatcaatcaattcgtccatgatcgaaaaaatacagccgcaggaatgcagtaaaaacggcttgccgtatccgtgaactatttgaatgatttttttataaacgggaaatatgttctccgaaatatcatcgggagaaagaagcgtgttggatttaaagcccagatcgtcgccaaaacgacagacgcaataaacatcggcatagtttgccaaaaaccactcccaaatccgaaacaaaagttcacccgctttttgaaaaaccgcatgatacaatttttcgttctcgaaagacatcaggcacaaattttcgtaaccggttaaatcctgcaccacttcgaaaacgccgtttcccacgccgccgacggcgcgcataccttccggcatattatttttcagagcatcgaaatacggcgccgcgtttcgcacgtacaaatcaaaaacgtcattccacggataattgttgaatttttcttcgtctgttatataaggattcgttattttattcgacagagccccgccatacggcaaaatatcagttacgcaatattcatacgataccgtatcgtaaccattgtctttataaaaattacagtatccttgaaaatagcggttcagatctcgttcttccccgttcaagtgttttttcaacggctgtcccgaaattttttcgatcacgtcgatatcgacaatatgttcatataaaggaatcctctccggctttatatttttggcacaactaactatattttcataatttggtttaaacatatttaccgatcccgtaacgctttatgattcgtaaattttaagttcctttactttttccgtataatattgcaccaattcccatttcgttccgggcatcaaccgatgatcgggacaaggaataaacccgcccagtaaaataagtttttgactacgcttcaattccgcgtctaccgcgtcacggtctttgcgcaacgccgttttatccatgcctcctacacctaacatatcgcggccgaacttattccgggcattctcaaactgatcgccccaggttccgatttcaatgggaaacattgtattgacgccgttttcataccagatcggaagcaatttttccgtaacgccgtcgcaatccaacgaaataatatctattccgtattttttacaaagatcgttacgttttttataatgtttcgcacacaaatcttcaaacataacgggagaaatcaaaggaccgtttttaaaacagatatcttcccaataatgcgcgaaatcaaatttagcgcccgttttcaacacttcttccgcacagcgatattgtaattcggcataagtatcgactatttcggcaaacagttcgtaatcgtcgcagagcatataactcatgccaataacggttatcatatttcttatatcgccgagtacgctgcccagatgcaggccgatcggataatcccgttcttctttattaaattcgtttttgaaatagtctacggggatcctgtccatcgaaaaccgcattttcggaagataatatttttcaaaagaatctctgtcttttaataaataatcgtcttctgctggaatagagcccgccccgtcgcggacccgttcgatcgcccccaacaaattctgtacgcgtttgaaaccgtcgggcaaaatttccaaaaccttttcttcgaacagcggttttaatccgatataagccgaagtgcatttataccaaccgaaatcccaccccagcattttatccaattctttttcggcatcgttgccttccgcccacgacttcgcaagatctgcggaaatatgcccctgttccgcccattcgtctaaaagttcgttccaatatccgaaatgcaccgcaggcatacggtccgcctttttaaaatgcaatatattcattgcgcgttctttgttcgtcataatttatttttcaaccccaaaaccgtataatttacgcaaaacctcttctttttctccgattccgtaaccgaattgcattttgatcaacacgtccggccggtcgatgacttttaaaatttcgtccatatatttttcgagattataataaacctgcaattttttccccgctttcgatattttagcgtaaacctcgctccaatctctcgtcacgggctcgccctcgccgggcacccattgaatcccctgcaaattcggcagagacagcaaactgtctaaatggggcaactgtccgactccgtctaaatggtaaaacgcgtttttcatatgtcctgccgtggaattcacctcgtctttcacatacgtatcaaagaatcccggactgatcatataagaaaagtcgctctgaatcatatacgacggctcttccgacaaaatcgtgccccaatcggaatatccccgactgcctttcagtacttcgttaaacgcatcatagcacttcaaccataaattttgcacttctccgacgagtcgggccacgtcttccggagaatcgtacagatccatcaacaaattatccgtaccgcgaaaggttgccaaaatatccagaattccgccgaggtctgtcattgccatgacgacatcccctttccaacgtttcattgcggcaatgtaaatatctctgattctgttgaaccatacgttgttatcgtcgaactcgaaatgcagatcttctatcggcaatactttttgcgggtgaaaccaaactgtattttcgttattttctaactttgccccgagaaaagccgccacgactccggggccgaaatgagacatattgacccatggataagcgtccccgtgaaattccatacaggagagatcgtagtcgattctgtctatgatctgatcgggggtgatgctgaaatcatttacgtttccaaaagccagcgacggcgtggaagggcaattccgcttcgggtcggcgccgtaaaaaacgcacggaagtataggtcggcccaatttgttttcgcgccaaagcctgtaattttgttgcacgcgatcccaatctttttcattaaagcgaatcatctgcattattctcctcttgcaattcgaatttcaaagttattccgtctttcgaaggatttgttataatcaactgacggttggggaatttgactctccattcgtcgtcttttccgatataaacggatacggcgtcgtaaaaatctctgcccaaaaaatccgaaacgaacaaaatacggctgccgttcaactgcgggcggaaccattccgcggcaattacaaaagcgccttgctccgcttttttcacgataatttccgccgtttcttcggacagccaggaaccgcacacgataattaaccgggtttcccgcaaacagcgctcatccgcaaacgaatcaaaaaccaaaacgttgtttaacgggcggaacaaagtatgcgatatttcatccgcaacgcccttttccagagggaatttgcgcaacgtttcgggatccctcggatattttgcattcggaaaacaatcatgcccggttaaatagggcgtactgccgcaatcgggaagcgtaccgtgtgaaagaacgtgcataaccttaaagaaactgccgctcttttcatcgggcatgggcgaatcggcgccgtataatccttttccgtaaaaagttcctttgtcggaaaaaattccgtcgtcggaccgaattacggcaatttcggcaacgcagtcggaagcgctgtacggcagatcttttcccttatgattccgtataaaatcgcgatagacttcgccgaattccgtaaaagaaaatttgtcccgatgcaataaaagcgggtcgcaattttctacaaacatccgatcgggagacagataatacgtcatttccagtccattggcaaattcctgcgggctatgtccggggaatccccataaccgcgtgaaccacgggcccacgtcgggtccccacaaatccaccgttacggacagaggtttttcgtattgtttcgccgcccccatcgccacggccatttgtatcggctgccatatttcttttaccgccttggccgaaattctcatcccgccgcggcaaaacgcgtggtacatcgtgcagaacaaaacttctccgtaaacggggcaattgtacgactctaccaattctttcaccgtacggaccgtctgttcctgcatttcacgcacggatagtccgttcggatttccccattgaaacagatgcggatctttctggtaaatcagattattcaactgcaaatgctctgtttcatcgtataacagcccttgaaaatatttcgacttttgggcctgctccaccaatttatgcggtacgtcgtagcggtttgtccccggcgtatagcataaattcgcattaccgaattcatttgccagaatatagtccattccgtattcgttcaaatcggaaatcagatccaaaatctcggaatcgttcggcattacgtgatggacatagaaatcgacgcccagatgttccgtgataaacgagaggaactcccgtttatcgggaggcggatcctgcgagggaaaccatgctccctcgcccgtacgcatcatagtcttacaagactccctgtgccacggatcatcccaggcgatcactgaattttggataccgaattgcatacagcttcctccgcaaaaaaatattttccgcttaccattctgcatccgagcgagataatacccctcgattccgtaaacagatttttgcattcgcaatgcaaaaagcaatctttcggaaccgtaagttctatctgatacccgccctcttttttatcgacgcgcagggaaatgtctccgtaccccgtggcgatatcggcacttatttttctgaaactcccgaaatcgggtttaaacgcacaaatttgataaccgtacgtttccggtacaattcccgcaacgtagcgctcgaaaagatgctgcaagccggcagaccaaccgtgacaagccgaattccacgtgtcgcggtcatcttccgcttctaccagcctgcggctcataaatttccccgttttaccgtcgataatctcccagcaagtatccgcgccttccgtgaccatcgcgccccaagtctgatgaaccaacgcgatcgcacgatcgatgtaaccgcattttaaaagcgcttccacctgcatcgatacgcaaaacggccagacgtgctcgttatgcacccagttttcgttctttaacggttctttgggatagattaccgttctgccgtaagggtgataaaacaaagagtccatcgcgttaaaaacattttcggtttcactttccggtataatttgaaatataatcgccaatgcgttcgaatccagtgaatagcgcatttctccgctctccatagtatcgcgcaataagtgcctttcggaatcgaacgccttttccatgatcaatgcagaaagttcgccgtacagcgccgcataatggtctgcgagttccttttcgtctttaaacaacaggctcgcaatgtaaaaagcgtaagcaagtacgcagttgctgcccgttaccgctcctttgcgagaaagcgtccaagcccatgtcctgccctgcggaatgacaagcataccgccctgcatcgatttttctaaaaactcggcgatctttttgagtttgaaataattttcccacagataatctttagctccggagagtaaaatatattctcggaacgctattaaaaaccaagcgttatactccaaaaactcacagcccgaaatactgcttgcgggaatattcccttcttccgacatacggcataaaatcacgtcgaaagtattttctatcacttctttatcgcggaataccgaccagaccgtacgtatttcgggcagtaaatctcctacccaaacctctcggtcgcgccgcgccccgtcataaattacataatcggttgttttaccgtgccacgttttggcaaatttttgactttgttccgattgcaggtggatcgtcgcgtttcccaaataatgcggttcgaggcacgcgtgcagggtatttccgcacagtttcatgatatcgttaaacaatccgtcgtcgcaagtaaacaaagtcctgcgcttttcctcccgcatccagtcgatcaattctatatccgctttttcaaaatcatcgtcgtttacggttaaacatatatatcgggccgcaataattttcgaaagataaaatttaccattgtttttcaaaggcagtgcaaacttcataaaatttttataaggcccgtaaacgccttttatatccgctgcgaccccggatattttcaattgcacgattactttgttttttaaatcgaataaatacgtgtctttttttatctttgttaacgaatgatccactttgacctctctcttccagcctataattttcgaggggaagactccgctcagagtcttcccctctcttaccgacagtcatgcaatcttatattatgctatttttttaccgatatctgtccgtagtccagcgacgtgaccgtaccatccgactggataatgacgctcagatacaactcgtctccgagttttgcagcctgctcttccgtaaggagatactggttcgtgtaccacgggttgccttctatcgtattgacaagtttaattccgtcggcagttcttgtaatactgaaatccacgtatgccgcttcttcatttgcatagaaaaaatccgacggtgcacccgaaccctccacctgctcataattaatctcatcgccatatacacccgtaaagtcggccgtatccataaccgtcatatgcaaaccggcgttcgtacccgattggaactttacatatttcgcggcaaaaccttcgccacgggcattcgtaaaacagaatcccacccagtttaatttagcattctggaggtaattatccatccatttcaatttgaatttgagagaagcattatcacctttaaaagcatatgcggcggaatttttcgcgataccgtttacggccgtactattctgcgtggtatatttgaagataaaatcgttcgcgctgacgctgtccttgctaaacatgataccgttcgaacccgtccaggtttcaaacgcggtgtagtcttccgatacggtgatcgagcattgcgcctgcacgttgccgtctgccgctttcacggttatcgtcgccgtgcccgcggctactaacgtaagcgcaccagtttcggcgtttacggctacgatatcggggtcgctgctttcccacgttaccgttttatcggttgcgtttacaggcagaaccgttgtgatcaatacaggcgccgtttcggtgagaccgacaagcacggacgttttattcagctgaatttcggttacgtgtaccgtttcgggaggctcgatggttttatcgcccaatgaggcaactccgtctatcgctttcgaccaatcggagtactcatacccgacaattaacgttaaatcgctcattttatagaaatatacgtacgctttgccgcggaagcccacttccatcgacagttccgttccgctgacgcaggccgaaccgccgtctttggtaaattccgttaaaggcgcgccgctcaatacatacagaacgtcgtctccataggtatgggtaggattgatttttaaaatattcggtttaacgatcagtttataactatccgaaacggcgccgttcatcgcttttgccgtgatataaataccgctgctcgtttttcccgtaagcgttactttccccgtttcgtctacggttgccacggagggatcggacgaactccaaatgaaaacgggagcaagatcggaaggctgcgtaccgggtataacggtaaattccgcatcgttgctgaacttttcgacttcctcgtcggcaaacgcaacatcggttatcgctttggcgggcgtgccttcgagtttgatatccgcacggccgagcggcgcatacggcgcgctggaaatgctgaactgcacgctcacatatacgtcggataaatcttcccaagcgccgaccacttcgtcgttcaaatcccaagtcatcgtataattttcgttacttaggttcgcaacgacgacttgatagccgccctcttgcctcttgacgagttctgccgtcaagccctttttgccgatgccgttcccgccgtccaatacagggaaaagggtggcatgcaccgactgctgctccgaataaacgggcgccgcgccgccttctgcccagccttgcgaatcgaccatatcgccttgcacttggataacattctcgctgacgttccggataatgaaacggaaacccgttccctctttcgcatcgcctacccacgaaggcgcagccgtggcaaatgtgatcatgatccacgaaccgccgtcggtacagggttccgtgtaatcgaaggtcaatttcaatcccttcgtcgcgtcaaacgctttttcgtgatacgcgatcgaatcctgcgttgcggctgtgtgcataaacgacgtgtagcctgctttttcctcgtcttccgttaagcccacggacgcgaccgaaccgtctcttgccgtcgaagtccagccatttaacgattgcgccaactccaatacggtgatcgcgcaaaccgcgttaaacgcaccgtcctccgttgttacgacgatacttgcctttcctgcttttaatcccgttaccaatccggtatcggataccgtagcgacggtattgtccgaggacgaccaggttatatttttattgcttgccgtatcgggcattacggttgcggacaactgaatcgtgccgtttttcaaaagcgacgcgctctgtttattcagcgatacgcccgacaccggctgcgtcgaatttaccgtcaaggttgcgaccgttgctccgtcttttttggcggtaacgtctgtcgtccccactttacggacgatcagaagatcctgatccgtttcgtcgatttcggcaacttccttgttggaactttcaaacgtcaaaacgtcggcgttgttttttacctttaacgtgcgcatcgcgccgggttttaagaccaccgtatcgccgtcggaaaattcgagcacctcgtattcatctccgccgggattatcgataggcggcttcgggttcggcttatctttaccgcaagcagcgatcatacaaaacgaacacatcaaaagaattgccaacaccaatgctaaaacttttttcatcgatttcataatttttaccccttataaatttgttcttcccgaaccgggcattatgttcggatcttgctttttccacgcggttgtacggaacacataattgaaacgacctgtgggcgccgcgtcgccgcacgtcataaaatcgtccgtattgccctgatcctgcatattatcgtgccatttaaactcgaagtttacctctcccgtcaatccgagcatttcgcggggaatggaaatctgaatctctcgccccgaaaccatataatcgacgtttcccgccttggtccaggaccaacccgttccgttgcttttttccaaagtacattttttcgcggtaggagcctcgcggtttacgacaaaatcgtatcctccccaccccgcgcccttcgttttgataaacaggcgcatccaggcagggtctttatatgacgtaatgtcttctttcgtctttgcgtaaaaatatacgttgttttcgtcatacgtgactttacactggataatatcgtttctgccgctgtcgtttttatagcggtcttttaaattgaatcctaaataatctctgtgcgttacgtcgccgatatcatcgtaatagcggttgctcacatccaaccaatccgcaaagtcatgcattccgatcgttttgccgccgctgttcaacggcgtttcgggcacgcctttatactgacggataaagttgaccatctggtaatacgtggcgtcgccatatccgcccttcatgggcattatgtcgcggttataacgcgtgttgtactggtccacaaacatattcggctgactcataccccaccagttatttaaacgctgcatgatccattcgttccaacctgtaatgaacgtaaagcggggatcgatttccaaggctctgccgatctgttcgttgaaatttgcgccgagcgcgatcgcttcatccattgattcatcatcggcaaccgtaccgttgctgaaatctcttccgcggcaacggccttcgctgaacggagcgacatacgcgtaatctttcctgttcggttcggaatccggatcgatgaccatgttctgcgccgtcgaaatgctcatttcttcatacggatcgtaagcggtcgtaaatacgggctgaggatacgtggtcatccagttccaggtatcgggaagcgacgaggcaaatccgctgccgtgcggctgacgggtttcgaaaaattccgactgttccgccgttaacgcggcagaattgatcataaccatcggtttgccgttgtcccaacggaaccacaaatcggaatacttacctacactgtacattctgtcccaccaataattcattacggcgctcgcattttccaaagaggaatttgccataaagaacatgaattgcggagttttgccgccatgggcgcggatatccagacaaatatccattaacgcctctacctgcttcgtataggttaaggaatccaatgtgcctaccgccgcgttggtgttatcaaatatcaaagtatcgacgcccgcgtcggcaagcatctgcatatcttttctgacaacccactcgtcgttttggttataatacccgtaaacagattcgccccaatggtgccaatcgtaaatctgacccaatccttcgcccgtttcgaggagatcgggatactgcttttccagttttgaaatatcgcggggcccgtcgttatatttcgctccgtaattccaaaggaaatagaaaatgcctacgtatttattctgtcttgcgccgtacgatacggagtcgttactcgctacggtcctgccgtaaccgtccgttgcagcccaagacgaactgtgcgtatcccactgataaaagtctaccgagagcaaatcgaacgctccgccgaatttgacggaaatttcctgcgtgtaaatcaaatcgaactcaaagtactggtttccatcaacggtctttaaatctttgatttcctgcaattgctttacggtattgttttctttgtacgaaacaatcattgacacgggcattgctccgtctttcgcgcgcacgcgcattttataaatagcacgctgcgagccgaaattaaaggtgatttgctgattttcggcaacgcttaccgctttttgattattcggtaccgccgctttcgccgcagtcttcggagaaacgctcaccacggataccgcgtcggtcgtataaaattccatttcgctgatttcgaagcggtaaccgttcgagatcgcggacagttccgacgccgtcgccttaacgaatttcgctacttgcccttctgccttaaacacgtggtcggtttcactgccggtcaactccgcccaactctttccgtctttactgtattcgtagtagactcttccgggatagttttccgcggcgtagtggatagacccgatcgacgtcggttcggaaaacagaaacgttacggaaacctgtccgtccttcccgaccgacgtgctctgccacttggtctcgatatgcgaatctaccgcaaaagcagcataactgccttgctcggtcatcccttccggggtctgcatataaacgttcgtaaccaacttatccgccggttcttcttttgaaacgtacgcggtaaacccgggattgaccgcggagcggtttcccttcgttacatcggggtcaaatccgcctttcggcgcacatccgaacaaagacatacccatcgttaccaccacagccaatgcacatagccatttatatttcacggtttatcctcccgttcagtttatgtgccctacgccgagttgatcggcggcttcatttaaaagtttttcgcctttatatttcgttttccaatcgcggacaaacaaatcccattcgtccaaagaacgcgtgccttttgcaaatttaacgtattcctgattcataaaactagacattgtcgctaaatccgtattgtccagttttatcttgaaataattttgccaacggggatacgaacggatttcgtcgtatttggaatcgtagaacgcgctgtactcgggataatcaggatcatatgttctatgatataaatcgcttaatccgatattttgccatgcaagcaaagaaagcgtggaagttcccttttctccgttcatatacggatgtttatcttcataaatcttgtaatacgtctttccttccggcgcgggcgctatgtagcacacttctttcccgaacacgtcgttgccgccgccctgaatcgtgttaaagtagtcgtcgcccgtatagagacactggtcgatcatatgacaaattcttttgagtttcccgggctcttcatacatcttcttcgggaatatgaaatagaatgcgggcgttgccgcaggcgccgcgaaaccgctgtcgagaggaggcaacggtgcccagtttttatacgaagttccctgtttattctgccctatccaccagtattccacgtacaggctcgcgggataatcgaccataccgaggtgatcgttcatcataagagatttcatgctttcccacgtcatcgtttcccagtcgggatggatcaatccgttcttcatgcagttgtttaagaacgtcagaaactttttttcggtaccgtctataatgggatgattgattttgccgtcttttacattgaaaccgggatgaccgtaattcggtttcagtttttccatcattccaaacaagccgccgtaattggcgctcgtcataaaatattcgccctttacttctttacatttcagcgcatactggtacagttcgtccatcgttttcggcatttccattttgaattctgccagccaatcggtgcggataaacaggttataatcgcattgctgttgatatttgggcaccccccacagcgttccgtcgtaagtgccgtggtcataatattcttccgttacatactgacacatattcggcatataagaaagaggaatttccgcgtccatcaattgatccatcattccgaaatcctgcatcaggtcaaggttgcccacaggcagaattatcatatcgggataatcctgatccgcaaaacgggtagacattgtcgtcccgaaatcccctccgttgatttgcgtaaattccagatcgatgttatattttgtttccatatacttttcgataggatcgtccaaaggcggttcaaccccgtaatggctgcccatgatttcgattgtatatttctgagtcatatcgtcatagtcgtacaactttctgtcgacgggagcgggagattccggcaacgaatcgtgatacgtgatttttttcacgggtgcgtcgctcaggtcccagtccgtgttaaaatttttgctgcctccgcaagcggcaaatattcccattgcgagcactaagcccagtagagccgcaacgatgcgaaaaggttttttcatagcatctcctccttaacttttccattttttatatacaccgctggtacggtcgaaatagacctcatccaacgattgtatccattctctttgtaatataatttttaactttattattcttttacagcacctgtaaaaacaccgaatacaaaatatttttgcaataacggatatacgatcaaaatgggaatcatagatattacgacggaagccattttaatacttgtaggcgtggattgcatagaaggatcgtaagatcctccgcccataccgtcagacgcgccgctcgtaagcaagttacgaacaatcaaagccatcggatacagagatttatctttggtgatatacaccatagcgtcaaaccaggaattccattgaccgacagcaacgaacaacgaagtggcggcaagcgcgggtaacgtcaaaggaaatacgatatgaatcatttttttgataggacccgccccgtccatatctgccgattccattaattctttcggcaaaccttcgataaaaactttaataaccaacgtgctgtacacgttaacgattgcgggaaccgtaagcactgcaaacgaattcagcagtcctaaatcggaataccataaatatgcgggaatcaagccgccgcctatcaacatggtaataatgataaaaatcatcatttctcttctgaacggtaatttggcctcggatagaacaaaacctacgcacaggcaacttaatgaagataatatcgtggaacacaccgttctcgccacacttatgagaaaactgtttaagaacaagtcttgcgttaaaacaaacttataagcgctgataacgggtttcatcggtaaaattacaaagtagttgttttccaccaactccgcatccgatgtaaatgacataccgattacatagatcaaaggaaacaagcatgttatgctaatgattcccatcaatacgatcagcactatctgataccgcatctccgcattaaaacgccatttcctctttttaattgaatttgttgcaatatttgaagacatttttaccacatcccccttccgcttacctttttcgccgtataattcgcactgactgtaaggaccagaccgacaattccgtttaaaaggccgaccgcaatacccacgctgtaatttcttacgctgcttaacccgacgcggtatacccacgttgaaagtacgtcggccacttcatatacggagtaattatagaacataagtatctgttcgaaatcggagccgagcaatcccccgatgcttaaaatcaaagaaaaagaaacgataggcagtaaggagggaaaagttatataccaaattcttttatacggtccgcaaccgtcgatttttgccgcttcgtaaagttccggcccgatagaagtaagccctgccaaatataatatagagccccatccgctgtttttccatatgtgagagaagacgattaaaaaaagaaaccatccgtttgaagtaaaaaacggaattttactcattcccagcttatctaaaatcacattgataaatcccgacccggtcgaaaaaaaagcaaaaaagatgccgtaaattatagtccacgaaaaaaaatacggaatatacaccaaagtttgacaagtctttttatatatttttccgttaagatcgtaaataaaaatagctaaaaatatgggagggaaaaaaccgaataccaatttcagaatgctgatccgcaacgtattccacaatgcccgtataatttctgcgttttcaaaaattttactgtaatttttaaaatgattaaacggcatttcgaatatactttttccgatttggaattcctgaaacgacataacggttcccgtaatcagaggtatataacaaaaaataatataacctacggcaaacggtaaaaatatcagatacaacaaataatactttttaagccgtttcccgagatcgctttttcttttttgttcagagtttctctgttcgacagcgataaaatcgatatcagtttcttgattcatttcttggtcccctttttatttttaaacatatttttaattaatatatgttatattttttcaatttactataaaccaattataatgagataaacaccttttgtcaatatgcatattttgtatttcacacacttctatcatatttccaatatttacatatattaatataatatatgatatcggtacaaaaaaaacagggaacccttactgttccctgcttttttattcaacgaattattgtttacaagacgatctaaacactatgtcatggtttacaattagatgcgtcgcataatcaccgcgctgaatattgccatcatctgaaatttgttgatacagcaatttcattgcctgccttccgatttcgccccagtgaagattgattgccgttaaaggcacttctaacttatcacaaatccttgtgttattatagccaatcaccaaaacgctatcgcctatttttttccccgcttttttaattaaactatatactgtggacgcgctcaaatcatcggttaaaagtacgccgattttcccgcggctctgcaaaagaaattccacgaaacgcctgtcttccccttcttgatcaaaatcgaacaaaaattgtttagcatccaaaccatattccgcaagcgcagattcaaatccgcgataacgttcggtagaagtgtacttatccaaacgggtatatgtaacttcaactacagaaacacaccctcgttccaataaaacatttgttgcatcgtacgaactgaaaacgtcgtttgaataaaccgaatcgcctattatctgcgcaggaggatttcctatcataacaaacggaatcccgcttgcacggaggcgcacataattttttactttaaaatggcgaaccggagaaataataatgccgtctactttcgatgcaaaaaaattatccaacgctatcgtttctaaatcatatgtcatattcaatgcaaaattcaatttacagttatataacaatgcttcctgctcgatccctttaattaccttcggaaaaaattccaatgtttccggaaaaatcaatccaatggtcaatgaccttacttccgacaaagaagttttcatgcgatataagcgagtttcgtaatccgaagccaaaaccgctattttaccttgcgacttaattataactccgctatcgaccaaaaacgcaaatgctttccttatcgtgactaaacttacattcaattctttttttatccattgctcagaaacaaatttatcacccgcgatataatggttgttcttaatcatctctattaaatataacaaaacctgctgttcttttccttgaatttgcattttttctctccgtacacaacataaaaattacaaatgtattatatcataaaaaatctacttatcaatatcttttatgatttttttcgtaacagcaaaataataatgctctatccttccgcaaaccctacgtaaagcgatagattctttagaatagtgcggttatagaccaagtgtttgtttattcacctttctccgagtgcattttcatatatttcagctgccgcggtatacgatagaagaaatgatatcgaaatgggcgttcaaccgctttttgcggttgtatgagaatctccgattccgcaggggcgacaatacgcaatggtacacgtccttaaaagcataacggcatggctttggcaatgtaatgtacgtgtttataaacgttccttccttacttggttttgtcttatttttcgcttacattcgatcgtctacttttctcaatattttcatatttagttaatccaataaatccaatgcgcaaaatgaaatcaccgttgcagtatctcaaacatatcattttatttgttctactgacatacgataaaagacataccaagctgagttctaacaataaaacaatatcttataatgaaataaagtgtccataaaaatatgttacagtcctgagacgagaaacttttgtttaatgaaaagagccacccgataaacgaatgactcttaaacaatattatgcttttgtaacctcaactttaacggttaaatttttacagcaccaattatccgatccacgaccgtgggccccgtatctcaaagaaagattcccggaatttaaatccgataattttagcccgacgttaaatttataatgagcataatttccgtccttttttgttccgccgtgttccaattcctgttcccacaaagttttactgccattacaaatataaatttcctgatatccgtcatctaattctttaatatccatttcaatatagatatataagtttgtaaacccggcaccgatcagcgatgaataattgatgttaaatttcgataacgatatgtcatcacttttattatcttctttcgcagcgtccgtaatcgtgaactcttcattccggcgcacaatcgttgtactttggacgacataccaaatcacgcttaattcggcatcacctgccccaaaagcatattcgccaccgaaagcataatcagtatatatataaggccttgaattgaaatcaggataaaaccgccaaaccccacgatgcatgtattttttaggtgtaggcaaatttatcttttctccgataataccttgcagggtttttatttcatttccatttttcaaggttaatgtatatagtttactccaagaagcatataaattcagatccccgatacagttatctgttgtttcaattttctctccctcaaaattttctgttttataccaccccgtaaaacgatagccctctttcgtcggaatagcaaaaataaagctactttctacagtataagaagccgagagcgtatcaagtgtaccgccgtttaaattataataaattttatattcaattgctgtcttatttaaataaacagtaatatcttcggcaaacggatatgcaaaattcatttctcctgccgcattgattatacaatctccgttaccttccggttgcgtataccatcctgatatcttatatccctgttcttccggaacaaaaatcccggacgcggattccccatatcgaacctttacggtttcatcatatccatcaaaataaatagtatattcattcgcctgcataactggatatagtatcaactcggcatcccgttcagaattaggagtataatcttttgctacggtgtccttaaaaatttttccgttcaacgaccatccttgaaacgtataacctgttttagtatatggtacgctccgtatattttcaccgatataatatgaatgctttgcaatcgtttgattatcagcactatagtttagagtgtaactttctgtttgatatacagcataaacttcgtattccccgttatttactaagttatgaaaacatgctactccgcccttagaatcttttaaataactgtatttatatcctggacgatataaagcatttattgccgcatttctgatttccgcattcgttgaatttcttaatgaaatcattttacaattcggacatagattttcttcataagcaatactttgctctatttctgataatccatccttaaacatccataatatcttctgattttgttctatgacaacttgaattttatatacttctcttgtccaatcggcttttacgattatcgaattttcatatgtataactggaaacggcagttcctttattcgtcgtaatttgctcgtcatccataaaccaaccgttgaatataaaaccccgtgtatttgcaacaggcaacgtaaaagttttaccatactctacttcaaaaatgaatttttgcgtaaccgttgtccctgattttagttcaaccaccccgttttcagaatccacttcatcatccgcaagatctatcgtaatttggtatttatcaaaaacccatcttgcataaaaagttttatttccgactgaaccgacatagacggtggttacagcttgtccgtcgaatccagcattatcgtaccaccctaaaaatatacagccattcttttggatagaagggagttggatactatcttctattgtgtaattgattgaagcaaggttcgtccccccgttcccgacaaaatctatagaatattgaatcggatcccattttgcatatagagtaatatcggcaaaattcagttcataaaaattatttacattcacagggtcgccttcaaaggattgcgacggccaccacccggcaaaatcatatcctgaccttaattccaagtccggaaatgtaatcgatgcatcatttacgagtacctgggttggaataaactgacctgaattggactcataaccgacgtttctctctttttgaactgcgactgatacagttacatccaaactcgtgcccgaaattaatttaaagtatttgtatcctgatccgtgttctacgactaattctgtttttccagcccctattgcattgaactttgaatcgagttcgtaaagtaaaatattattttctgaaattttcaggcgaaaataataattttgatcggaatgaatacgaaaatattcttctgttgtttggtcgaattttatattattctgcccgattccgacaacttgcggtacaaaatcaactcggaaaatgaaatttcctttccgtacaggatctttaaacgaaatattaaaatatcgcttttctccttgtttcaaataaatctcaatacttgcatcattgccgatttttttaccgttctgaacgaccaaatcgtcttcatcgatctccgccaagttcgtcaaatacggcgcattgaccgtagaaaaacggtagtacccgttacggggagcgttgaattgatatatatttttgccttgcgggagaatcgaaacaatatcctgcgcttgtaaaatctttttttcagataccgtgggaaacgaatagattgattcttcccgggctatctcgttcccttctctgtccctgatcgttatattgaataaacgatctatcctcgcctgccaagcaggcaaaaattcgccttgctcatcctgtgcggaagtataacttagttgataatcgaccgtgaaacttccgcccggttgaatataaacaaaatcattatccgaatattctccgttgtccggaatgcacagcatcgaagtcccgtatcttgaaagatatcctttatcgcgaatttgaccttcattggtaacgtagttcggtacataagtaaactctcttccgatcgcttcctgcgaatcaagcgtcagaactccggctgttacaagaaattctgccacgtttttgaccgtaccaattacaggatgtgattttaataaagcgtcaaacgccacatcgaaggccgtttttaaaacgaacttcgactcgtcgcgaaatatatggtcatttgcattgtagatcattgcgttatacgacgcgtctgtcattgttatgaatcggcctttatcctgaatcgctttataccccggatccgactcatttaaatgttgttcattgcgaatattgatcgaatttataatatcgctgacataatatttagtactttcagcatatcggacatggatattccccgccccgattacatacaactgagggagcggcataaccacgtctaaattttccgattcgatcaaaaaactgccttcatatccgccgttttccaaggcataaacatattctctttgaaataagaccgttatgttaaaataagcatgatctttggtatccggcaaatttactttattctcaaaatcaaaaacgatcagattactgtaacaatgcgtcttgcgatttaatgtttcgataaaaaaaccatactcttttccgatatgtaaagttttattctcgtagacaaacaaatttttcgggactatttttacaattggatcgtcttctgcggcggtcaaagaaaaacgttcgatcgaaggtttccagattgtttcgcaattactattaaataaatcgctctgccggatatcttctaaatgcagcgaatccgcataatcctgcacctgacattcgtctaaaacgccgtcacggtcgcgatcgaaataaaaatagtcatcttttgtatattcctccatctcactttgggcaaccgctgcttgttcttccgcctgtactaaactaaacagcccaaacaataatgcactgcaacaaacgaatgttaagatgaaaccaaaaacttttttcataaagtaatttcctcttcatataatttctatatctactatcacagagtaattcagcataaagtaacgcgatagttgataattatcgttattatctctgttaaattgataatgtaatctatatctccctttttgaatcggcaggcacattgcttgactacctttcataacagctaccgatacgttgcttcgccatcttaaatcttcatttttgggaaataacggagtaccgaatctttcaccgtttttcaacgaaattgcgttaaatattttcggttcgccatcatactcaaaggaataggttctatctgcaatatcacctttccctatctcattcatatcgtcgtccaccaaaataatttcatacacatcttctttttcggttttacagccgacaaacatatttattgtactgaacgccaatattacaaccaaaataattatcgtaatttttttcatgttttcctccttaaactaagttttgaagatttaattttacattattattccctccttgtaaattacttctataatatatacttgatatcttaactgaagtttccaataaaatgaattttaattctcaaacttgtttgaaattttaccaaagcgatgtccataatgcccgtgcttatttaatacaagattaatattttaaacattcccaaaggggggccacaaggttccccctttttatgtcccggaacacacttaaatcgtgggaaaagtccaagttaaggtaggtatgtgacgatgggacgtgtgcttgtgtatgaaaaaaaataatacttttgacatgatggctttatagcgaaaaaattttaaatctgcaaccgttgacttacgcgaggagttatgcttgacaaaactcggatttccacgattttactttgctgtgaacatgataaaaaagacgcccgaaagagtctttttaaaatagagttttgctcttttattaattattctaagccaaaattcattctgcggggctataatttcctgtatgttggctgtacatttatccgactcaagtttaaaaatgatattaaaaatttgcgaggttttagaaattgaacccttagaattatttaaaccccaagagtagtaaaaacgctatccaaaattcgatagcatttttttgttcaatttagaaataggcactccaccatgttggaatcagtcgaacttttgttgacataaaaaagttttggctggtttatttatttgtttctggtttaatatcgtcttttaatagccgaattgatatgacattctgcctgcaggcatacaatcgccctgggaataaaagttcattacatttttgccgaaatcgtccgcaacttttacttccataagacagttttctttggtaagaccgagtgcggaaagcgggacttttattaacattacattgccttgaatcgctgtttgcgcttgcccgaccgatttatattcgccgtttttatcggcagccagaacggtattttcttctctgttgacaacataagaataaccgtaattgtcggtatatcgataatttgccggcttaatgaagaggttcatccatgagtcgtccccctcttcgcgcggggggatctcatctaccgcttcaattcggaaatatgcgttggtctcatcgacgcaaatggacaggcttttaaaatcgacgcgagccgctgcgctgcggagtgtaacttttccgtcgaagcgaggccattcgcgtacacccgattcgccggtgaaatcttcgtaaaccgcggcgtttttccattcggaaaaatcgttcatggaaggcgttccctcgggaatattataatgaacggcttccttccccgtccaatcccgcaaataagaaatcgtttgcatgtagggcgtatccaaaagtttgttttccaacgaaggttcgatgtcgcgagaatattcatcgttgaatgtatcgcacataaaataactgccgtgcgtaccgccgcccgcagaataaattttctgcgcagaccattcgttccagcccgttatcgtgacaaagcgaagccgatcatcgttggcggcaactgttttccactggttttcataattcgcccctttgccgaaattctcgtgatcgtttccgtttccattcgtccatccccgtccgcgcgaaccgtttttgtcggaaaaacgtacggtgacatgctgcgccacggatacgttcatcaaatcgatatgaagaggctgcggatattcgtattccatccaagaaagtccgttctctcggtaagtataggtgccgttttcgttcacgggccattgcgtatcgcgaaaataaaagtactgtgcaagcggatcgttcgcggattccagattttcgcgtgcttcaggcgaaatcgctaccatcggtttgttttcgggtttcggacgaaaccacacgtcgtcgtatttatcctcggtatagaaggtcgaataaacgtcgcgcagattggtcaaacccgcgtcgggcgcagaattggagagcatatagacgatctgcggcgctttccagccctcggaacgatattccgcgataatgtcgaacagttttctggctacttcgttatacgtgatcgtattggaacagtccagaatcaagaaatcgatatctgccgcgacaaacatttccatgtgctttcgcatgacaaacgtatcgcccgcggaataatatccgagagcgggctctccccaaatatgggaggctccgccaggcgaatttaccgaatcctttccgaactcctcttcgccgtatttttcgatgatttcggttacgttatagattcccttcacgtcgtttccgctgcctgtattcaaaaagtagaatatgcccgcgtagcgcgttttatcttctttacgcccgtcagaagcgccgaaagaacggccgtacatatctgtgccgacggtatgattgaccgcgtattctttcgcgctcaacgagcgcgtatcttcctgacggggccccccgtaaaattgatagtcttcattgacgaacgactcctccccggaacacgcgcaaagcgctaaaacagccacagcgcacagtaaacaaaacaatttttttagtttcacctgtttcctcctttcaatatccgaacgaccaacttaaacctccgatcggcgcgctgtctcccgaattatagaaactcagcacatcgagcggatcgccgacgttatcgctcaccttgaattcgatcgaacagcgatcgcgcgaaaggcgcaaaagttttaaaggaacgctgacatacatctgatttccgacgacggcggtttccgcttttccctcttcgctgtaaactccgtattgcaccgacataacacggccgttttcgcggatcacgtagttatatccccatgccgcgctttcggcgctctctgtacggatatggatattcatccaaccggtatcccctgcttgataaggcgagatattctttgtcgctgcgatcctgaaatacagattttcgccgtctcgcgcaacatcgacggcggatatatcgtttcgcgcggtccggtccgtcaaacgttcgcccgtatatgcgccgtcgaaacgcggtgcatcgcgatagattgcttcgcccgtaaaatcagcatactttgccgcatctttccaactttcgtccgcaacatcgcttggcgataacgcggggatttcgtatcgccgcgcccgttcgtatttccattcgcggactttgcgaagattctgcaaataaaagttgtctttcattcccgaagaatacgtcggttcgatatcacgcgagaattcgtcgttaaattgatcgatcatcacatatccgttgatcggatccatgtcgggacgatacattttttgcgcgccccactcgttccagcccgtaacgaaaacatattgtatttcgttatctttagcaatcgcgttattccactgatgttccagattcgcgcccgcggcaaaattttcatggtcgtttccgttttccagcgtccagccgcggccgcgcgcagaaatcgaatcggacatcttcgatcctacatgctgcgcgacggaaacgctgatccagtttcccattactttgggatcgacgtcgaaatccatccagggcacgctgttatccgtgaaagatatgtctgtcggccagtaagaatttttgatttgaaaaaatcgggcaagttctcgctcctcttgcgtggcttccggagattcttccagatacacctgcgttttttccaaacaaatgaccatcggtttcccttcgggagcaaaccagatatcccgatacttatcctgcgcgtaataggtattgtaaacggtttttaactgcttgatatcgttttccattttaccgccgccgttcaactgatagacgatctgcggcgcattccagccttgggaacgatattccgctatcaaagaaaacaggacgtcggtgactttttcaaacagtgggccgttggagcagtccaacacgagaaaatcgatccccgaaaagacgaacatttcgatttgtcttcgcatcacccattcgtcgggcgcgccgtaatatccccagaccggttcgccccagacatggcacatgcccgaaggcgaaatatccgtatcagaattaaaaaaatcgcggccgtatcggttcagaatcttcgtcacgtcgtagatccccttcatatcggatgcctgattatgaatgagaaaatagaacagtccgacataccgcttcttgtccgatttgacggaatcggaaggatcgctgaagcgtccgagcgcgtcccttcccacggtgttgaggattgaatactcctggaccgtcagatttctctcgtcgacgatccgcctgtttgaagaacaggcggtcatcgcgagaatcatcagcgcaagtacgcaagccaaagtcgctttgcttttcatttttgttctcttttacggaaaatcatcagcgcgcaggaagagagaagcaataaggaaatcaacgcaaccccgcccgcgtcgtaaacgccgccgcaccctttttcgggtttgccaccgtccgtgccgttattgccgacgttgacttcgaaggtcaccgaaccgtcgttgaaattcacggtcaccgccgctttgccctcttcggaaaaatcataattgcataccgttctgtcagtgatcgcaatgtcttcttcgcctccgtcccgatagattgcgtgaagaatcaatcccgcgggatcaaagtcttcgccgactgcatactgcgtcttatccggcatcgtctttacggtaagcgcatcggaagtcgtattgccattcgcatcctccttaaaagggcgaagccacgaagtacccacaatattcatttcgatctccaccgtttcacgcaagatcgcgtcggggatcatcgtgtaggatgcaacgttattttcccagccggcctgatctccccagttattggtcaggtattccacgtaatacaatcccctttccaaacgcaccgccgccacgcattcgcgcgtaaattcgagcgaaggttcctgcccgccgtaatacgtatccaaatgaagcgcgagcgattcgccaaattgcgaaacgcgggcgatgtacggcataccgtttttatccttgatcttcatcaattcgccgaccgaataccatttgccgacctctaatcgaccgccctcgtatacttcggaaactttcaggaacatcttttctttcacgttggtggcgtcgtccgtcttatataaactccaaaagcccgtttttaccgatatattttcaaaattgaaacggacggacagcgttcccgcctgatcgctgatctgaatggggctgccgctgtagaaggtcatttttttatcgggattcttgtcagtgacggtgatttcgaatgaagtttgaaaatcacgatagttgattttgaccgtatatttcccggcgaccgtcatatcgtagccgctgatttccagttcgctgttttcaatcgtccatcccgcgtcggcgtccgattcatatgcctttacgataagtcccgtaagatcgggcacaagcatctcacccaaaccgtaatcgagtttagcaggttcgtattcgaccgcaatgtgatggatttcaggcgttacttcgatcttgatagaaaccgtttttccgcccc

SEQ ID NO: 2224 - DNA, 32759 bp, Unknown
  16S sequences of unknown bacteria
acttccacatccgacacttttcgaacaaatctactcaaaatgtcgataatgtaaacatttttaatgtttccgcttttcatactatctaaaacttcatcaaatgaaatgatttttgcttgcatttctttactctcctatctccattctttttgctatctcatatactacgggtacggtcacggagttacccgcctgcttatatagctgactgtctgaacatacttcttttgcacggtcaaaatagtcatctggaaaaccttgcagacggaaacattctcgaggggtgagctttcttaccctatatccatctttatcagataagatgaactttggctcaagccgtccccctgtcccggtattcaatgtcgggcttatcccgtctggactgtatatcctgtttgcctgcttgttctctccgtctatcagcgcgaccagtttcaagcctttttcatgctgtttacttttaacaagtgggtagcatccgactgtcgcattttcgcccgttctggttgtaatcacattaacacattgtctttgtagcttatcaaccttttcactgtctgctccgataggaaatatttttcgggtacatcgtcctctaagatgtccaacaatgaaaaccctctctctgttttgagggaggacatcggcagtgttgagcaccgcccactctgcatcatacccgatttcgtccaattccaggaggagccgtgcaaaatcaacccctctgttaatactaagtaagtttttaacgttttcaatgagtaagtaagagggtctatctttttccgcttgtcctctaataaggtttgtaactgcaaaaaacaagctagaacgctgtcctgcgaaaccttgctgttttcctgcaatgctgatatcttggcatgggaatccaaagcaccagcagtcggctcttggcatgtcctctgctcgaacccttgtaatgtcatctgcataccactcacactcccttggcttatgcatcgctatgtagcttttatttgcgtacttatctatctcacagtgcccgacacagatataccccgcctgctccatcgcaagacggaaaccgcctatgccggagaataagtctagaaatgtcatttgattaccccgttatatttttacagccctctttttactccgaagtgtcttttagcgctaagtaacttaaaatttctttttggacttgttcacgggtatagcatacagcagtacgatgtcccgcttttgataaagaaaacagccaatactcttgatttttagtaggtctatttttcccgacttttaattctatgtataaaccgcagtattgacctttaggtataggcagacatatatctggcacaccggactttaagccttctctttttaacttcgctccgtagtatatgcttcgttttccttcgttaggtatatggtataacaggtaaagttcggggtatttcccggtcataagctgtgcccactcaaaaatctgtatttgcagctgactttctgttaaaggttgtattttcttcattcatctttcctccgcattacgatttctatataccaatacccgttaaaatcattaaaagtaggcatgcactttaaaaattgataccctttgtatctcttttcaaaatattccttatcttctacatactgtgtagctatttttctaactccttgttttcctatccttccgtctttcggcggcggaatatagggttctttcaaatttttgctttgcgcccatcgcttttttccttgcggctcctttgtcatatatcgcgctatcgcttcacatccatattcgttgggttgtagcctgtccgcatttgtgaaatctccgtacttccacatcttttctgcggtgtctcgatccatcttggacataatcatgtgaaaatgccagcgcataaccccggtttttttactaaccttgcattcgataacataaatatattttaattctggtaaattgttcctttttctatatgttttaattcttctgatgtagtttactatatcccgtctcgcttcttgctcggttgagggcatctcactatctctatacgtgggatgtatcacaatatctccctcaccaaaattagcgttaatcaatcttgttaatttttttcgtgcatttttgtcattgagattcttttgctcttttgtagatagcttttctttttttgctcgcctcggaatctctcttccacttttatatacaggatatagctctacttctaaaattttaccagagtaaatttttttctctctatacataccatcaccataccgttgataagataatatccaatacaaggacggaaaaactccgtttggagcttctttttattgactgtgccggtatgatatgatataatatttatgttatttattgcgtaggctttcagtcttacgtaagcggtatatcttagcgtaaactaaggtgtaccgcctttcttttttacttttgtttccgtctcttttgtatcaattgctctatgtagtgctcaaattcaaatcgttctttatcggaaggtatcatcttaatacctttccactttttatatcggtcatacaaaaccctgattacagggtgattgacattaattttgtaaccgtatttattttccggtgcataaatcggttctttttctgttggtttaatttccatatcactcacctgttgtagggtctctattatgctttacacaccagttttccagctcttttctgattttacagtccaatgtctgaatatatactgtccacgcttctaaagggttttgggtttccagtatgattttttcgtcatttatcacacgaataatgttttctttcttatctgttcggatttctacccctctgcacttaaagttatccatgctatacgtctgcactttctcttatctggaaaaactttacacctttgtaagtaaaagatgtttcaagaaagctaaaatttgcatatttcacaggggtagaaaaatagcttgtttgtagtgctgttgccagctcttctatacctctaaaaatttgtatacctctccggaactcttggcaaagttctatctccccgaatctttccaattctttgtatttgtagtaaacacttaccagctcatctatatagtcgattttattttgtgtatcgtccgcaaacgcagggtgatttttaattttcatatccttcacactccaaaaacactttaatatcgaaagggctttcatcttcccatctgatatacttaaaatccacttctttaccaaagtaaggtaggtcaacgaaacttaactgatacccagcgcaattccatcctatcttgtccttattcggtagcgaagtatacacacagagagttgaatttttatcccttgtgacatatctaaagcctaaagtatatagtgcttttaaaatctctttttctctttgagaaaaagtacgacactttataatcaaatccggatttaacaaaattgttactaacttttcattgctgataacatcgtcattttttctaaaaattccatagaccttgtctatgtagtaggcggtatcgctccctgcgattctaaactcatctccgggatatagctctactaaagccaacgcttctaacatttttgactctctcatttgacataccttacctttccttgctataatgaatatagtttttattgctattgccctttgtcggtgttccagcaccaacagggctttttctttttttacttaaaaagtgatggactactgcaagtaaagttatccctgcgatacacactgcctgtcctataaagaagcctgctgcatctagtctgtcttgctcaaagctcccgactacgcctaacgctgatatagtcaaggcgaaagttaatgcaatagttgtccaatcaaaaatttttcttgccactttattcactcctttgcttgtcctgctaccaaaaggggcatatcccctttatatgctctcaaaattgcattggttcacacctttttgtatgcgctccatcaatctttttgatagctcttccatctcttctttgctgacaagatagtgacacttgccgttttcgtctacttccaaatatgtaatttttttatctcctaccataacggacacctttccggttaacggcttacttcttgccatataatcaccccctttgtatatgtattcttattacagtttgtctaaaaactgtttttatatttatctacccattaccgacagcaaaaagcatttgattgattaattttgtttgtgtggaatattattttggagaaaatatgatcatgtatagcgttccgtatcaaaaataaaaggagatatctaagaaagaatgtaatatgatatttgccctttgctgtcggtaatgggtagatggtgaggttataatacgatttgtttgtatcgtacttgttcttttgctaaatctaaaattaccattataatttctgctgtttgcatttcttctggaaagtgttttttgaacacctgaaaaattttgtcaatgtacggttttatgtactcgttcggcacaatagttccgcttcctgccatttgaattcctcccattgctgttcctcctttctttatttgccctctctcccatatagtggtaaaattcacttggaagggaggcgaataatgtatgaaaataaattatgactgcgttcgtgctttgctgttatgtttagaaaacgaattacaatttgatgatgaatttagataccttgaattgaaatttgataaagtgtgtaaacttattcctgattacattccgcaagatattgcgtattccacccttatgctgttggaagctgattatattaatgctttaattgtttctgggaataacaaattcaatggagcaatatatacaggtattacgtttgaaggacatcaatatctggattcaatccgcagcgacaaagtttggaataaaattaaaaagaaattgtcaaccgaaggcgtatctttaactttgcaaattgtaaaaaatgttgctacttcaataattacaaactcacttctcggataacttctcacataaatcgcaatacattttacattgcagatcaataaaggtgttaacaacactttttaattggtctgttttttctttcgttatatctttcgctactccatatcgcatttcagaggattctaactggttttctacaatagaattgtataaatctaaataagcattactaatattgcgcaaagcacctcgaagtatattttcattaaattggaagtctaaaccctcgcttttatttaccttcatgctttttccctctttttgtttagatttgggatactcgataccgaaagtttctgcgaactcaaaaatcacattttcccaattatctacaatttcatttaattttttacgtccatctttgagtattctctctaaggtggacattcttttttctaggttcaagattctttcttcttgtgtcacacttttatctccaatcatttaacgcagtatatttatatcgctttctttttatgctggttttgtttgttcttgtaattttttctgttaattggtaatatttagcggaaaggagggatactgtggataatcggcaactgaaaattttaaagtatatctatgatactccacgcactttttctaatataaaaaataaatttcatttagatgatgccgctttaagaaatttgttaaatggcgatgataactttattgattattacaacggtgtgcaacaaggtaaaaattttgatgaaaactctattgtcgcaagtaacttgggtagagctttcattgatcttcataaaagaaaaaatattactgattttctaccaatgatactttcaacaatcgctataataatttccattgcaagttttgttacaccatacataacttaacctatcttatgtaagctgcgattaagcttgcaacactaaaaacaagcgcgaatatagaataacacagagaaaatttctggaatttattcatattttcacctcctttatgcgggtttttgggtggtggtaatttgttttgtgtctaactcttcaaaaagataggtaactggtaagtctgggaaaaaatgattttttattaaaaacgcttcttttagagttatcgggcttttccttgatagtttgtttccggctgtatccctgttaacgttaatcactttagcgatttgtttaatagatatttcttttatcgccatttgagtttttaaatttttaaacgcaatattgtttttcatttttttacctccaaattaacgcattgcgtgatttcaagtttatattatcacgcaacgcgttaaaagtcaatacatattctgtgtttttttcttgcaatgcgtgaaatttgtggtataatatacctagataagaggtgaataaatggatttttataaaattttggaagatatcatgcaacaaaaatctataagtatccccgatgtggcaaggatgtgtaacttaccagattctaccatacggagcatcatttcaagaaaatcaaaaaccgtcgctcttgaagttgctttcaaaatttcaaaaggactaaatatctctttagaagaattaaacggtgaggttttaaatcaaagtaacgattctcactccactaacgaacaagaagtcataaaaaaataccgcgctctcgatgaacacggtaaaatgttggttaataatgttttggatttagagtacaagcgtgtaacctctcaaaaaagcaacgaagttacaataaatattgcagctcgtggcggagaaaacgagttaactttatcagaagaaaaataccaaaaattattacaagtaatcgaggaaaataaagataaagaaatacccgacatattcgattaatttccagtaatcccctaatgaaaaataccccagttataggtaaaatgtaccatataacaactaataggggtgtttttatgtacagagattacacacaagcgcgtaataaatcttgggaaattttaattaaatcgggaattacacagcttccggtcaacttaaaagctgttgctaagtacctgaatgtcagtattatcccatactccagactgggcaacaatgtgtttagtgacaaaatggctgccggtgacggttttactaccgctttattagacggtaaaaaacttgtctttataaacgacataaaagacatgagaagaatgcgctttactttggcacacgaacttggtcacgttgctttgaatcataagttagaccctattgcccaccggaacactgagtttgacgaagggttaacccccgatgaaatgcaagctaatgtttttgcacgtgacatacttatgcccgcttgcgtgcttgcaaaacttaaagtaaatactgctgatgaaatttcacaattatgtaatgtttcgtctacatccgcttccataagaatggaacgaatgaaaattttatatcaaagaaacaaatttggtctccaccctttggagcgacaagttttagaaaattttgaattatttattagtgagaaaaataaaaaataaccgcccactactgccatagtgaacggtttgaatggagttgcgtgtcatttaaccccaacattattatactaaattggcgatatttgtcaattaataaggaatgaaaaggggaaaaattatgaaaaggattatcggtttagttttggcaacgctgttatgtgctgctgtttttgttgggtgcgggagtgatgaaagtcaaggtgctaccgaaccgtatagcgtagctaagtttaatatgctacacgattcaaccttgccattagactgcgatggcgatattttaataaaaaatgggtactctcgtatagaagatctttataaaaaacaagttgaaaatgttaaggttggaaatatagttctaaccggacaagcacagcttatgagagatgaatcagatataatttgcgatataagctatgagtacaccaattcaacagaaagtaccatagaacagctttctgaaatttatggtcaatattcaacagacggttcttattatgagtggaaattaactcttcctgataatagtttatggatagtagaattgtacgatttttcagattcttctattttatctgacgataaaaccattcggttttatgataaagaaaagtacgatacttcgctgaaagaatactacgatgaagcatctaaaaaattaacatccgaacaaaagaaaattttgacacaagctgtagaaattgcagattcttatttagattttgaattggacggtgatgaagctcgaaacagactggatacactagaccagagatatgaaaatttagcaaaagatgatgatgtctttggattatacatttctatgttatcgacaagaattggtttaaatgaatcaaaccacaattatgataaagaaattattgagacaagaaacaccctcgcttctgcggttggaataagtgaaagataactactgtttccaaaacggaaatagttaaaatcccctatccgctcccaaaagagcagaaaaggggattttttcttaaaacttgtgaaaaatattcttgaaaccccttgacaatatgtgatatatcacatataatataaatataggatatatcacatatatcctataacacaaaatataaattaaggagaaacacaatgctggatatagaaaatctccgtaaacttatgaaagatgatagcaaagtatttgtcgctcaacatgcaatgcaacgttttagagaacgtggagtaaaatacaatgatgttataaattgtattttagttggagagattatagagcagtatccaaatgattaccctactccaagctgccttattttaggtattgaccgtttaaagcaatttatgcatgttgtttgcggaacagacggtgaatacttatggataataaccgcatattatccttctaaagataaatgggaaaacgattttaagacaagaaaggaataattttatgaaatgcttttattgtaaatcagatatgattgaatcgactacaactcatgttgcagaactaaaaaattgtgtagtaatcatcaagaatgttccgtgtataaaatgttcccaatgcggagaaacttcgtattccggtgcggttgcgaaaagaatcgatgaaattcttgatgtttgcgaaaaaaatatgaccgaaattgcggttattaattacagcatttccgcagcataaaggggataaatttcatgagtgatcttaaaaattatttagataaacaactacaggataaagaatttaaagaagagtgggaaacactcgaacctgaattttctgttatgcaagctatgatagacgcaagaaaaagcgcaggtttaacgcaaaaacaactttcagaaaaaaccggtatcacccaagcagatataagcaagttggaaagtggcaacgctaacccttctttgcgtactttacagagattagcttccggtatgggtatgaaggttaaaatcgaatttcaaccaatcggacaaaattaaatttatcccctatccgctcccaaaatgagcagaaaaggggatttttatttgaaaaaaaacaggtgattatatgaaaattgctgctgcatatgtcagagtatcaaccgaagatcagacagaacttagccctacatctcaaatcaagcagataagagagtacgccaaaaatcatggatatatcgtaccgaacgaatttgtttttgctgatgaaggtatcagcggtaaaaatacacaaaaacgccctgcttttaatcgtatgataggcttagcaaaaacaaaaccaaagccatttgagtgtattttgctttggaaatatagccgttttgcacgcaaccgcgaagatagtattgtgtataaatctatgcttcgtaagcaactcggtatagatgttatatctatatctgaaaatctcggcgatgacaaaatgtctatattaatcgaagcgctaatagaagctatggatgaatattacagtatcaaccttgccgaagaagtaaaacgcggtatgacggaacgcgtatcgcgcggtgaagctgtttctgtacctgcatacggatatgacattgaagaaggaaagtatattatcaacgaagcagaagcagaagttgtacgacaaattttttctgattttaataacggagttggaaccgttaccatagcgcggaatttaaacgctatcggcattaaaacaaagcgcggtaagctatgggaaaaccgtactgttaaatatattttacacaatcccgtttatatagggaaaattcgttggaatcccgaagaaataaccggtttaaattatgatcatgaaaaaattatgcttgtagacggtatacatgagccacttcttacaaaagatctttgggacagtgtgcaagaaaaactttcacttatgaaaaaaacaagaaaaccaagagaaagaagtaatccaacaccagactatatgttatatggattaatgcggtgcggttcttgcggtggaactttaactcaatctcgtgacggcttacaatgtcataagtacgcgcatggtacatgtgatacctcgcactacatctcacttagtaaggctaatactgctgtaatagacttgatacagcatacacttgaaaatggtatttttactttaacccctaaaaaacaagatgtttctactcaacaaatcgctatgatagataaacaaatacaaagtgaaaaaaataaacttataagagtaaaagaagcgttcgagtatggcgttgacactttggaggagtacaaggaaaacaaaaataaaattttacaaaaaatcagtgagttagagagtagtaaaccggtacagcaaactaatatagacaaaaagaagtttgcgcaaaaatatctcggtgttatagatactttaaaagatgatactgtaagtgaagctgataaaaaccatattttaagacagtttgttgaaaaaatagtgctgcatcgtccttcaaacgaaatcgaaattttttatcattattaattatcccttaaaacaatatgctccaccatattgactaatgataatttttgcaagctttgcattcggtgttttaattttaaccggatactgtaaacgtttttcatacacccacattattcattcgcctccacttcccatggccaagggcctgtaatccaagcccaacggctggtatctctgcttgtttcattaatcggtccaaattgagattcatatttttcagtcaattccgcagcctttttctgtgcttcttttaatcttttagccgcctcacaattatttggatgcgtgtctaaaaatatatgcaattcccatgcagagaattggtatgcactaatttggcgcatgagccgttcttgttcactcatttcatatccctccatttggttcccaaaaatggcttatcaagttcagggaaaatagtgccgttttccagacctttttctgcactgtaaattgttttgtattgttgatatggcacataagccattgcttctacagtaactgccggcaacggagtcgtctgtttcatttcaacgcatttttcttcattataatctgtcaaaatcggtctctcctttctatataataagcttatccatactatgtaatacagtttatttatgtgcttatcccttcaaaattaaaaatcaggtttataaatttctcccaagaaagcatccattgtatcaaaaatattttaatttattgtatttcttaatgaaataataacaaacatagactataataaaatcataacagaaaggatgtatcgtttatgagtaacttgcgagttgcaaaaacagaagaatttgataaaatattttccatattggaaaacagttttcctccggatgaatacagaacatacgaaggccaaaaatttctatggaatcatccaaagtacactgtatatgtaattcccgatgacgaatctgactgcatcaaagcatttatcacagtatggaaatttgaggatttcgcctttattgaacattttgcagtaaatcctttctaccgaaaccaaggacttggttcgttaattttgcatgaaattctgaatctgctgcagtgtcaaatctgtttggaagtagaattgccgaaaacagattttgcaaaaagacgaattggattttacgaacgaaacggattttttatcaatcactatccatatgctcaacctccttatacaagagaaaaacaaccagttccattgcttatgatgacttccggcaattgtgtttcaaaagaccgatttgatagtataaaagaaacaattttcaaagaagtgtatcaaacatcaaactaaatagaataaacgattccctactagacaaatatccggaaagaaatcatccattctatcaataaatttagaaactgaaaagggagacgcttgataaaaagcgtctcccttttcagtttttatttctttttggatttattcccttttatcttcttaataatacgagaagttaacgttccttttgctgctttttcggcagcttcttcttcctcttctttttgtcttgcttctctgtccgctttctcttcgtccgtcatttctctataaaccccgggaacactatatgccagagtatcatcaggcatatttcgttttcccaaacggcgagaaatccaacgttttagccatgtatacagcattgcgaaagttggtacaccaataatcataccaacaaatccaaacaatgcgccgaacactacaatagcaaatataatccaaaatccatttaacccaatggtttctcccaatatacgcggacaaataatgttaccatctatttgctgcaaaataatgataaagataacaaaatatactgcctgtaacgggttcaccaataaaattaaaatggcacttggaattgcaccaatgtaaggaccaaagaacggaatgacattagtgattgcaacaatgacactaatcattggaggataaggcaattgtaaaattgacataccaataaagcatagtataccaacaattaaagcatcaattaactgacctgtaataaagctgccgaatacagtgctggtttctcttgtgttacgaatcagtccgtctgcgcgtctgcggggcaatatcgcatatgctgcttttttgcactgtgcacagaatttttctttactgaatagaaagtaaatggcaatgattaaaccaataatgacatcttttaagaccataaatacattccataaaccggaaagtaaattggttgcaatattttgtaattgaggaaccaaatcggttgacatccaactttgaagcatttctttcgatttttccaatgcctgcaaaataaattctgcagacttgctgtcttgctttaaaatgccgtctaaccagcccataaagttattatagtacgactcaaagttattgtagaagcccataatgttggttaccagttgagggaacagcattaatgagaagacggtaattactacaaatagcaacaaaattgaaatcacaatactgatagcacgggatattttttcagcccgatgtactttttttgtttttttaaatacggttttcataaacaatttgtgtaatcgtttaacaaccggatttaaaataaacgcaaacgcaaaaccgtacaaaacaggcgttaaaataccgaatatagtgccaaaaaagccccatatcatatcaaaacggaaaatagcggcaaatagcagcaatccggcaataattaccgcaactgccgtaacaccccaatatagatattttttatcccatctatatctcataatttaaaatcatcgccctcctttctgaaaaataattggttatttttattattgtaccacctattgtttgaaaagtcaccctaatatttgtaaaaataaaaaacaggtttgtaacctgttttctttttatttatattttctgtttttccaccattttttgattcgttgtgacaaagtttgcttggttgcttttctgaaagcttcctccgcccgttcactttccattttatccactgcaattttttcttcttctgtcattgggcgaaaacatccctgcatgctataggcaaccgtttctgtaggcatatgttttttctgcaatctgcgtgtaatccagtttttaatccaggtataaatcacagcaaatgcaggaacaccaataattaaacctacgaatcccattgtgccgccaaataccactatggcaaagataacccaaaacccggttaatcccgttgcctctcccaacactttaggagcaataatatttccttcaatctgctgtaataccagaataaaaatcaaaaagtacaatgcctgaagagggtctaccaataaaatcaataaaatacttggaattgctcctatatacggaccaaaaaacggaatgacgttggcaacaccaatgatgacactgattagcggcggatatggaaactgaaatatcgtcattgcaataaaacaaagacctccgacgatagcggaatcgataatttttccggtaataaaaccgccaaacacacggtgcgcatatcttgcattttttacaataatatcaccgttatgatgactaaacagtgcataagtaaccttttttccctgtgcagcaaatttttctttgctgtataaaaagtatatggctataatcatgccgatgataagatctgcaaatacagaaaatactgaccataatgtagaagtcacatttaccaatatattttggagctgcggcactaagtctgcagacatccatccaacaatcatctgttttgcctgacctaaaaactgatttgcatattccgcaaaagaagaattttgccctaccagaccgttaatccaatcctctaaattatagaaatacgactcaatattttggtaaaagcccagtatattggtaattagctgcggaattagcatcatgcataaacctatcagaataccaagcagcaataaaacagatgccactacgctaatagctcttgcagctttttgtgccttatgaggcttcttggcattcttaaagtaggttttcatctgaatacggtccagtttattcacaaggggcgttaataaataagcaatggcaaatccatataaaacaggtgataagatacggaaaataaatccaattacgctcaatacgcctttaaattcaaaaatagccgcaaatacaagcaggcttacgacaattacacaaattgccgtaacgccccaatatagatattttttatcccatctatatttcaagaataccaaactcctcttccttgtcttttagcctctcttgttttagtcttgacttgttttggtgtaagtatccaaattcattcgcaaaattcaaaaataaaataagtattgcaaaaaatgattagtcattcacgatttttgtacccgttttccctaataaagcttcttttgcacagtccagcgatgtaataatagccgttccgttttttgtttgttctacaaaagataaacaagcttctacttttggaagcatactgcccggagcaaaatggccttgctggatatatgttctcgcttgtgacaccgtcatatttgtcagctcttgctgattttcttttttgtaatgaatacatactcgttccactgctgttaaaataatcagcatatctgcattcaaatcttctgctaattttgcactggatttatctttatcaattacagctgcaatcccttgataaccggtatctgtctctatgacaggtataccgccgccgccaactgtaattacaatattttttagattgaccaattgttgaatcaccggcaattctacaatagaaaccggatttggagacgcaactacacgacgataaccacgtcctgcatcctccgcaaatacaaatccttgctccttttccattcggtcagcttcttgtttggtataaaacatgccaataggctttacaggcgtttgaaacgctttgtcttctttgtccaccactacctgagtaatgacactgaccgcttgtctttccagtttgcgagattttaactcaaactggattgcctgctgcaagtggtatccaatatatccctgcgacatcgcgccacattccggaaacggcatatatggcgttttggctccatgggcagatgcaaaatccattgcaagatttatcatacctatttgagggccatttccatgaccaaccacaatttcgtagccctcttctaccaaatctacaatagatttcgccgtttttttcaccaactgaatttgttcctgcggtgtttgtcccaatgcgttaccgcccaaagccaatacaatacgtttcacgattccattcacctcaaagttatgtatgcgtaagtaattttatcataccacattttctcagtaaaaaaaagaaaaattaaaaaggacatttatttgtaccacatgtgtctgatatcatacccgatgataatatacttatgctctatcattatactttttccatgatgaaattaattgtattttggacttttacatgattataacaaaatggagatactatatatttgataacctccaaaaaaaaagataaaggtttctttttagacacctttatctttcaatacgtttactttattgtacatcatctgaccctgaagccatggtatgtaagctggtaaaacgctccaggaacgcttttgttctttccttttgaggatggttgataacatcatccggttttccctcttccacaatatagcctccgtccataaaaataacgcggtcggccacatcacgcgcaaaagacatttcatgggtaacaaccaccatggttctgccttcttttgcaaggtcttggataatctttaaaatttctcccgttaactcagggtccaaagcggaggttggttcatcaaaaaataatattttggggttaagcgccaacgcacgtgcaatggaaacacgctgctgctgacctccggaaagttcacatggatacgatttctcttttgattccaatccaactttttttaaaagttctcttgcttcctgctgcgcctgttcctttggttttttcaacacacgaataggcgcctctgtaatattttttaaaacagaaaggtgtggaaacagattaaagttctgaaacaccattcccacgttcaagcggattttcttcaaaatttgctttggcgcgtagattgcttcgttttttccctgcccaacaatcatatcgtcaccacaaatagtcactttcccacttgtaatctgctcaaattgatttaagcaacgcagtaatgtggattttcccgaaccggaagggccgataatggcaaccacttcaccttgattcacctctaaagaaatatccttcaaaacttctaaatctttaaatttttttgaaagattttctactttcagcattaccataacagcaccctccttacttataataatttaactttttctctataaatcggaacaataatgataacaataggttaaagaaataatagtaaatacctgcaataataagcggagtaatcacaccatttgcgtttgtttgtttattcgccataaagaatagctcttcaacactcagtgcgtatgccagagaagtatcttttacaagcgtaatgacttcatttgcagtagacggaatgacacgtttgattacttgaggtaaaataattctaaaaaatgtttgtgattttgaaagtcccaatgctgcggaggcttcgtattgtcctttttccatagaatccatacctccacggaaaatctctgcaaaataagctgcatagtttaacacaaatgcaatcaaagccgccaaaaatctatcataatttaaaccaaacatatatttaggtgcaaagtaaacaaataataactgcaatagcaacggcgtgccacgcataatggaaatatagagagaaaccggccaagatatcactttatactttgaacgccttccaaaggacagcagtactcccaaaggaatggcacatactaaagtaactgcgaatatctccaaagcaactccgcagccggataaaaacataacaaaccaatttccaatttgatcccaattcataaacatacctcctttggaaatatctacactgtaaccgcgaaaaagacgcacagtagattacgtgcgtctttttcatgcaaatgttaaaacaaattatctgctaactacatctttgccgaaccatttttcagaaatctgtgtcatggtgccgtcggctttcatttcatcaatgtatttttgcacttcattttttaatgcagtatttccttttttgaatccaactgcatactcttcttcagttaaaccgtcttccaaaactttaaagtctttattttgggaagtaattgcatagttagctaccacttcatccataaaaattgcatcaatgccttttgtttccaattccataaatgcagttacattatctttaaagccaatggtgttgccaatggtttttgaaaaatcagattcttctaaaattttctctgcggtagaaccgttttgtacaccaattgtttttcctgccaaagaagcttggtctgtatattcggaatcattcaaaacaaccaataccatacggtttgtcatataaggttctgaaagatccattgcttgttttctttcatcgtcgatggacaatccgttccacaagcagtccacagagcctgtgttaagctccatttcttttgtggaccattcaattggctgtaattttaattctacacccatacgatttgctacttctgttgcaacatcaatatcaaaacctacaatattgttgttttcatcacggaagcccattggtgggaaactgtcgtccaatcccagtaccaaagtacccttgtccaaaacgttttgcaaagaattatcttgtgctgttcctgagtctgctgtaccgctgtttgtgtctgacgatgaactgcaacctgcaaatacggcaagcatagcaaccatcatcatagcaaatactgccaatgatatttttttcatcatttttccccctattgatcaatcgttatcaattacgatactattgtaacgcattatcagagtaaagtaaaggataaattctatatcactgacaaattcttcgtttattgaaaattattctgttttgattcgtgaaatacaaacaaaatatataaaaaacaacgtggttaccaatggtaatcatataaaaaaaagtcaaactcgaaagattttccttgtactgtaaattgatgtttgataacttgctgccgcttcattcctttgtattcataaaaactataattacagctggtatccgtaaataaatagaagtcgtgaatttcttcttgtttcatataagaaagcactgcatcaaataattttcctccaataccaaggcctctgtattccgcatttactacgaagaaagcaacttccccttgatatgttttttcacactgtttgagcagtgcgtcatcaatctcgctgattgttttataaaattcagcagcatctcttccttcttgtgtagcacagaggtcttccatagattgtttttgacgaatacttaattgttccggacatttatgttctctgatatttttgcccataataatgccaaccggaacaccatccacaattgccacttgagtatacgtttgattggtcaaacataaatccagatatgcccttgcaagtttacatgccgtttcatgacttccaaatttatcgtaaccccatgtaattctgataatatctgccaatgcgtccgtatcctgcggtcgaaattctctgagtattacttgatgtttcaatgtaagcactcctttatgttttatactatttgaatattactgtaccctatccagttggtgtacagtcaagaacaatttgaaaaataaaaaacgtcccaaaaattgggacgttttttctatgttttatttttttcttctttgtgcggttttaatcgattactggattcgtagtctttgttaagctttatgacaaatccgcttaatgccaataatgcaattaagttcggaattaccataagaccattaaacatatcagtcaaggcccaaaccaaatctacttttaagaaagaacctacaactaaaaagccgcacacaatgaccgcataaattcttacgccaattttaccaaataaagcactgacattggaggcaccaaagaaataccaaccaatgatagtagaaaatgcgaagaaaaacatacagattgctataaatatattaccgaatgagccaaagaacgaagaaaatgcagcctgtgtcagattactgtcattcaaaactccggaataacccattggcaaaacatctgttaccaatactaccaaagcagttaaagttaaaatgataaaggtatcaataaaaacacccatcatagcaataaagccctggtcacaaggatgttttacttttgccagtgcatgagcgtgcggtgtagaacccataccggcttcattggagaacaaacctctggccacaccgaaacgcatcgctttttgaatggtaataccaatcacaccgcctgtaacagcttggggattgaaagcacctacaaaaatttgtccaaatgctcccggaatttttgtcacgtttgcaaaaataacaatcaaagcaccaacaatatacagcaatgccatgaatggaaccaatttctcggttacagaagcaatacgctttacgcctccaataaagataacaacggcaatcgctgctactgcaatacccattgtccaagcaggtatgttaaaagcagattcaaacgcatttccaattgcattggactgtaccatatttcccataaagcccaatgccaacacaattagaatggagaaaatagcagccaatacttttccgaatttgcctttaaaggctgccataatgtagtaacgaggaccgcctaccacaactccatcttttgtggacttaaacttctgagccagagttgcttctacataaatcgttgccatgcccaaaaaggcacttacccacatccagaagattgctcccggaccgcctgcaatcaatgcgcctgcagcaccaaccaggttacctgtaccaacttgagctgcaattgcagtagccaaagattggaaagaagtcattccgccggcatctgccttatctttgttctttttgaacagaccaccaaacgccattttaaaaccacgcccgaatttacgaacctgaataaactttaatcgaatggtaaaatacaatccggtaccgcaaagtaaaaataacaggccatagttccacaagtattcattaattacttttacaatgttcgtaaggatatccatttcatccctccacaactctatcaatcaaatacaatgttataaaaatatatccgtattagattaccatagaatcaatactaaatcaaattaaaaacgacagtttttgataagcttgttaaattttctacacattgcacgaaaaaaagagcatggatttttaacatcctgctctttttatgcacaaaaatagtagattttagtcttttaattgtttccattgctcttcattgaaaccaaccagtaccaaatcgccccgtactacaatgggacgttttaccaatttgccgtcagatgctaaaacagcatactgctcttcttccgtcatggaaggcaatttatcttttaaattaagagatttatataccaaaccactggtattaaagaattttttcagcggtaatccgctttttgcaacccattgctttaattcctccaccgttgggggttgctctacaatcggtctgtcttcatatgcaatactgtttgcttccaaccattttttcgctttcacacaagtactgcattttgcatattgcaaaaacaatgctttcatattctttcctccttatgattttaacttttctaaaacagacggtaattctgtaatattctgaatttgataatcggcacagtccaattctccgtcagagccatatccgtacagacagcctatgctgggcaaatgatggtgtttggccagttccatatcatgaaaacggtcaccaactacaatatatttgccggggtgttcttttttaatatattcgaatacctcatatttgggaataaaatgatagcgctcacaaggataaaatcccacaaacaggtcttgcaatccaaaatactccttatgtgcctccatatagctaatgctacagttactgagcaaaataagaggataaccgtcttgctttaattgtttaactacatccattgcatggggataccatctggcttttccttcctgtaaaccaatatgcatatactttccaatcaatttactataagtatgctgctgttctgcatttaactgaggcataaatgcgttccacatatcagttgcactgtatcccaaccattgactgatttcttcatcccgaaacatacgcggctgagccaatccatcctgaaccaattggtcatatacctttaaaaacgctgttttatacacaatggcacaattgtgcaacgtaccgtcatagtcaaaaataataattggtttagccaatttgttttaacagatttgccatttcaattgcagtagcggcagcatcaaagcctttgttgcctgcctttgtgcctgcacgctcaatggcttgctcaatgctgtctgttgtaatcactccaaaaataacaggaacttcactgtccaaagaaacgtttgccacaccttttgaaacttctgcacaaacataatcaaaatgaggcgtagaacctctgataacagcaccaaggcaaatgactgcgtcgtattttccgctttttgccatcttctttgctgccaaaggcagttcatatgcacccggcacccaagcaaggtcaatgtcgctttcttttaccccatgacgctgcaagccatcttcagcaccgcttaccaattttgaaacgataaattcattaaaacgcgctgctgcaattcctatttttaagccttgggcaatcaaatttccttcaatataattcatgtgtatttcctccaattaaattttttcatttaacatcaaactttttttataaagataatctagctgataagatgaaatatcatttgtaataatcaaaattttgaaaattgacaagcgttcttttccattttgttactgttatcaggttgtcatcacataaaaaattactgtgaatttctgcatacaaaatggaaacagcacaatatttttaaagcatatggtccatcttatcttttttggtttgcagataaaaggcatcgtttgggtttgcctgcattttcagcgggacacgttctacaatttccaaaccgtaaccggacaagcctgctattttctttggattgttggtcatcaagcgaatctgtttgacgcccaaatcactcaaaatttgtgctcctatcccatagtcacgcatatctgcgggaaaaccaagcttttcattggcttccacggtatccaaaccttggtcttgtaatgcatatgctttgattttattgattaaaccaatgccgcgtccttcttggcgcatatatacgagaacacctctgccctctttggcaatctgtttcatagcagcgtcatactgttccccgcaatcacagcggcgggaacccaaagcatctcctgtcagacattcggaatgaacacgtgccaaaacaggttttccgtctgcaatatctcccatcaccaatgcaacatgatgttcccctgttactttgttctcataaccgtacatgataaaatcaccgtatctggtaggtaattttgcactggcttctctttctacggaacattctgttttacgacgatacgcaactaagtctgcaatggtaatgaacttaatctgatgtttttgcgcaaattcttgcagctcgggagtgcgcatcatatgaccatcatctgccataatctcacagcatagaccgcactctttcagacctgccaaacggcataaatccactgttgcctccgtatgaccggtgcgcaccaaaacgcctccctgctttgcctctaacggaaacatatgtcccggacggcggaaatcttccggttttgcatcgtcctccacacattttaaagcagtaacagaacgctcgtatgctgaaatgcctgttgttgtatctacatggtcaatggaaactgtaaacgcagtcgcgtgattgtccgtattttgttctaccatttgaggcagacctaatttttgtgtaaacgctttgctcattggcatacaaataaggccttttgcctgcgatgccataaagtttacattttctgtcgttgcaaactcggcagcgcaaatcaaatcgccttcattttctctgtcctcgtcatctgttaccaaaatgacttcaccgttacgcaaagcctgcaaagcttcttcaattgtattatattgaaacatatggtacatcctttctgataattgattataaaaatccatgctctgccaaataggaagaggtaatggcggttttggaggtttgttcctccgttgtctgttcaaagtgaagcagacgttctacatatttgcctagcatatcgcattccaaatttaccgtatcaccggctttttgcgtcagcaatgtcgtttcctcagctgtgtgcggaataatagatactcgaaaacaagtatcatctacatatgctacggtcagacttatgccgtcgatggtaatggaacctttttcaataatatattttaatacagtcggttctgctgtgacagtgacccaaactgcgttgtcttctctttccatacgggtaattgtacccgtgccgtctatatgaccgcttacaatatggcctcccaacctggtttgcaggctgagcgcccgttccaaattcacacggctgccctgagacaaagaacccagtttacttcgccgcatggtttctgccatcacatctgcctcaaagtaatctttgcccatgttggttacggttaaacacactccgctggtacaaatgctgtctcctatctttgtatcgttcaatactttgtcagcagcaatcacaaagtgagaagaacgtgttcctctgaccacttgtcttacggtgcctatttcttctacaatacctgtaaacacgaatcatttctctcctctctcagtttgcttctgtgggttggatttttgttttcggttgaatatatgcggatatcttaatgtcgtctccaatcgcgcttaccttcatctgtcccaactgataagcatcctgtaaatgctctactccaattccgcctaccggagtaggtgcaactgcgccgcctatcattttaggcgcgatgtacgtaacaacttcttgtacaatccctgctcttaatgccgcatcatttaaagtagcgccgccttccagcaaaatactgtcaactcccatagcaccgagttgattcattaaatcatttaaatccaccctattgtctttactgctacaatacagcacttttgagccaaaggtttctaatttacgtgcagccagcggacttgcctgattggttgttgccaaaattgtttgattattctcctggtctttcaaaacattggaggtaagtgcaatacgcaagcaactgtctaccacaatacgcacaggattttttccttgctccatacggcaggtaaggcgtgcattgtcatgaataatggtgttgatgccaaccataatccctgtgtatttgtggcgtaatcgatgtacgtctttacgagatgcttcccctgaaatccattgcgattctcccgtggcagttgcaattttcccgtccagcgtcatagctgttttcattacaacatatggttgtttggttgtaatatagtgacgaaacacacggttgatttcgttgcactctgcctctaacacaccgcttaccacttctattccggcttcttttaatttttgtattccctttcctgctaccagcggattgggatctaaactgccaacgacaaccttggcaagtttcttttctaccaataaatctgcacaaggaggcgttttcccataatgagaacatggctctaaagtaacatacatggttgcacctgccacatcttctttggcatcggcaatggcatttacttccgcatgcggtcctccataatgttcgtggtatccacttcctatgatgcgaccgtcttttacaatgacagctcctaccattggattgggcgccacatatccttctcccttttgtgcaagctgtaatgcctgtttcatatactgttcgtctcgattgccttccatatgcagcctcctaacaaaaaagccctgagtattgctactcagggctttgtggtttcggttattctgcaaataccaaaaacggcacttacatcgtatcatcttctaccatccagactatactgtcggctttggaatttcaccaaatcaacctttcggctcgtgggctgtaccaccggtagggactttcaccctgccctgaagatttctattttttcttattatactacaccttttattctattgcaataaataaatacaaattcagtatattttattttttcgtacaaacacaaatcatatagtccttttgataaagcatgtattctgttttccaatcggacgtatcatctttcggtttgtaatgaaatccaacacctaaatattttcctacactctcccgttttgtccacatacgataaaatgccgtttgatttttgccttccatgatataacgttcttgttctttctgtgtaaaaaagcgttttgcgatgaaatcaaagcgacatggtttcattttttgaatgtcaatgcctattggcatatcatcaacagcacagatgcaaatgttatctgaatgactgatattaaaatgtacctgttcatacccaatcacatatggttttccatgagaaccaataccaaaccggatttggtcgatgggtatattccattttgtatgaattgcatattttgcaagaagaatacctacaagactgatattcgccacttgcctcctcatagattgcaattgctctctcttgtgaccgtcagccaatggcaaccacgtttcaaaatccaaatccgccagtacatcagcattcggaactaaaaaaatatttctcccattggcattgttttgcttcataggcactccttgatttgatatttctcacagtttgtcacagcattaactgataatcgttaaaacattctcttaacagtcaaaatgaatattgaaagacaggtctttcaatattcattttgtgactgtcatggggtcattataacatatcccctatcatttatgcaatttcacagatagcaaaaaataaaatcaatttgggacatcatcttccaaactcttaggaaaatatcaataaattttacataatctttattgaaataccctaggattctgccctgaaataatgatataataaatataatgtctaatttgggaggcactgtatgaatgatacgctgatggtaatcggagaagcattaatcgattttatccctacagaacagggtatggcactaaaagatgtctgctcttttaccaagcactgcggaggagcccctatcaatattgcagctgccacagcaaagttgggggcacattccaaagtattaacacaagtaggcgctgatgcatttggagattttatcttagaaacactatccctatgccaagtggatattactgctgtaaaacgtaccaaacaatatccaacagcgttggcttttgtagctttggatgaaaaaggaaatcgcgatttcactttttatcgcgacccctgcgcagatttacatctcagtgctgaagatattactgccaccatgtttcaggattgcggtattcttcatttttgttctgtggatttggtggattctcctatgaaacaggcacatctcaaagcaattcagctggcaaaagaacaaggcgctatcattagctttgaccccaatgttcgtctgccattatggagcagtaaggaagactgtaagaacaccattttagaatttgcaccctacgcagatattctgaaaatatccgatgccgagctgttctttctcacaggacaaaaggattgcgaacaagttttcactgtatttccagatgccactattattttactaacctgtggtgaacagggaagttatctgatgacaaaagaacatcgtctctatgaaaagcctattcctgtgaaagcaatagacaccaccggtgcgggtgatgcgtttgccgccgcttttttgtatcaattgctgcgggacggtatctcacgagagcaattgcctcatttatcaaaagatattttgcaagtatatcttcgtttttccaatgcatatgcagctgattctaccacaaaatacggtgccgtacacgcaatggcaacaacacaagagtttcatgaatttctacagaacttccatatttctaatgttattatatcagattcctaaagtcaggaggaaatccattgattacatttaccggaaaaggagcctttggcggatatgccatgggacaaatattattttataatcggattcaaacaggcatcaaagcacatacggtggacgacccaatttcagaactggaacgtttttttgccgcgcaaaaaacagccattgagcaattgggtgaactttatgagaaagcattattggaagtgggacgttccagcgcaatgatttttcaaattcatcaaatgatgctggaagatgtggactacgtaggctctattaccaacatgatacaaaatcaagggcaaaatgcggaatatgccgtcagtgtgacagcagccaaatttgccaatatgtttgcaactatggacgacccctatatgcgtgaacgttccgcagatgtaaaggatatttcgcaaagactgattaatgtactgacacacaatcatgacggagtcatttcctttgaaaagcctgtcattattgccgctaatgatttggttcccagcgaaattatgcagctggacaaagataaggtactggcttttgttacatgccatggctctatcaattctcatactgccatccttgcgcgtattatgaatattcctgcagtagtaaatttaggtactgatttcaccaaagaatacgacggccgtgaagcaattgtagatggctataacggcaaattaattatcagccccaatcaagaagcaaccgcatactatacaaaaaaacagatgcaggaaaaagcgaaccgtgctttgctgagagaacagctgggcaaggataacgtaacacaagacggaagaaaaatacatattgttgcaaacattggcagtaccgcagatatccccgatgctctggaaaatgacgccggcggtatcgggctgttccgaagtgaatttctgtacttagaaagttctttttttccgtcagaacaagaacaatttgaagcatataagaccgttgcacaatccatggaaggcaaaaaagtggtcattcgtacaatggacatgggcgctgacaaacaagtggattatttcagactgccgaaagaggaaaatcctgctatgggttatcgtgcaattcgtatctgcctaacacagcttgacattttccgaacacaattaagggcgttatatcgtgcgtctgcttttggcaatattgctattatgttccccatgattacctctgttgaagaagtacagcaagtaaaaaaaatagcggctcaaattcgtgaggaactggactgtgagggcattgcatatgctcctcacgttgaacttggaattatgatagaaacacctgctgcagccattatcagcgacttactggcaaaagaagtggatttcttcagcattggaacaaatgacttaacccaatatacactggccattgaccgccaaaatgctatgttggaccagttttatcagccatatcataagtctgtactgcggcttatgaagttggtagccgataatgcacaccgtaatcacatttggtgcggtatttgcggtgatttgggctcagaccttgaaatgacacctctttttttggcaatgggcattgatgaaatttccgttcctcccagctctatactggctgtaagaaaaaaggtacgtgaaaccaatgtcagcatgattcaaaaccaactgtttgaaaagtggctttaacaatctattttgatattgaaaaaatgcctaaacaatcaaatcctttaaatttgaggtattgcatatatgaaaaagaatatacaattactgggtactacattcataacagtccttatactgcttgtgtccatgttgccgttaaccgcttgcagcagttcacagcaatacacttataaatctatggatatgaatgcgattttacaaaaagtaggaaccaaaacggtaaaaaataaaagcgtcgtttgttacaaaccttttatcaatgacaatggtattaccgtatacgtctttgaattagataacggtacaacacaagaggaatacacatcgtaccatttttatgaaaccaaagaagattatctaaaagcattggatattgccatgttcggcgatatcgaaatagatgatgaccttttcatgattaaaatgcagaacgaaaatcgctttaccatgaattatgacgaactcatcgaagcatatagccaagaaaacggatatacattgattcaataaaaaacaggctctttttgaaagagcctgttttttatcttattgttctatttcccgcagtgcaacacgaatttcaattgctctgcgatattccacttttgttacagtcacagtccactgtcctatttggaaagtgtctccttcttcaggcactttgccaagttcgtgcataacccatccattgacagtagatacttcatattcttcattgatttccaataactccagcattttgtccaaattggcattacatgaaatcaggaaagaaccatcgctttgctgtttaaaatcttcttgctcatcatcatgttcatcccaaatttctccaaccaattcttccaaaatatcttccaatgtcgcaataccaacagttccgccaaattcatccagcacaattgccatatgcgttttactgtgctgcaaaatgcggagtaattttgaaattttagttccctctgttaccacaatcggtggttttacaatatctgagattgttttattgccatttaacacataagcatgaaaatctttttcgtgtatgataccaataatatggtctatggtttctttataaacaggtaatctggagtaaccatgttctttaaacaactcagacactttttcaacgctgtcattttcctccacggcaatgacatccacgcgcggcattaagatatcttcaacatctaagtcattaaattcaattgcagaacgtatcagttctccttcatgtttatccaaaccgccgtcgctttcaacttcttccacaatggtaatcagttcttcttccgtaattccacctgacggatgcaaacggaatacctttttcagaagttttttccactgtttaaatatccagttaatcggccacaaaataataatgaaaaacttcaaaataggagccatagccatagaaatactttccgctttttctttggctatacttttgggtgaaatttctccaaataatagcaccaaaacagtcataacaatagtagcaatggtgacaccactatttcctattaaacgtgtaaataacactgtcgctaaagaggaggaaagaatattggcaatattgttaccaaccagaattgttgacaataattcgtcataattttcactcatctttaaagcacgcgcagcctttttgttgccattggaagcaagatttttcagtctgattttatttacactggaaaaagctgtctctgttgcggagaaaaaggcggataaacaaatgagaaataggattgcaatgattaatatgacgtctatcgtatccattaaaaaagaatcactccaaatttttttattactactatatcatatattatcccaacttacaactattaacaattgtttgacaaaataaatataggatatccatgataaaaataaattgatttttcttgtatagtatggtattataaacaaaaataataatcattattataaaggagattcatcatggatataaaagaacaagtgttgaaagtaatgaaagaagccggaaaacctgtcagtgcaggagaagtggaaaaactatcaggattagaccgaaaagacattgacaaagcttttcaagctctaaaaaaggaagaagcaatcgtttcccctgttcgctgtaagtgggaacctgccaataaagaataaatctatataaaagatagcagccattcactcccgactgctatctttttatatgttgttaaaaaatgatgaatcttgtaaaataaataaatgtattgtatttatgaggtgaatcatgagaaaatgaaagttactgggtactgcattaaaaataaacggtatttctaaagtatgaattagctttttaatctatttatctttaacaacgcttgctattatgtggattgaaccggaaattcataactattttgatgcattgtggtactgtttttccgttatttctactataggctttggagatattgttgttatctctatcgtagcaaaaattttaacgattttattatcattttattccattattgtatttgccattttaacagctacagtagtaaattatttttcggaactccaaaaagcaaaatataacgatagtgtactggaatttatgcataaattggaacatcttgatacgctttccaaagaggattaagagagcttttcaaaaaagtatctaagta

SEQ ID NO: 2225 - DNA, 22572 bp, Unknown
  16S sequences of unknown bacteria
gggtagtagccctgtccgtagtatccgccccagagagtgtatccgtctgttccgtactgttccttgcagttgcatatcgcgtcaagtccgtatttgtcggagatgtatcttacagtgtgcgagtcgaacagccacgaaccgaaaacgcgcgggtaatatccgaaaacttccttgaatttctcaaacagcacgtcgcatatcttttccctctgttccttcgtgtagccgaccgagaatccgcagtgcgcgtgccagtcccatggaaaacgtcctgtccattcaagtcctgccgcctttacctccggctctaccgtctcgtgccatacgcctatctcaaaccgcgtggggtcaagacctttcatcagctcgacaaactgcgggtcgatgagcgcgtcatactgcatgaggaacgttccgcagaggttgtgcttttcgatgagctttatctgctctttcacgggagttacgagatccataggtgcgcgcggttcgcaggctcttatgaagttgattatatttacgacttcatgttttaacatattgtcaccttttgattgtaaactttactgtttgattacataataacagcaatttcacaaaaagtaaagacttgtgattaaatatgtaattacatagcgggaaacatcaaaaagtgtatattttaattttctcctatcatattgtatttgcaccggacgttatgctataataaccttagataaaaaaactaacggaaagggcagaatatggctgaacttaaagaaaaaatcatcgtgaaacgcgcggatgaggcagagcttatcgaaaaagcgcacctcgccggcggaaaaatccgcgacatcatgaaaaactactatgaaaaaggctatgctgttttcggcgggatagatattcccacagacggagtatatgccgtaaagctcatccacgcggatggagaaggcacgttcttcatcgacaccgactgcggcacgacaaggtatgacagcggagacgaatacagaaaggtatttttccgcgcaggagagaacaaaatccgcattggcgcgctgagatttgtgccggagcttgagggaattgagatatactcctgcgaagaagaaaaatccgcagatgaagcaaaagaagataagaaaatatcatacagcaatacggagctggctctcgacaccgaaaagggaacatactgtatttctctcggcggcaaaagaatagtaaaatgtgcttactgctctgttgtgattaacggtaaagagataaaatccaccgactacaatactcacgaggcagcagcagacggcggacacatcactttcatccacacgggagaggtaactttaaagcaggacttctatctttccgaagcctctgtcagaacaaggctcaccgtcataggggagggcgttaaaacaaaccgtataacaccactgcgaaccgaagcagagaacggcgttttcaatacgggcagtgagagcgacgcttttctcatgatgccgtttgacaatgacggatgggttgaaccgaagctgtgtacactgaacagctctatgacaagctacgaatgcgcggctctgcttgataccgaaacggaagaaggcattgttataggctcgctggagcacgacagatggaaaacaggcatattcttccgaggagctgacaattccgtttgcgaatttgaggtgtacggaggtattgcggacataatgacgcgcgacaattcccctcacggattcaccagcggaaatgaagtttcgtctccgctcatctacataggagagggcaagaactggcgtgacgagcttgtgtcgttcggtaaggctaacgcagagattgttccgaagaagaagtgctttgacgaccacgttccgtttggatttaactcgtgggcagtcatggatacttcggttagctattccaaaataataggcgtttccgactacataaagaacaatttgcagaacatatggacaaaggacggcggaaacgtgtacgtcaacatggactccttctgggacgcgattgttatgaacgaccccactatgaaaggaacggacttacacgacgcgcttgtctcatttgtagagcactgccataagaacggacagagagcgggaatttactacactcccttcgcctgctggcacaatacggaagaggacatgaagcgcagtaagatatacgacacaggctacacctattatgacgccgtactccgctcgaccgacggcacaaggctttacggaaagctcgacggaggaacgccgcttgacccaactcaccccgcgacaagatacataatcaaaaaaatgttcaccgattttgtcgacatgggctttgaatatgtaaagctcgacttcatgggacacggcgcgctcgagggacagttctacgacaagagtatatcgacaggtcttgaagcgtacaactccggcatgaagtatattcttgacgttatcggagacaggatgttcataaatctctcgatagctccgctgttcccgtatcagtattcggacggcagaagaatcagctgtgacgcgtgggctaacatatgggatatcgagcacgttctgtcatacgcaaccttcggcttctttgaaaaggagatatacaattatcccgatcccgatcatcttgttgtatggggcaaggacggaaaagtacctctcgcggaagcaaggagccgtgtcacaacgggaatcatgacgggaacgagcttcctcacgggagacgacctctcgagtcccgcgggaaattacaacgaggcaagggaaaggtttaacacactgctcggcaatcctgacatagttgcggtagcaaagctcggcaagcctttcagaccgattgaagtaaagcccggcagagtatgctcggacgcgtatgtactcgagagcggggatgcaacctgcattgcgctgttcaacctgagcggtgagaagaggacggtatcggctgatgtgtcaagctatggcatatcggactgcaccggacgcgagctgtggagaaacactgcggtacaggctgagggcggcaaagtatcgtttgagcttgacccacacgacagcgcggttataaagctcggcagataaataagaggaaaacggcacggcttcggctatgctgttttttttttgcatatttcccctgaggtgtatattattggcacagcatgacatcattccgtttccatgaaaaaaataataaatcatgacccgtatagataaagtcgtgatttaagaaagatgcacaaaagatatgagctaaacttgtaataagtgacggaagctacaatcttgctgtgatataaaaatgccgccgatatgcgtggattaacagaaattggaaaaaacggtcgaaaaaattagaaaagatttccagaaaagtttgaatttacctgttaaaatcaggatgaatttgtgttataatggatgcatagccccaagacaacaatttccacgcaaagtgaggtaaataactgaaagggatgacaagaaaaatgaagaagaaactgatatgcgctgttttgtccgcactgatatctgcgtcagccgtgggaaacgtatcggcacagcaaaaatttctgacggagaactattcgggagagaaggaatatcgcctgctcattgacgggtacgactacgacggcgaggtgatattcgtctccggcacaacttatgttgctctgcgtgaattctcctgcatggctgacaacgcgataatcacatgggacgacgaggacgaatgcgcatatgtaaagaccgattctcttgagctgagtgccgaggacggtggggagtacattgacgcgaacggcagactcctgtggtgcgaggacggaatttttacttacgacgacaaaatgtatgtgccgctcagacagatatccgccgccttcggatttgacgtctactacgatgaggaaaagcacacgacatatctcacgcgtctctcgtccgcaatagtgccggaggaagagttctacgaccacgatgagctgtactggctgtcgaagctgatatacgcggagtcgggagcagagcctttcctcggtaagctggctgtcggaacagtcgtcatgaaccgcgttgactcggatgagttcccctcgaacatagtggacgttatattcgacaaagaaaacggagtccagttcacacccaccgcgaacggtgcgatagaaaaggaccccgatgaagactctgttgccgcggctaaaatctgccttgaggacgtaagactgtccgatgatatcctgtacttcctgaatgaagagctttcgtcgagcctttggatagtcgaaaactgcacatacgtcatgacgataggcagtcatgatttctacgcggattaaattacattgcgtctacgcgcttctttatctcttttacgtcgtgtatcattttgaaggtgtcgcgcatgagatttatctttgattcacggtggtttatgaccttgacaggatactcgcggatagtgtaaccgagcttttcggctatcatgagcgcttcaaagtcgaacgcccatccgtttactgtgcacagcgggaatattgccttcgccgcgtcgtgcctgaatattttaattccgctttgtgaatcgctgtgacggaatcccgcggctgtgcatagcagttttttgaatacctttgacgcgagctttcggatgaaggtgtagcctgcgtagccgtccttgtgtatcgcacgggatcctatcatgactgcgcatttgtcgtccttctccgatacttcaacggcggcgcggaacatctgcggtattatctccgttccgtaggcaaggtcgcagtcggtgaacataatgtagtctccctcggcggagagcataccgcgtctgacagcaccacccttgccttcgttttcgggagaggttatcactctgacaacgccgttcatcgggggatttgcgcgtacatattcgcgaacgcagtctccgcatccgtcagtagaaccgtcgtcggaaaaaacaatttcatattcataagaattagccagagagtcggcttcaagctccttcacaagggaggctgcgcagtcggctgctatggctttttcgttgtacatcggtataattacagaaagtttcatttcagtttaaaaatcgtataattcacgtcaacggtaacgtcaagctcgttttgtgaataaaggcgttttttgccctcctcggtagttttgtagtagaacggtgtcattgtaaatagattttttatgtcctcgctgttttcaagatgcgcggtatagcacagctcggttgttcctgcggagacaaagctgtcgtttccctcggggacctcaggcagagaatccgatatgtttacgctgtcgtagataaggcttcgcagctcgatgaggtggtttttgccggaggacagcacgaggagcatactgtcgggggatttttttagcactctgtaagcttcgtcccacggtatcggtgcgaacatactcaggcaaacgtcggcgcagtcgttcactatcggcagtgagaagatattcgccggaatgaacacaagagacgcgcgcgaggtcatgtcatacggatttttctctgacagtcctgcaacacgggattttttcattccgcattcggaagcgtattttgacgcgtcaaaaccaacggacagcatttttttgccacggcttataagctcgcttgttgttttcagtgtgtgccggccttctcccgcgcccatgtcgacaagcgtcacttcatcctgcgttgaggtgcagattatttcagccgagcgagtgtcgagcctgtcatagtatccgcgtgagaggaagtccgcccttgcctttaccatgtcgcgctcgtctcctgtgtgggaatttttcccttttcccggcggcagaagattcacatacccgctttttgagatgtcaaaggtatgtccgagagcgcatttcagcgagccgccgtcacaggacagttttccggggcacagcgggcaggcgagaatatcgagaatatttgtcattatgtttcctaaaaaatcaatctactattgttttcacaaggcgtgcgtggagagcgtatctttcggaatttatgatgttcgtgcaggtggagagggtcaggattctgtcgtttttcgtgaactcgacatctttttccttctgcgaattatcgcgcatttcctctgcaaacgagatgaagtcgtcggcggaggtgaatcccgtgcggaaatactggtagtcgtacttagccttataaatggagaacggctcgtagtagtaaattccgtccattgtgtagactacgatgtatgtgtcgttgaaataatcgtcctggaagaacttttcaacgtcatggaacattgtgccgcttgtgatattatgtccgtagattacggtgttatagttttttgtgatgctgcggttattgcggtagtcgacaaagatagagccgattggaagatagtcgccggtgtatgcgtggttgaggtagtaggagttgtcctcgccctgcacgagagggtagtttatgtttgtgccctcgaccgttatccatccgtataggtcggaatttttctgcgagagggaagagagcttcgcacgcaccatttcaagctcttcgttatactgcttttgctcggctacaccaatgtcggaagagtcggcgaggtttgctatggtgtcgctcatgcttgtcatggatgagttttcggtgtcctcggcgaggtatgagacttcaccgtcctcgggtctgaaggcgtcggctgcgttgactgtgaatccgccggagaagaattccgcctcgagctgcttatagatttcctcgcccttttgcttgtcgatgaggttttgcacgagcatgaagcagctgacgaggaacacgactgagaagaacgcgaacatacccttacgaatccactcaagtacggagctgctttttttcggcggagcttttgtcggggtgatgtcgtcctcggtgaggtcgttcagtgaatttatgaactctcccgagcggaagtcatcgtcggattcggaattatcgagcgaaaactcgtcatgcacgtcgtccgcgtcgggagatttatgtttaaagagattcagtttgctcattattttaccggaataaatataacatttcaataaaacattataactcaaaattcgcagtattcaataggaaacggcaataattctccgaatattaactgagtttttacaattgaaacggaaaaaatctccgtcggtgagaaaaatattccgcgaaaactatagacaagcgcgggtgttagtgatataattaagaagtaaagcgtcgattgtaatacggaagcatagctcagctggtcagagcgttcggttcacatccgagaggtcttgggttcgagccccaatgtttccataaaaatcgacgcttattttattatatgaaatcgaagaaaacacgcgctaaatcaagcaaaacggcataaaccgtactacagcagcaccaactaccgtataaatcgcataaaacgagcgtatatccgcatttctcaaaacagcatacaccacaggaaattatatcccgtgtgggctgaaatacatcgttttatagcgtaatgcaacatcaaatgcaacattgtatgcaacacaatatcggctgcacttacagggattttttgagtgagtattatttttccgaatattagaaaaaagaactattttatcaaggagtagaactgatgaacttaaaagacgaaatttatagtgtgacttatcttaatccataccatataataaaaaacaaggatgaaaccatagaatattctttagacgagataaacagtggtacatataactattctattctgtgcaggatagtcggaacgataaaatccacataccaaggtgtggagatagagtatgtgctttgtggggatggagcgatagcaattagtaggaagaatgctgtttttacctctaacgatttattattgatatataatgactttctttgtaagttaatgattggtggaatatatgtggaagcagtaaataataaagatataaccagtggcaaattgtatcgcgaaaaagcaatctggccagtcaactttggagaaagtgcttcatctaaaatgcatgcccgaatacggatgtatttagccaataatatagaaacaatatgtttaatcggagcagctgagaacgctatcaatattgaagagatatcaagtatatttaacaaaggcaacgaaattatagggcaaataaagaatttgagtacctattatttgatttttggcgttacggaaatgatgcacatgaactggtctgcggcgttgtctaatctttggatcgttacagaacaactaatcgactatctttggattaattttttcttaaacaataaagaaagagacccccagattccttcaagaataaagtcacttcaacaagacaatagaacatatagtacatctgtaaaacaggagatattatatcaaacagaagtgatttcgagagaaatatattcatccctgtattcggtgcgaaggtcgaggaataaattagttcatgaaggtataatggttagtaaggaagacgctatggaattatacgatgcaacaaatcgtctgttacaaattgcgacattacaaaagaacactgaaatattacctaaattgttatatcatagaccatagaaatttgcttacagaaaaagagcctccccgaggttcttttttactttcataacacaaaattaataaacatagatattgacaacgtaaacataattatttataatgagtcatgaaaggagtggttttaatatgcagatagatgaacagataaaaatgctttgtgtaaaatcaaatatttcgcttgctgaaatggcgagaagacttaataaaactcctcaggctttcaaccaaaaaattaaaagaggaaaatttacattggaagaactgagtgatatagcacttatctccggatgtgatttgaaatgttcgtttgtatatccgaatggcgaaaaaatcaaaattgaataaataggtggtaatttatgattgaatatattgaaggggatatacttgacagccccgctcaagtaatagtaaatacagtgaataccgttggtgttatgggaaaagggttagctcttgaattcaaaaaaagataccctaaaatgtttgataaatataaaattgcctgtgaaaaacaccagtttgcaataggaaagttgatgttattctacgaagcggaccattggcttcttctgtttcctacgaaagaaagctggagaaatccctcaagacttgagtatattgaaagcgggctgaacaagtttgtgcaaaaatatgccgagaaaaacattacttctatagcttttccgcggcttggttgtggtaacggtgaattgaaatggtcagatgttaaacctttgatggaaaaatatcttaaagacctgccaatagacgtatatatatatattggtaaaaatccggatattacaccggagcataaggaagcagataaaactattgaatggctaaaagcaaatgcgaaagatatgtcattcaacggtgtaaaagacgatttgacttatataagcgcaatgtgtccgtattcatttgaagttaaaaacataaaatataagatgacatattcggatgctaagctgcagatttccacaatagatgataaattagattggacagttgacgaagatcaattatatcaaatttgggatgatatcagagaaaagtgtgtattttccgaaaaagaagcagatgaaaagagaatccttgtatatggattactttgtgctacgggatatttgtcaaaaatcaaattatatgattctaaaaccgaagaaatgattgacggttatcaaatcaatgcggctttaggacgagttattgcattcaaggggtgacatcgtggaatatagagatataattcaagataactgcaagaatcacagtccggtatcatggtggcctcgattcgcttttcattacactgatgttactaacgctgtgagtattctaagctcagggtatctttatagtcgtgcagaagctactaaaaatgatgtaatgaaaaatgataatgccagctcccaggttattggtataactcgatctgaagttatatcaaaagtaagactatattatagaccattaattccgactcaatactatacagaaggatacaaacaccagtctttgcgttacaaagatgatttaaatgcaaatgtaccggttccgatatttttactgtttgatttggaaaaagtactgcggcttccgggggtgcaattttcccaagaaactcaagcaaaaaaagagtctgtttttttaagcggcatagaagagttttcaaaattggattttgacaaaatttacgataatgattatagcacgatacaggaaacaaaaccatatcggcaggcagagataaaccatactaatgctatggaaatctcttcttgtataagttgtattctatgccgtaataatcttgatcgaatgacaatattaaatctcttgcgtgatgaaaattatgttgcgtttgccagatataaggatattataaaaacttttaataataatattttctttaacaatggcatttttatctcggattgttcgtattatgaaaatactatatctattttatttgcggattcatattacacaaaaaaatatatagaacgaaaagcagaagttgacgaattggaaccgattaatgcaagagtttcattgacatggaacaaaggcagaagtgttatttatgaagaatatatagattttaaggtttatcttccagagtatttaggaaaagtattttcaataaagaatctgccttcgtttccgcaggcacaaaacattggtatcaaagtatatttagacggtaaactgatatgttactcagttcagccgtcaaaatcttcagaagtcttgctataactccccatcaaaaaaagaaccccacccccgaggttcttttttctttatcctctttacctcattcgctcattcaccgcaagctgaaccgccgcatagtcataccccgcctcggtaagccgcttcttccgctcctccccattgccccacttgcccgcgataacttccgccgcaacctcgcctacactcttcttgccgcccgcaaagtcacggtagaattcgctcatgtcaacgtttcccatgcaccccggaacagcagccgtccatgtgtattgccatgcgtcgtgtaaccctattctcggtttaccggcgagacgtgcgcaccatatcgtgtaccccgcgtcccgtatagcacccccgtcaatctcatccgtgaaccagttttccgcacagtataatccgcccgtgtaccccgctttttcgatagctttcagaaatgccagcgcgtttgccgtcctctgcgccttgcttatcctgtcccctcgcccgtttgcgttcctctcgcagtattcggagtcgagataaacaggatagcttatcttgtacggcttcaggagcttcacgagatatgcggcttcttcctcggcttccctctcgtttagagcttgcgagagccagtatacccccacaggaatgttctgtgcgttcgccgccgaagcgtttgccttgaattttgcgtcagtcgcgagagtgccggcaggaccgtatccgcgatatcccgcacggagaatcaccgcatcgaccatgccgtacagcttgttccagattatgttcccgttgtgagcggagacgtcaattactttcagtgccatcttcttccgcgtctccttcctttaattcggtcatttttccggtgtcagtgtcaagatgcaaattctccacctgcaccgcggaatctgccgaagccttgtcaatacccgcctccgccaaaatgtaaacaatagcggaaacgaccgacataacgctgccggctacggtttttacagtctccccgtcccctccgaaagcgacgacaagaccgacgactattcccgcgacagctgcccagagcttgcggcttgtgagttttgatttgatgtccatagttgtcctcctaatcttttaaaacagtttctgcaataagcgcggcggattcaatgccgtacttgtctgcaatttcgctgatgaaccgttgagcgtatttcgcgcggttctcgttttttgccttccagacgtaaaatccgttcagcgcggtcacttctgcccatgcgagcggtgcaataactccaacaccctcggcagaaatcccgaaaacagggaagagtgcggcgagagcggagaaaataagagtcacagcccagctgagcattagcagaatttttgtagtctcgtttttcatgcgagagagtgcgcgtccccgcctttttcaatgtcctcaagacggcggtttacacctttgattttctcgtccgtcaacgccgccttttcttcaaggtggtacgtcctttcgacgagattgttgtgcttgtcgactttcttttcaagctccgcgagacggtaggcgttcagtgcgtcgtgcttctcaagctccgctatgtacttcttgtgctgcgcggatgagttgataacggacacaatgagagacgccgccgccgcgattattgccgatattattgtggtcatgtgggtctccttatttgattgtgatttctcgtattacaggtttactttgttttgaggagtttcctgttttacacgcccgaacggtaagcgtaataatttctccttttgacattgtgttcggagctttgatcatgcaagaatatgaataagtatcagcgacgccaaggtcaacaagttcagcattatcagctgttatctcatattcaccgcccaaacattcaacaataagcttatcagcatctaaagatgtcaatgctccgattccgaatctcttaccggctttaactgattcagaagataaattaacagtaaacaactttggcacaaagtattcatcttcatcttgtataaccataagtttacgtcgtctcatcatgtgccgtcaccgactttctgcgcaataacaacgccgtcttttatcgacatttcccatatttcacctattaaatatttaggctttttaccaataaattttgtactttctggaaaaacgattttcattgcagaatcattatcaatttctgtaatatataatctaagccaacactcaaaatcccccgcgggataaattaaagtgagagcggcaacattagtcagtttgtattcagtagcgtcggcaagctcaatctgatcggtgaatgaacattcgcgtgtgactttttttatgccgcgtactgatattgttccgtcctcgtccacttcaagcccatcgccgacttccctaaacggtcgattccgcacaaaatccgccgcagtctcgtcattctgtccccagtccgcttgcacaccacgctttaccttgtcaaactcggcgtgaagcctctctatctcactcggagcagtcggaaacggtcctccctcaaagcttccggttgcgcggactacaagtaaagcctcttccgtcgtgatacgctgtgttagctcgccgccctcgtacctctccccgtgaagccataccttccatgtccctgcgccgagattcagcttgtctccctctctgatttcgtcgtcagtgagcggtacggaataattattctctccgcatgagaagtgagcgaatttgacagccccgtcccagtcggaagtgaaaacaaacctcgccgtgagatagcttatcgtgtccgcggctatagtcggagaagaaatgcgaagcgcctgcccctttacggttcccgttatcattccctgtcacccccgaaagatataatgccgtcgagcgaaatatactccgcatacgatagctttatcccgtccccgggcagagaaagcgtcggtacgtcgtcaatgtcaatgtcaagcagtgctttcatttcctcctcaagtgcggatacgcattccggcttcggtgttgtctttccaccctcatcggagcagtattttgatataatatcccccttcttttcgtcgtaaaaattcaggtgcggcgtcgccttttcgataagcatgtgcagcgcgtgaagatctccgacagccatgtcctgccccgacagctttctcagagccggaacagcgtcgaccagtgatttcattttcatgtattgtccctccttatgcaataagtccgtattttttcagtgccgtaatcagtgtcgcgacagttgcggtgcttgatacagtctgccgtgccacgggagttgtgccgaagaatccgagagtagaggtagttgcagtgccgagctgaaccttcgtctgtatagataactccttgccgtagattttgtttactctctttgtgtccgacccgatgttgaaccggtcgagcgtagtggaagatggtataagcccgcttgcgtccatcgtccataaaagcgaagcggagtcgccaatataaagcgtcttccacggattcgcagttctgccgagagcatatgagccgaatgcgtaaaaagccttgcccgatgtgtcgacagtaacacagcttgatgagttcacaccgagttctattccgcttgacgtagcagtgccgcagtatattttaatagaggtgaatgccccctgtccgccgaaagtgatagtgctgcctgtcgcggaaagaatttttaaagtgcttgtgccgcttttcgcgtaaagctcatatacctttaagttagatacatcaatcctgtccgccgaaattgtgcccgtcttgattctcccgccgtctatggaagtagtgccggatgagccgaggtctgacgcacgcaggaatgtcgtaaatcccgtgaagtctatcttgtccgccttcagcttaatcgaagaagagttcgcgttcgatacaagctgcaggagcgcgtatacattcgtgcctatcgtgttttgcgagtaggaagaggacaaagtgatggaagcctccacatccgataccgactgctctattgaagtcagtgccgatacctttgcatagtcccccatgtcagattttgtctgatacgtgccggagcaggcggaaactatcttcgcttttcccgcagcagagtcaatgtactgcgcaacggtggtgttcagctccgttgactttacatagtcgctcatccccgccttcgtctgatacgtgccggagcaggcggaaactattttagcttttcccgtagtcgtgtcaatgtactgctcaatcgaggacgtgagagttgtcgtcgtcacatatcccgccatgtctgactttttctgatatgtgccggagcaggcggaaataatcttagccacccccgcggaagagtcaatgtaagagcctatctccgtccgaagctccgtcttatccacaaagtttccaagctcgtcaacagttgcatacgtccccgagagcacgtttataatcttagccgtaccctcgtgagtgtcaatgtatgcacctatctccgcggaaagctccgtcttcttcgtgtatcccgttaaatcatctacagtcgcgtatgagccggagagcgagagtatgattgaagccttgccctcttcgctgtttatgtacgtgtcaatcgacgccgtcagatccgacttttttgccgtgtccgcgagagcttcctccgtgtccttgcgtaagtcgtcaacttttccgcgtacatcacctatcgagtccgtaatttcaggaacatagtcccctgcagtcacacgcataaagtcggcattgtacggctcgtatgacagctcgattatcctcctgcgctcacttatgccgagagccggacaaagtaccctcacctcgtccccgattccgtagtcgcctacagacagcgtcagctcgtatgatacattgtccccgtcccgcgtttccgtgagatcagcgtagcgcgatatgtcgtatgacagagtccttccgcggtgtgatactaaattcaccttgtgcagagcaaattcggcttcataccccagcttctccgtcagtatgctgagcagccggcggcggtttgtactcgtctcgtctatctcaacacttgtcacgggagcagtacccgcagtcagagcagtaccggagagaatttcaccgagagcaccggacgcagaaccggagtaagagaaagcctcaaccttgtcgtcagataaagccatcgactcgtgctcgcaggtgtatgagcaaacacaaagccctcccgaaagtgaacgcttcacaccggatatgcggaaataaagcgagccgaggagtataagcccgtcctctgatatccccacacagtcggatgaaagaagcgaaaactcaagagaacactcccccgcgagagaatcacggaaagtgcaggaaataacgctgtcaatgtcccgtatgtatacgcccgatgaagagtaaattttcagcttgtccatgttatcctccccttgcacgtgagcttaacctgtcgtcgcgccattgtatgcgagataccgtccgtgacagcacattgccgtcaagctgtaatatgataggcacgtccgcacggaatacgttctccctctcgccggatgaagaaacagacggaagcgaaaccctctcgccagatacagcggaagccttcgatattcccgataaagcatcccgtgccatccccgcgagtattccgcccgatagctcgtcagacgcagtttttaccgccgcatacctgtcctttaagccgagtataagaccctctccccagttttcaccgagttcacgagccttgcgcgacggagagtgaatgtcaagcgtctccttgccttcttcctcaaggacactgtggagattgtgcgatacctgcttcagctgctttgtgcttctttcagccccgtcaacaagtccctgtccgtaggatgaaccgacctccgcaccgctcttgtacgccctctccgcctcagccttcgtgtcgttcagcaccgccgccagattttttaactcatcccgcagttcaagcagctttttctttgtctcctcgctgattccggatatagcgctttcaaaatccttgtccgtcatctgccatgagtttatcgaaagcccctcgacctcggcaagctccccgtaaacagaacgtaaatcactcagctccgagttcagatccgcaagcttcgacgtgtagtattcgacggtttccgtgttgtagagctgctttatcgactcaagctcccgctccgcttcttcctcggttatcttgttttctttgagttggtcacgaagctcactgaccctacgcatagccgcgtccacttcgtttgagtaatcgtttaccgacttcacgttgggattgaaatttgccatgagattataaagcattccgcgtgagtttgcaccttcgagagcattctgtgcttctctgagagcgtcctccgcgtccttcagctcgttttcaagcagtccgctgtttatctcaagatcaagcttctttccggacagctcgctcatgtagtcccgtatacgctccagcttgtccatctctcccgccgcttcggcaaactcgtaaatagcgtcgcgcgagagattgatagagccggtaacactgtcccacgttagcccaagaccgggaagataagagtttagcctgtccacacagtcctttataatagcctcgtccgccggagttttctgcatcttgtcggatagctcgaataacttatcgacgagcttgcctaccttgtcctgcataatctccgcgtcgtctccggcatcacgataagcgtcacgagcggaagaaatcgactcaataattctgtcgctggaagagataagattctgcgtctcctccggcagcttcgtcacgttctcgtgataggtgtaagccgccgcaatcagccccgcgaaaatgcccgtccccgtaacagcagaggcagcaccgtctccgatgagctttatgccggacgcaatagccttgatcactcccgcagcagacgccgcacctgcaatagtgccaagcccgcttccgattcccgcaagagacgaggacagcgcgggagagtcttcagctgcgtccgtcacactgcctgcaagagaagtaagcacgtcaagcgcaggagacagcgtggtgataaagtcgtctcctatagcctgctttagctgctcagtgttgtttttcagcagctgctctttcgacgcagtggtggaatacgcacgggaagcctcttcgttgagcgcagtgttcgagtcccacgcttcctcagccgcattcagagcacgggagagtatgttgttcgaggacgcgagagacagagtggcgttagacatacgcacctcttttatcccgaggtcttcaagtatctgtatagcccctccgtcgttttcgtcgacctgcccgagcgcgtttataaaatcgttcagagcttcaagcggcgctgctttccatgcattaacaaactgatccgccgtctttccggtaagctcacccatgttttcgagcatcgtgtagccgtcaacaatgtcgtggagctgtttggtcgagtacccgagaggatttgcaacagccttgaattccgcaccgccttcgagagctaacttcttcagctcctcgatggtgagtccgctttcttcaagaatgttcggtatcttaggatatcccgccacaccgacagctacatttttgagcagcttcgagaacgcagaaccgcccgcctccgcttcaatgccgacagaggaaagagcggtcgcaatagctaaaatctgcgcttcgctgagtcccagaacagcaccggtcgaagccagacgggtagccatctcaacaatgtcgcgctccgtcgtagcaaagttgtttccgaggtctactatggttgaaccgagccgtccgtagtcgtccgacgacattttcgtgatgttcgcaaacttagcgagagcggacgcaccttcgacggaagataggttcgtagcggtgccgagctttatcatgacttccgtgaaggctaaaatgttctccgccgaaataccgagctgacccgcactctccgccactcccgctatttccgtggtgctgacgggaatctcacgcgcaaggtcctttatgccggctttaatgtcttcaaactgctcctcagtgccgtctaccgtcttgtaaactcccgtgaacgccgtctcaaattcggttgaagcgtcaagacaggactttatctcactgctaatccccgaaaatatcttctcaagtccgagagtcgccgccattgcagcaatggtttcgagagaagtgttcgtcttctccgccatcttttcggcgtcctctcccgcgccttccgctccgtctccgaattcgtcagccttttttcgggcttcgtccagggaaacggaggtgtcgtcaagagcgcgcttagtgtcaagcagatccgatttcgcattgttaagctgcgtctgccagttgtccgagaacatacggaatttttcttccgactccgtgttgcccttcagattccgctcaagcgtctccttctgcttcagcagctcttccatctccccgagagagtccgcccccgagtcctttatcgagtttatcttgtccgagagagaggcgagctgacttgtgagatcttctccgcggctgacaaatccggcaagagcgtcctccgagtatttcagcgcactttctatctcttcgactttcttctgctgcgtctcgtaagtccgcttcagtatgtcgtatttctgcccgagagcttcaagagactcgtcgttccccgcaaaagccttttccgtcagcttcatctcactgcgcatggtcttgagcgagcggtttatgtcgctgattttcttcttgtattcgttttctcccttgaccgtgaatacagtggtgatgtttctcgacgccattattctccccctcctctccgtccgaggtaaatctcaaatatcatgcctaccctctcgtgtaaagcgtcgcgccatgataccccgcacctcgtgcagagcgacagaaattcctcacgcgtcatgggcttttcgcggattgagtttttttttcatattccgcaagccccgcgtcaatgggaccgtcttctttcgtgcgctctatcttcagccccgagtatatcgcttcgagcaccgcgttctttatcccgattatgtcgccgggtaaaatagtccgcctaagctccccctccgttacgatgtcctccgcgtcatatcccatgtaacgcctggcaagctccccctcgcgctgaagaattataaaacagccgagagcggtctcatatgactcacgccccgcggagacgagcttgtccatgaagtcctcacccatagcctcgtttatgtcaaaataagcgtcagccgtgtagagaagcctgtattcccgcccgtttagagtgtatgtgcttccgtacttcatgccgtcacgccgagcttcttcttgacccacgcttcagcctcggaagatgtcgcaaacatttcggtcttcttccatgtcttggcggagtcggagcatatgtacgcgagcattgttacggagtcgccggagagcgtgatgccgtccccctttgtctcgtatgtgctgtttccgagagacgccttcaccttcggatagaatacaccctcgtagaatacctcacccttgtcaatgagagtgcggtagaagccgaagcctatgaacggaggtgtgtcgtccccgccgtatgtcatctccccgctctccgcgtcaagcgttactccgaaaatgtcggcggaaacggagttcggcacacccttgttgtcgtacgtcagctcgcagtattttacgcttgatacgttctcgctcatggcgtcgttggagtagtattgagtctccgccttgtttaagttctccgtgaccttgacaaattccgaaaaatccgacggagtgccgtatgtgggaagagagccggcggtctctgcggtgattttcgcgtagtagggctttgtcgcacccatctgtgtctttctgacctgattcatttttgtgatagcttcacttgctgccatcttgttttctccttgtctttttctaaatgtttttctcctgccatgagcggaatattacctccgcattgtcaaaggcagatttttccccgcggtctatgctgtcaaagataaaaggtcgcggcggattgttcctcgtgccgtattcgttcagaaaagcaacctccgcgtttcttatctcttttcggcgtaccgctttgccgttcttgataaattcccgacgtgtcccgcgccataccaaaacgagctgacgcgacttgtccttaccgtatcccggcggctttcgagcgagagacttttcactaagccccgtcgaataaggacccgagagcatcttcttcgcgttctcacggataaacggctctattacgtcggcttcggcggtgagcagctcgtcaataagtcctacaggtaaatcgtccctgaaataatcattgccgccggaggtaacagccgatattcttgccatttatacctccgttacccttcctaaaaattcgctttcgtaaacatattgcccccatccgtccgatacggaagatattacgtcagggtatgtccctccgagctttactaacgctttgcatatttcctcccgctcatctttaacagtacagccgtgccgcgcccagagagtgagagtcagccgcactgtaatgagcgtgggagcgtcgttcgagtacttcattccgagatcaagcacggcgacacggaaagcgttttccccgctgtatttgctctcgaattcgtcacggagcatgtcccgcttgtcgctgtcaagttcgccgtccacctcaactataccggagagccgcgcaccgtttgagtaaaagcggttcccgtatttcatagccttaatgtccgtgtcaagagtttcccgcccgatatcgagtatgccgcgcccgagtgaaccgtcgtatgtctcaaagcggtagatgaataactgcgattcctcaaagctgcgtgatatcttccgcgagaaaacattgtcctccggcagggtgaaacgataccacttcacgccgcgcaccggatcgacataaatctccggctcaataggcagtggaataagtcccgaaattctgccgtcctctgaactcagttcgctggttcggcggtcaatgtaggcgtaccccgttccgtgccaaaaagcataggaataaatggctttctcgcatatatacggcgtcatgtattcgtttgcgcggtatttcagtattcccgaaatgtcgtgttccgcctccgtgcgattttctccgacctttcgacgtatctgccacggtaaagccgccagagaatttgtgaaaatacggtgagccgccgcaacagcaccgagcttttccgcactttcgggagaagacgccgccccgcctactccgaggtccgtaaaaatcctctgccatgacgacgcggatgagttaaaaacgcgcgatagtatcatttgccgccgtatcttgcgataatatacgagctgacaaggaacgccgcgcctaaaataacaagtccgagcggtacgcttatgagaaatcctgccgcagtgaccgaaatcgccccgagaatatagagaatgtcgtctgtataacgcaaaataatgcctcctttctttgtttaggaagcctctgattttcggttatttttgcgacaaaagcccctatatttt

SEQ ID NO: 2226 - DNA, 25789 bp, Unknown
  16S sequences of unknown bacteria
aaattatactggtagcaagagatacaacagatgttttactggtaatatatagaaagcaaaaaactgcaccgctacagaggatactattatgatgtagaaacagattgtattacttaaaaaccaggtattatgacccgattacctgccgatttatcaatgcggatggtttaattggtgccaataagggcatatatgaaatatatcaatatacggtgattgtataactgttatcacatatattttgtggtaatcaacgtaacttgtcaacaaaatatctttttgaacatacaaaaccattaaatttgtaaatattttgcgaaattttaacacaacatttttcttgaatcacaagttgtggtatacttgaataaagagtatgaaatgtaatgtgataagtgaggaatcaaaatgcaagaaccggagctttctgtaattattcctgtgatgaacattgaaaatagaatttgtgatgtgcttaatacattaaaagaggacacgaaaggtttttcagtggaatttttaattattgacagaggctcgaaggacaaaacaatgcaaatggcattgcgttttttacggcagaatcaattaaatggttatgtcatgcaggaaagcggtggaaatatcagccaaacattaaatgcgggtattcaatatgccaatggtacttacattacctttgtgtttcctcagcgtatataccagtcatatttggaagaatttctaaaaaaggcaaaggaaacaaatgcagagtttttgtttggatgtaaacgccaggaacaattaaaatttgcagatttgcgcagtaccagttcggttattaagcaattaacaggcgtagattatatagaatgtatgattacccacagtatcatacctgatgctggtgcagtcgtgatatccaaccggtttttgcaaaatcataaaatctggtttaacgaaaatagtatataccgttatggtgaagattttgtgtataaatgtttccttgcagccaatcatttggcacaagtagctgttgttatgcaggtagatgatgaaaaatctgttttgctgaatcagaaccatacatctcaggatatttttgcgccctttgaagaagtggaatgtttattacgcacacttgtatttttacaaaaacaatataatcatcatgaaaaaatgataaaattatttatacagcaaaaagttccggaaaccattatgcaaattgtagaagggctgctaaagcaaaaggtgaaatctcgtgctatacgttcttatatgcataaaaaaggatatgaccgtttgctaatcataggaccgtatacaccgcacaccttaaaggtaaagattacaacttggcgctattttcctaaattttaccgttttgtgtaataagtgttataaaaacaggcgtctgaccgcctgtttttgttttatttttcaatgattggatttataaaatatcttgaagaaaaacgctagatctggtattattataagataaatatcacgatatggaggtgtatatgtttggttccgcagaagcagaacaataatgagatttttttacaagacagggcgcattgtatgaatgcagttgcacaaattatggaaatgcgcgccacaggtgctgtaccgcttgcatatgtccaaacatacggttgccagcaaaatgtggcagacggtgagaaaatcaaaggtcaactggcagaaatgggatttgcttttacagaaaatcccgatgaagctgactttattttatataacacatgtgccgttcgtgaaaatgctgaatccaaagtatttggtaaagttggtgaattaaaacataagaagaaacgaaaaccttctttggttacagctttatgcggctgtatggcagaacaagaccatgttgtagagcgtattaaaaaaagctatccgtatttggatcttgtgtttggcactcacgtcattcattacttgccgcagctattatatgcacttttgaccaacggaaaacgaatctttgaaaatggacacgaaaatgaagacaaacaaatcgtagaaggattgccggtagagcgtgacagcacacaagtgggtgcttggcttacgattatgtatggctgtaataacttctgtacctactgtattgttccatatgttcgcggccgagaacgcagccgtgaaccgcaggcaattgagcaggaattccgtcaattggtgcaggcaggatataaagaaattatgctgcttggacaaaatgtaaattcttatggtaagacgttagaaaatccgattaccttttctgaattgttacgcaggcttgaccgcattgaaggggattaccgcatacggtttatgagtccgcacccaaaagatgcaactcccgaattgtttgaaactatggcaaacagtaagcatattgcacatagtttacatcttcctttacaggcggggaataacagagtgctcaaggctatgaatcgtaactacaccagagagcaatttttaaaattggtagaacaggctcgtgctgctatgccggatattacttttacaactgatttaattgtaggatttccgggtgaaacatatgaagagtttttagataccgtagatatgctggaaaaagtaaagttcaattccttatatacttttatttattcaccgcgtgtcggaaccagagctgcctctatgccggatgaaatatctgctgaggaaaaatcgtgctggtttcaggagctttggaaaaagcaagaagaagttgtcgctcaaaccagtcctgccatgattggaacgactcagagagtgctggtacagggctataacgaaaaacaaaccatgctttggggtaaaacagaaggaaatatgaactgtgaatttgaaggcgacgacagtttaataggcacttttgtggatgtaaaaataacagagtcgcccaattttgtgctaaaaggcacactgataacagaataattataattaacaatattggaggattttcagatggatgttattgaactggcaagagaattaggaaaagcaattcaacaggacgaacgttttttggcaatgcaaattgcacgtcaaaacagcgacaatgatgatgaactgcaacaattgattggtgaatttaacttaaaaagaatggccattaacaatgaagctgcaaaagaaaacagagatgaagcaaaattgcagcaattaaacagcgaactgcgtgaaacctatgcaaaagtgatgcaaaataaaaatatgaatgcttacaatgaagcaaaagagctgatggacaatatgttaaaacgtatcaatgcaatcatcagtatttccgcagaaggcggagaccctgaaattgcagacttaacagaagatacctgcggcggctcatgctccagttgtgcaggctgtcactaatgagatatattgcattctataagaaaaagatgaggtagaaaaatggctgatttatcacctatgatgaaacaatattttcaaataaaagagcagaatcccgacaccctgttgttttttcgcttgggtgatttctatgagctgttttttgacgacgcaaaattggtgtcggcagaactggaacttaccctaaccggccgtgattgcggacaagcagagcgcgcgcctatgtgcggtgttccatatcacagtgcggaatcttatattgcacggcttgttgcaaaaggctataaagttgcaatttgtgaacagttggagacaccggctcaggccaaagggctggtaaaacgcgatattgttcgtgtgattactccgggtactgttatggaaagcagtatgctggatgaagcaaaaaacaactttatctgcacggtttgtgtcgaaaaaaatgaagcgggaatttgctttgcagatatttctacaggcgaactgcatgcgacaaccttaaagggaaattctttggctgacttggagcttcagctaaaaaatgagttgatgcgtttttctccaagagagattttaatcaattcacagaccttggaactgaaaaatcttcccaaatttttaagagaaaagctttccacattactggaatgtttggaagacagcaagtttacttatgatacatgtgaggctgctgtacgacatcagttcaatggagatacaacacaagcgctgcatgtagatgataaacctttggtcataaaatgtattggcgctttgctggattatttaaagcgcacccagcgtaacggcatggaacgaatgaatcgcattatgttatacaccaatgcgcagtatatgcatttggacatgaatgcaaggcgcaatttggaattgacagaaaccatgcgcaataaagagaagagaggttctttgctttgggtgttggataaaaccaaaacgcctatgggaaaacgtttaatacgcacatggctggaacgtcctcttgtcaatccggttcaaattaaaaaacgtcaatttgcagtggatgaactgatgagaaatatccctttaagcgacggtatcacagaacagctttccggtattcacgatttggaacgtttgatgactcgcattgtgtatggctctgcaaatggtcgtgaactgcgcagtctgctagctgccattgagcgtttacctgcattgcagcatttgctagaaggggtacactgcgatttactgcaagacattgaacagcaaattgatttgcttgaagatgtagccaagcttattttttctgccattgtggaagacccgccgttttccattcgcgaaggcggtatcatcaagcagggataccatgccgagttggatcagttgaaaagcgacatgaccaacggaaaagaattgattgcacaaattgaagcaaaagaaaaagaacgcactcatataccaaaattaaagataggttacaatcgcgtatttggttattatattgaaatttccaactcttataaatcccaagcgccggctgaatatatccgtaagcaaacattaagcaactgcgagcgttatattacacaggaattgaaagatttggaagcgcgaattttgggcgctcatgataaatccattcagctggaaagtgtgttgtttgaagaagtccgcaaacaagtggcggaccaattggttcgtgtacaaagtaccgcaagtgcattggcacagctggatgtactaaactcttttgcgcgtatttcccgtcaacaaaattatgtttgtcccgaagtgaatttgggcggaaagattgtgctgaaagaaagccgccaccctgttgtggaagtgttattggacggcgctccgtttgttccaaacgatgtactgttagataaaaatgaaaacagggttgcgattattacagggccgaatatggcaggtaaatctacgtatatgcgtcaaacggcactgattgtactaatggcgcaaatcggttgttttgtaccggcggcatcggcggaaatcggtgttgtggacagtatttttacccgtgtgggcgcatccgacgatttggcttcaggacagtctacctttatggtggaaatgtctgaggtagcggatattttaaaacatgcaacagaccaaagtttattgattttagatgaaatcggcagaggaacttccacatttgacggtatgagtattgctcgtgctgtgctggaatatgtagccgataccaaaacattgggagcaaaagcgttgtttgcgactcattatcatgaattaacagctttggaagattgtatggacagcgtaaaaaactacaatattgcggttaagaaaaacggtgatgatattacatttctacgaaggattatccgcggcggtgcagatgacagttttggtatcgaagtagcaaaactagccggtgtgccaaatcaaattgtcgccagagcaaaagagattctaaaagagttggaaagtatgcctcaggctgaagtaactgcaaaatctgtcaaaaaaccgaaaatggtgcaggaagaagctcaaatttcctttacacctgccgctaaacacgcagtgcttgaaaaattggaacaaattgatgtcaatactctcacgccgattgaatgtatgcagactttgtttgaactgagtcaattggcaaaacaggatacataataaaaaaattgaaccatagcaaagaaagcgaggtgctttatgggcaaaattcaggtgttggataaacaaatcgcagagctgattgcagcaggagaagtagtggacagaccggcctctgttatcaaagaattggtcgagaacgcaattgatgcaggagccacagcgattacggtagaaatcaaaaacggcggcgtaacctttatgcgtgtcacagacaatggctgcggtattgcccgtgaagatgttcctactgcttttttgcgtcatgctaccagtaaaattcgcaaacaagatgatttggaagcaattggaaccttgggtttccgcggggaggccttagcctctgttgctgcggttgcaaacgtagaagtaatgaccagaaccgcagatgaactggcaggtactttttatgcaatcagcggcggtgaacagcaagcgtgtgaagattatggttgtccgcaaggtacaacaatcattgtaaaagatattttttataatgtgcctgcaagaatgaagtttttgaaaaaagatacagtggaagccaacgccgtttccggtgttatggataaaattgcattgtctcatccggagatttcgcttcgttttatcagagatggtagggaaaccttacatacaccgggagacggacaactgaaatccgccatttatgcagtatttggcaaggattttaccgcaggtcttatcccggtcgactatgaatatgaacatgtaaaggtttggggatttatcagcaaacccgcagccgcaagaccaaaccgaagcatgcagcacttttttatcaacggcagatatgtcaaaagcaaaactgctatggtggcactggaacaggcgtttaaggggtccttaatggtaggaaaatttccaagctgtgtactgcatatcgagttgtcttaccgcgccgttgatgtaaatgtacatccaaataaactggaagtgcgttttatcaatgaaaagccgatttttgatgctgtttatcacggtgtacaaacggctttgaatcaaggcgacaagccgattgtcatggatgttaagaaggtagtttctcatcatcctttttatgtgtcaccggaaaaatcggagcaaatgcagctaaaaacaacgtcttctaaaccaatacaagaaacgaacattgcacaaccaattcagcaaactgctccaaaacaggaagaagctgttcccgtatccggatttgccaaagagctttttcagaacagcagtgcagagaagtttcaaatgaatgacagtggaagtatacaaaattctgtttcggacgtacaaattcctacttttcatcactatgagaaagattctcccagaattacgtatgcgaatattgatatcgctgtagatgacagagaggatttcacaaagtcaaattcggagatacgttatgatgaggagataccgcaagaaaaaggacatcaaacagaggcacctcatcaaacagtgacgcatgaggaagttccgcaaggggatgagcacccttgtgaggaatcggctgccaaaaccgatttaaagccgctgcgcttagtgggagaagcatttggaacctatattatcgcagaacgaaattgcgaagaactggtgctgattgacaaacatgcggctcacgaacgaatgttgtacgaaaagctgaaaaaacaagctccgggttccgattctcaaatgctgttgcagccgattaccgttactttgaataaagaggaatacacggcagtattgcaagcacttgatacctttgcaaaagcaggttttgaattggacgattttggtgcaggcacgattttggtacgaagcgcacctctttctatggagcatgatgatgtttcttccgctgttatggaaatggcaggatatttaagtcagcaaaagacagatattacaacagaacacttggattggctgtatcacaacattgcttgcaggtcagcaatcaaagcgggcgataaaagttctcctcaggaactgttggctttggtagagcaattggaagaggatgataccattcggtattgtcctcatggccgtcctgtgaaagttgtaataaagaaaaaagatttggaaaaacagtttggtcgtattcagtgatgttttcaatttcattgttttttcttcataatgatatggtaggatactaggagcttaacatggaaaaacaagaattacagaaaaaaatcccgttggtagtcattgtgggaccaactgcctcaggaaaaagcaaattggcggtagaactggcccattggctgcaaacggaaattgtgtcagcagattccatgcaaatttaccgcggaatgcaaattggtacagccaaacccactgtggaggagatggaaggcattgcgcaccatctcatagactttgtggaattaaatgaaccgttcagtgtagccgattatgttgcgcatgcaaaaacatgtgtagaacgtattgcacaaaagggaaaaataccgattctggcaggcggtacaggactgtacattaattcatttttggagaatttgcagttttcggatgaagagaaagacacagttttatgtgaacagctggcagaaaaagcaagagagcaaggagtgcaggcgttggtagaagagttgcgctcttttgacccccagtctgcagagagaattgattctcataatgtaggaagaatcattcgtgcgatagaaatttacagaaccaccggcatgacaatgacagaacatgtggagcagtctcgccgaataccgtctccgtattctgcgtgtatcatcggacttgactataccgacagagccattctttacgaccgtattaatcggcgtgtggaccaaatgctgcatatgggattggtagaggaagcaaaacaagtgctcagtgagcaagatggtaaaacagcattgcaggcaattggctataaagaactgttgccgtattttcagggggatttcactttagaagaagctgtggagcatatgaagcgggaaacacgacgatatgcaaaacggcagttaacttggtttcgcagaaatcccaatattcattggctaaaggtggacgaaatggaaagtcacgaacagctggtagaaaaagcaaaatcgattgtaacgcaatttcaattttagtgtagaaagtaaagggttttcaatgggtatcttaaatcatccaattttaaaaagaattatcacaattatcatagtagtccttttattggtgttcattggttaccaaatttggcgtgccaatcattcgtctgtggtaacagaaacggctacttatgcaagtatttccgatacgatacaggcagaaggtgttattattaggaatgaaacgcttgtgcagcaaaatactgcaggtgttattacctataatgtttctgacggaacaaaaattgcgaaagacggcttaattgcaacggtttacgatactgcggaagatgctaccacacaacagcggagagaacagctggaatcgcaacttgccacactgcaggagttaaacagtgccagaaccacaactacctacaccaatccggacaatctggataaagatattcataccaaattatatactttattagaatccattcatgagcgcgacagagaccaaattgacagtaataaagattctgtcttaaaatcaattaatacgcgtcaaatagcaaccggacaagtcacagactttaatgcaaaaattcagtctctccaagaccaattaacggctttgggttctgtgaaaggtacaaagaaaggcgaaattacatcaccgtcttccggctattttgtcagctctacagatggctatgaatctacttttagttataatgatgctaccaatttaacggtggatgatttaaagaccaaaaaagaccaaaaagctgagacacaagacagcagtgttattggtaaaatatgcgattcttataactggtatgttgcgtgtattgtaccggctgacacggcatccagactgaaggaagatgctcaggtatccatccaattgccctttgtctcttccggagatattccggctacggttgcagctgtaaatcaaacagacggtgcttctgaggctgctgttatcttaaaatgcaattatatgagcgatacgttgtctaaagtgcgtgatgaaaccattcaaattaatattaatacttatacaggtattcgcgtcagtcagcagtctgtccgtttccaaactgtgtccaaagacgtaaccgacgaaaatggaaatacaaccactgtgaccaaagatgtaaaaggcgtttacattctatatggtaactctattaaatttgttgagattgtgccgctgtacagcagcaacaattatgtcatatgtgatcctgacccggatacaagtgagttaatgacaagcgaaacattaacattatacgacgaagttgtggtaggaggtaaagatttgtatgacggaaaaatggttaagtgatgaagaacttacagcaaaaattgctgcattggaagaaaattataaaattgtaacggaaaaagtagcacaggcagcaatcaaatctggaagaaaaccggaagagattaccttgctggcagcaaccaaaacagttcctgtgcctgttattaacagagcaattgaactgggaattacctgtataggagaaaataaagtacaagaattgtgcgaaaagtatgaccaattgcatctggaacattgtgactgtcactttatcggtcatttgcaaaccaataaggtaaaacaattgattggtaaggtaagtatgattcattctgtagacagtgtaaaactggcaaaagaaatctctaaaatttctcagcagcatcatttggtaaccgatattttggtagaaatcaacgtaggaaaagaagaaagcaagggtggtatatatattgaggatacggaatcgtttttgggagaaatatccacattatctggtatttctgtaaaaggattgatgacaataccgcccgcagacgaaaatattacaaaaacaatacattattttgaaaatatgtataagaaattggttgacattaggtctaaaaaattagataatatatctatgaattgtttgtctatgggtatgtcggcggattatgcacaagcaattgaggcgggggccaatattgttcgtgtaggttctgcattgtttggacaaagagtttataaataaaactgattatcattgcagtaataaaaacaaccgggaggaaacgaccaatgagtagtgcaaaatttgttcagaaatttaaagatatgtggaatccaccagaggatgaatttgatgattacgattatgatgaacaagtagaagatgtttatgaagatgaagagccggctgaagaatatcaagagccagctcgtcatagtcatgctcgcgctcaagaaacaaattccaacaaagtagtgaatatccatgcacaatctcaaattcaagtggttctatttaagccgaataattttggtgaagacaccagagcaattgcagatgaactactaaaggtacatactgttgttttaaatttggaagataccaacaaagatgtttcacgccgtattttggactttttaagcggcgttgcatatgccaacggcggcaaagtaaagagagtagctaccagaacatttatcatcaccccatataatgtagatttgaccggtgatgatttaatcgacgaattagaaggcagcggcgtttatttctaagcggttatgtcggacaaacatagtgtaaaaagtgctcaggcaattcttttggcacgtatacaggacgcagtcgatttgtgtgacaaacggcataagcctcagtttatcggttttcttgatgaaaaagaacaattatatactgaaaaaataacatcacaaatgggctttaaaaactatatgttttggggtggtcatacttcctcagagcgtgtagtttttggtgcgtttccggactatatagagccaagcgacaacctttttccgattcagaccataacagtaacctttcgaatatgtgaccaattgtcccatagagactttttgggtgcattgctgtcgttaggaatcgaaagagaaacattgggcgattttttaattgaggatggccgatgtgtatattttgtacgtgaagaaatcagccaatttattctcatgcaagtaaaaaagattggacgtgttggcgttacgttaaaagaaggtgcagaatttcctttgccaatgggcagaggatttactgagttttcctttgtcgttgcatctccaagattggactgtgttacggcagcgcttgttggttatagccgagaaaagtccggtgctgcgattaaagcaggactggtaacacaaaattatcaagttgctatgtctacctctcaaaaggtagatgtgggcgacaagatttcaattcgcggaaaaggtaaatttgtgctggatagaatcggtcctatgactaagaagggtagactcagcatatttggtagaaaatacaaataatttaggagggcttataggatgcttaccattaacgatatcattaatgctagtttcaataaatcaaattttggcggttataaaaccgaagatgtggacatttttattgatgaggtaaaagagtcctatgagttattgattaaaaagaatattgagcaaaaagaagcgaatgaaagccttgctgaagaaaatagaaaattagcaaaaaaaattgaccttcttgcaaaaaaagtggaagaatatcgcgatgaagaaaatgaaatcaaaaatgctcttatcagcgcacaaaaattgagcgaagcagcaattcgcgaagcacgccataaagcagagattattctgaaagatgctcaaatgaaagcggatgaaaaagttgcttccattgctgacgaggtagaagagaaaaaagaagagcttgaaaaaatgagacagattgtgtctgatttcagaaaaactttgttggataaatataaagagcatttgactttgattaataacattccaaacagaaaaaaacaggtgaaactggaagaaccaaaacaacctgaaccggcagaagaaaataagccaaaagaattgcatacacagtctttggaagagcatatgattgagaaaacacaaccaatcgatatcaaaggtgctattggcaaagagcctagtgaggaagaggcagattttgcttctgcacagcaaaactctcaagaggcagcttctagagtagcctcttccattgaagtggaagaagtggacgaagctcccacaaagaaatttcatctaaatgcaaccagttttgaaaaagcacctgaggagcgcagaggtcgtgatttgcgttacgatgtactaaaatttggtgaagactataatattgcagaagatgatgacgacgaagcaccttcatcaagcagaatgaaacgcaataaataatccattaaggagagaacattaagaatgtcacaagattataaaaatacgcttaacttaccgcagactgatttttctatgcaggcaggtttaccaaaaaaagagcctgttatgcttgaaaaatgggagcaagatggcatttatgataaattgatgaaaaagaatgagggaaagccacgttttgtattgcatgacggccctccatatgccaatggtgacatccatctgggtactgcactgaacaaaactttaaaagattttattgttcgctataaaaatatgtccggttttcaggctccttatgttccgggatgggatacacacggtttgcctacggaattaaaagcacgtaaaaaagcaggcgttgacaattccagcaccatttcagacgtagagcttagagaaatgtgccgtgaatttacgttgggttacttggatgaccaaagaaaacaatttaagcgtattggcggtcttggtgagtgggataacccatatatcactttgacacgtgattttgaggcaactcaaattgaaattttctctaagatggctacaagtggttacatttataaagggttaaaaccggttcattggtgtcccgattgtgtgaccgcacttgcggaagctgaaattgaatatgcagaagatccatgctattccatttatgtgaaatttgccgtgtctgatgataaaggaatcttatccaaattaggtgtagacccggacaaaacatattttgtcatttggactaccacaacatggacattaccagcaaaccttgcaatttgtgtgggtccggaatttgattattccattgtaaaatgtgatggcgaatattacattatggcaactgctctttatgagaaggcaatggaagctgcgggaaaagcagaatatgaagttgtagcttctctaaaaggtgccgaaatggaatatatgaaggcaaaacatccatttatcgacagagaatccttggttattgtgggcgaccatgttacactggaaagcggtacaggttgtgttcatacagcccccggtcatggtgtggacgactataatgtttgcaaaaacaattaccctgaattgcctatcattgttcctgtagataatcatggcaaaatgactgcagaggcaggagaacaatttgcaggtctttctacggatgaggcaagccgtgcaattggaaaacatttggaagagattggtgcaatgtttgctgcaaagagaatcgttcaccaatatccgcactgctggcgttgtaaaaatcctgtattattccgtgcgacagagcaatggttctgttctgtggatgatattaaagagcaagcagtcaaagcaattcaaaatgttacttggattcccggctggggccaagaccgcattacatctatggtgcaagatagaaatgactggtgtatttcccgtcagcgcagatggggcgtgccgattcctattttctattgcaaagaatgcggtgaacctttaatctcagaagaagctatggctgctgtatctgaaatgttccgcacagaaggctctgaccagtggtatgtaaaacctgcggaagagattattcctgaaggcattgcttgtaaaaaatgcggctgcacacactttgataaagaaaaagatattatggacgtttggttcgattcaggcgttacccacgctgcggttttggataaaagaccaaatttacattggcctgctgacctctatttggagggtgccgaccaatatcgcggttggttccaatcctctttattaacagcggtggcatggcgcggtactgctccttataaagctgtggttactcacggctgggttgtggacggtgaaggcagaaaaatgtccaagtctctttccaacggtgtagcacctaacaaaattatcgagcaatacggtgccgacattttacgtttgtgggttgcatcttctgattatcatgcggatattagaatttctcctgaaattttaaagcaattgtcagatgcttatcgtaaaatccgcaatactgcaagatttatcttaggaaaccttgcagattttaatccggaccaagacaaagtatcatttgatgagttattaccaattgaccgctgggcattgcatagatttgatttggtaaatcaaaaagcacgcgcaggctatgatgcttttgaattccatcaagtgtatcatgcaattcataacttctgtgttgtggatatgtctaacttctatttagatgtgattaaagatcgtctttatgtagaaaaggcagacagcaaagagagacgcgcagcacaaacagccatgtacatgattttggacggcatgacaagattgatttctccaattttggcatatacttctgatgaaatttggcaggcaatgaaacatgacgcttctgccgatgcagaaaatgtggtgctaaaccaaatgcctgaacctaccggggtaaatgtggatgaaacctttattcaaacatgggatcgtatccacgatattcgtgatgcagtgaaaaaagcactggaattggcacgtaatgagaaattgattcgcgcttccctggatgccaaagtacagttattctgtgacggtgaaatgtatgattttgtaaaatctgtggaagcagaattgccggttgtattcattgtgtctcaagttgagcttgtaaaaggcggaaagggtacttttgtaagcgaagatttgcctgaactttctgttactgtattgcctgcagagggagataaatgttcccgctgctggacttacagcaatacagttggaagtaatgaaaaacatcctgaggtatgcgcgcattgcgcatctgtactggaataaaatagaacgagaagggtgagcaaagtgttcacccttttttcgaataataacggaggtgttcgcttgttattaggcatttttgctttaattggcgctgcagttttggttgtcattgaccaggtgattaaatttctggcaactacttatatcaaacccattggaaccttggaaatcattccgggattcttagattttacctatcacggaaatgacggtgctgcgtttggaattttatccagccaaacttggatttttgtgattattacagcacttgtctgtattgccttaattgttggattatttgtatacaaaaaacatactacgttatctcgtatggcgtgtgcgctgattattgcaggtggtattggaaacttaattgaccgtgtgtttaataatggatatgttattgattatattcatgtgaaattttttccacctatcttcaattttgccgattgttgtgtttctattggtgtagtactgttgtttatctatgtaattttctgtacagattcacttcgcaaagaatcatctgcgaagaaaaagcaaaagaaagaaaaagtaaagcatgaacaagaccatgaatgagctaaaaaatcattattcttttacattacagccggaagactcgggacagcgattggataaatggctgcaattgcagttaccggatatgacgcgctctgcagttcagaaattgattgagcagggcaatgtaacacgaaacggaatcgttgtaagtaaaaatggaaaaggaaattccggcgatgtgatagaatttatggtaccacaacccaaaccgcttgaagttacggcgcaggatattcctctggatattttgtatgaagataatgatttactggtagtgaataaacccaaaggtatggttgtgcatcctgctgcgggaaatgatgacgggacattggtaaatgcgttgttgcatcactgtggtgattctttgtcgggtattaatggcattattcgcccgggtattgtacatcgtattgacaaagacaccagtggtttattgattgttgcaaaaaatgatattgcgcatcaaggcttggcgcagcaaataaaagaacacagttttaccagaatatatgaagctgttgtttatggcaatatgaaacgagaagaaggaactgttgatgcaccaatcggacgtcatcctaccgaccgtaaaaggatggcagttacggataaaaactccagaaatgcagtgacacattataaagtgttaaagcgttatgatggctttacacatgtacaattaaaactggaaacaggaagaacgcaccagattcgtgtacatatggcttatattggacatcctgttgcgggagatactgtgtatggagtgaaaaaggtgattacttctttaaacggacaatgtttacatgcgcgtgtaattggttttgttcacccgattacagaagaatacatagaaattaccagtgaactgcccgtttactttacgcaatttttaagtaagttaagggaacagtaattatccttgtaaagaagtgaaaacgcatggaaaatgaaaaacgtcacatttggattttaattgcaattgctctggtattttgtgctgtgttaattgggtataatcttttctttgtaaaagaacctcaggccattgtaatagaaacggatatagcagaatcagatacagaacaatctttgggagaaggctatattgtaccaacgtctaaagtaaatattaatactgcaagtgcggaacaattggatgaagaactggaaggaattggaccctctttggcgcaaagaattgtgagctatcgcgatgcaaatggactgtttacagacattgaacagattaaaaatgtatcaggtattggtgacaagaagtttgaagcaatcaaagattatattacggtatcttaggaggagtactcatgaagcagcaagtactgtcttgtattgagacaaggcgcagtgtgcgcagttatgaatcaaaacaaattcccgatgatatgagggacgagatattaaaagcggctatctatgcgccaagcggtagtaacaatcaaagctggctgtttacggcgattcaaaatcgtaagattttagaagatttaaatgagcaagttcgtattggatttggactgttatcagttgcggaaaatgattatcctgctaaaatacgtgcaaaacaaaatgcgcaaaaggaagattataatttttactatcatgctccaacactgattgttgcatctaatgttcctaattacgcaaacgcaatggcagattgttccgctgctttggagaatatgtttttagctgctcatgcattggatttgggaacttgctggattaaccagttgacatggttgggccaaatgaaaaatgtacgcgattttttgacagagtattgccatataccaaaagaacatgtcatatgtggtgcttgtgcagtaggatatacaaacggtgcatatccaaagcctgcaccgagaaaagagaatacaattcaaattattatataaaaatgagtgccactgtgatatcatacagcggcactcatttttgatttttttgtaaaaatccgatttgtgcttaaaaagttatgtagacataggagacggcaaataatttgccaacaaacaaaacttttggcggagttagatattttgctgatgataaacagtagataagcaacatgaatcaaaaatagattgatgtacggtccaatgataaatatttgtgagaaactaaatgatacaagacattttcgagcattacagaataatttaagagagaaaaaggcccagtgcaggagaaacaaaaattctgttcgagtatttttgtttgcagatgggtggaaatgactctgatgtgaaaagaatgacacaaaagaatttatgaggaatgaaaatttgtcccgctgtcccgaactacacctatatatctcgaaaaaggaaacaagcaatatcagaagcaagagaagaaaaagacagagtgacctgagagggtttttctttattacaaaaaacgaggaaaatcacttcagatatcccaaatcacttcctaatatcaaaatggatagtatgggcggaataaggaagaaaaaagcagagcgacccgagagttttttattgaaaaaacaggaaaaactactcccgggtactacagacaagttctcaaaattaccacggaaatctcagttttagcgaaggaaaaaggataatcaggttagccacaggaatggtttggaggattacttgagtcactcgttagagagatgacgaaaggcattcccacataccgccaaaagggcaccttgacataatctaagagagacagaagaaaaaataaaaaagactcagtacagagcttgaacagactctgtaccgggtctttttttgatttatatcaggtgtaaaatggcatgtttcctgcgcttttagggaatgcatttggttcataatggactcagaaggagctgcgggaaatttccatgaggtgcagtaaggacaaactcggtacgatacgggagtttgccctttttggatatattaggctgccctctgacaggagagagttaaaagaggacaagacatatttctttttaacaaacaaggtttgtcaaactatcagcaagaagaggatatcataaaaaaagaatcagtgcagagtattagtctctgtactgattctttttgcttgaaaatgtgcaaatggcgtgttcttttatgcactctttgtaacaaaagtattaatcgccaaagcaaatacctacatcacgtgcagattgaatgatattactatcttttggaacatattttaatttgcctgctacttcactaagcggtacggcaacaatatttccgttttgcaacgctaccatatttccaaaattaccttcttcaattaaacgaacggcagcagtaccaaaacgagttgcaagtaaacggtcgtaaggacaaggaccgcctccgcgctgaaaatgtccggggactgttacacgaacttcgcgtcctgtcaattctacaatttcatgtgctacgcgataggagacagaagggaaagacatatttgcacgactggctttgaattcctttttggacatttctgcttcttttttggaaagagcgccttccgcaactgctaaaatacaaaaacgttttccttgaccggttcttaagtatagactgtctactactttattgatatcgtagggaatttccggcagcaaaatcacatcagcaccgcctgcaataccggcatataaggtaagccagccaactttatgtcccataatctctacaataaatacgcgaccatgagaagtagcagtcgtgtggatacagtcaattacatttgttgcaatttcaactgcgctgttaaagccaaaggtcatttctgtgccccacaaatcattgtcaatggtttttgggagcgtaatgatatttagcccctcttcactgagcagatttgctgttttatgcgtaccgttgcctccaagaatcacaagacaatctaacttcatttttttataagtttctttcatcttggttactttgtctatattgttttcatccagtacgcgcatttgtttaaacggttgacgggaagttcccaaaatggtaccacccagtgttaggattcctgagaaatccatttgcttcatcggaatataatttccttcaatcaaacctttataaccgtcttgaatgccaaagatttttactttatcgcctaataattcacagaatgttttgccaacaccgcgaatcgctgcgttcaagccttggcaatcgcctccacttgtcaaaataccaattcttttcatggtcgataccttctttatttcattttttttaaatcagcccttctgattggcgtatatggtttgctttcatccaaagcttccagtttggccactgcttctttggcatacacgctaaactcatattgagagttaaacggagctttgctgcgtttatcaatttcaatataagtcgtatcattttgcagtaatcttgtattaattgtatcgttgagcatggtttgtacaatatcaaatgcacgtttttgcaggtcagggtcttcaattggaaataccaattctacgcggtgatccagattacgctgcatccagtctgcactgcccatataaattttaggattacctgcattttcaaattgaaaaatacggctgtgttccagcaattgaccaactatactgtgtacactgatattttcactgattcccggaattccgggaatcaaacagcaaatcccgcgtacaatcagctgtacgtttactccgttttgagatgctttatacatcaattcaatcatttcagggtcaaccaaagagtttacttttactattataccacttggaagaccttttttcgagttttctatttctctttcaatcatttgaacaaaaaaactgcgtaatccatgtggtgcaactgcaaatttattgtattccggaggacgggagtatcctgttaatacgttaaaaagggaagaagcgtccataccatacggctctttgcaggtaaataaactaatatccgtataaatttttgcggttgaatcgttatagtttcctgtacccatgtgtacataacggcggattccatcttcttctctgcgtacgaccaaaagaattttacagtgtgtttttaatcctaccaaaccatatataacatggcagcctgcttcttctaatttttttgcccaaaggatattattttcttcatcaaatcgtgcttttagttctaccaaaacggttacttgttttccgttctcagccgctttaattaatgctgcaacaataggagaattaccgctgacacgatataatgtttgcttaatggccagcacattttcatcttccgcagcttggcgaacaaaatctacaacacatttaaaactttcataagggtgatgcagcatacggtccttttctttgatagcatcaaacacatttttatgctcaaagaaatcagcaggaggataaacaggtgtaattggctcgaaacaaagctgttcacaaccatttaaaccggcaaatttggtaaagaacgtaaggtcaataggaccctgaatggaataaatgtctgtatctttcactttcaatgtttctattaaaaaatggcgggtttgcttatcacatttatgtgcaatttccaaacgaacaggacgtccgcgttttcttttcttaatagatttttcaatttcaagcaataaatcttccgcttcttcgtcaatatccaaatcggagttacgggtgagacggaaaggagtacatgcttcaatgctgtgcagctcaaacaattcttcaattttgtagataatgatattttcaagcagcacgaacgctcttccttcatcgctgggcagttctaaaaaacgcgacagaatggatggtacttgtaccaaagcaaagcaggattcttcatcttcaccttttaaacgtaccgcaatatttagacttttattggccagcaaagggaaaggacggctttcatctactgccagcggtgttaaaacggggaacagtactttgtcaaaatagtcagaaatatacttttgttgttttttattcatttcatttggagttaaaaagacaataccttgttttttaagggccggtatgacagaacgttggcagcaagaatattgtttttccacaaatttatgaattttttcttgcaattgggcaaataaagctgtaggagttaatccggaagcatcagcactttgatagcctgaaataatttgtgcttttacacctgcaacgcgtaccataaaaaattcgtctaggttagaagcgctgataccaagaaaacggacgcgctccatgataggattttctttttccaaagcctcttccagaacacggctgttaaaatccatccagctgagttcacggttgatataaggcatttttgtttcattgctcatgagtatcttgcacgacctttcctttgttatatcaaacttgattttacggttaaaaccggctgaacaccaaatacttcttgaaagaaagcggaacatttttcaaatgcccagtgctctaatctggtattgctgtcgcttttagcggtaatgatgaatttatcttcgtccagtctcaccttaacggattgtaatttttgcttttgagatttatccaaagaatttgccagacgaaaaatagcggccaactttaatgcaatgattttttcgcttccttttaaagaggcgaattctgcatctctgtaatttggtgtttcactttctgcaaatcgggaaatatacgctgttattaatgtggttttatctgttaatccgtaaatatctgtatatttcacaatatcaacattgctattaaggtgatgctttgaattgataaaatagccgcagtcatgtaaaattgctgcaatttccagcagtagtttataacttggattcaaaccgtgcagagttttaattttatcaaaaatcatgcatgctgtttccataagaaagttggcatgttcatagttgcagcgatagcggtcagcaactgtttttgcacaagccaatgcatgttcacgtgtttccacaacttcatttagagcacgtttttgtaccaacatttgttcaattagggtatcccataaatctacttttggggcaaaaacatagtcggcttccgtaaatttcaaaagctttgcataaatagccagagaagaatagaacatttcggctacctcttcggttaagtcgaattttaacgctattttttccagcggcattaaacggatggtttgatataaattggttaaagttttagatttaatgacataatttccatcaatgggttcggcattgcacagttttgcaatccgctgcatttcgtttcccgttaatactaagccgttgacttgttggtagggaaccggcatttgaatgcgattaaagatagaatccaaatattcatctaccacaattgcaaagtcatctgtatattcttgtacaccacttagcacatcatgcagttttagagaaccggtagaaatattttgggtgaagaaaatatgtttcccattatataatgaaataccgatggaaccggtaccaatataggacagcagcatattttcaggctgttttgcttgctctttcagatttgattgagttgagaatagttccatatgttttaatgcttttgtgattgcagagtaaataagagatttttcctgattatcatcataaatttcaacaatcatatcgttttgaatcaaaagctgatcttgaatgaattccttattttgtgcttcccgcaatgcagtagtgccgactactttatattggtctacaccatattccttcattacattggagtagccggttaaaatgtgggaaagttcgcgtaaacattcaaaactgattttgccgtagttaaacacttcatgtcccagtttaagaggatattctaatgtgttcagcggtataatttctttatttcttacctgtgaaatttgcattttcacatcgctggagccaatgtctattactgcagctactttaccgcctttgtgtttgggcatgatggttgcaccgcctttttaacaatttattactgtttattataacaaagctatttttctctatcaacatatttcatagaaatttaaagaaacaattcgttttttaacatacttctaacaatagtagtgaaggtcattgctgcatatcatgacatttgtccatgagagcggatagcaaaatagaaatttgcatctatcattgtgattggttatttaaaatacatagattgttctagctgaattttactgttgttgaacagagaatatcggttgtatctgcatcaatgaagatgggatacagcaatgtgatatattttttggaatcatgcattttcatttataaatcagtaatttaaaatggatagatagtatcacgtttacaaatgtttctgtttacattatgatgaatacaaaaataccgggacaatgaaagaaataagaggtgtctgatagagcagtaaacgtaaatccatataaaatagatatcggatataaatgtatgacgtaaaagaacaaaatttttgccaatgagattacagttatgtattgaacagtagatactaaatgaaagaactataaaaataaggaaagacattggcgtatatggagaatcggagtgaataagataatatgtatgattgtctctcttaacagtttctgagaagaacaaaagagaatattgaaggaagggaaaagaagtggagtgactcgagaggggctttttgcaaagtaaaaaatggtggaaaccatttctggtactttggtcaggttctcaaggacgaacgaaaatttcgctttggcgggagaaataccaatgaaggctgctttgggacaatttgacatgctgttgggagtccattacaatcgaatttcgcaaaataaaaaagagcaagatttatcttgctcttttttattgatagtatttataatttagaagctaataataa

SEQ ID NO: 2227 - DNA, 32759 bp, Unknown
  16S sequences of unknown bacteria
cttatctgaaaggctttctcttattcagcttttacacaaaattttcggcggtctcaaattttcagtgaaaaggatattgacttttacttccttgaatcatcggaagacggcggttacagtatagcagcgtcacttaattccggcgtttatgatactctgcgtgaggcatatgagaaaaacgacggcaaggaattcaccgtttattattacggaaaaaagctttatacctttatacccgggtcggagccgagctgcgaggaattcgtgtttgcaagctctgtgaccgattacctggagaatctgacagattattgataaagtaaaatattgacaaaagaagcgcggtcggctaaaattaatagggcagaggtgagagcgtgaacattttacatttgaaatatgcggttgaaatagccaaaacaaagtcgatcagccgtgcagctgaaaatctttatatggggcagccgaatttatcccgcgcaattaaggaattagaggataatcttaatatcactatattcaaccgaaattcaaagggtattacgataacgcctgagggagaggaatttctgcagtatgccagaagaataatcagccaggtcgaagaggttgaagaaatatacaagaacgaccgccgcccgaagcagcatttttccgtctgcgttccgagagcaagctacatttcctgcgcctttgcggactttgcgaaaagtatcagaagggatattcctaccgagatattttataaggagaccaattcgcgccgcaccgtcaataatgtcgttaagggcgacagtaatttaggtatagtgcgctttcagtcggcctttgaaaaatattttgaatcgatgtttgaggaaaagcacctgaacgccgagattattaccgaattcaagtaccgtctgcttatgtcaaaggagcacccgctggcaaaaaagaaaacaatttgctgcaaggatctggcaccgtatatagaaatcagccatgccgatccttatgtgccatcgctgccgctgaccgatgttaaaaaagaggagctttcgggcagcgtggacaagcatatttatatttttgagcgcggcagccaattcggattgctgcaaagcgtgaccgactcgtttatgtgggtatctcccgtgccgaaggaaatttatgagcagtataatcttacagagcgcgtctgcgaggataacgacaagttgtttttggatgttttgatttacagaaacggctataagctttccgagcttgacagcgcgtttattaccgaggtctgcaactccaaaagaaagtatttaacggtttaaggcgattttagcttgacattggtttgtgcaaaaaaattgcctcccctgtgtaaggggaggtggcagccgtatggctgacggaggggttgttacaggctgaaatttatatttatagctgaattatattttgcatatctaattttaaatttgtaattaaactttagtttttaacaatccctcagtcaacttcgttgacagctccctttacacaagggagccttttaatttataaaaatcagtgcagcttaacctcgctccagagcttttcgtaataggttctggtgtcggtgtcaatatcgtgataatactgaaccttgggcatatcggattcggcggggtagagtatctcgtttcggtaatagcagtagtccttattatttacaaccgcggtgttgggggaagcgtagcctaaatattcggcgttagccgttgcaacatcgggctcaagcaggaagtttatatacataagcgccgcttcaacgtttttggcgttcttcggaatacaaatcgaatccacaaatatatttgtaccctcttcggggtagaagaatttgaggtctttgttaacgtccatcattgtaaggcagtcgcccgcataatagggagcaaccgacgcttcgcccgtttccattttgctgaaaacctcgtccataacatagtcctgaagattgcttttaccggttttaagcagctctgctgcggcgtcccaatccgctttgtttgtggtgttgaggttctgtcccaaaatcatctgcgcggtcataaacgcgtcgcgcggattatcgaaattaagcgccatatccttatatttcgaatcccacagcacattccacgagtgcttaatattcgctccggtaagcttttcattataaatgataccaaccattcccacattgtagggaacgctgtattcatccttttcatcaaagaaaagccctttgtactttgagtctataaggtcatagtttgatattttggatgtatctattttttgcagcatatcctcgtttttaaggcgttctatcatataatccgaggggattattatatcatagctgacgcctgcacttttaatttgagaatacatagtttcgttgcttacataatttaagtatttaaccttgattccggtgagcttttcaaactctttgtttacatccatagagtcgtcctcgccgttggaaatatattcgccccagttgtaaaccgtgagggtagtacccttaaggctttggtcgaactttgcgcggaggttaagctccttataggtgtatccgcagcccgtaagtgcggcggagagtgtaattataagcgttattattaaagcaattgtctttttcatttatctaaatcctttctttcatctgcgattttttctctgacttgctttgcagtacattataaagtattaacagcacaaacaccgttataaatataagggtggaaagcgcgtatgcgtcgggctttaccgtctttttcgtcatagagtatatcactatcggcaaagtctggtaatgcccgcaggtgaaatagcttataacaaaatcgtcgagcgacagtgtgaacgccattatgaacccggtaataattcccgtagaaattgagggcagcattaccttgaaaaacgcctttacgggcgtacagccgaggtccatagccgcctcgggtaaattcgggtcggtctgctttaatttcggaattaccgaaagaataacatagggcaggttaaaggtgatatgggaaataagcaccgttaaaaaaccgagggactcggaaagccccaaaagcttgccgacgaatatgaacagcagcataagggaaatacccgtaactatatcggcgttcatcataggtatttgcgtgaccgacattatgatttttttagggatcttgcgtcttattgcggtaattcccaccgccgccgccgtgccgagcacggtcgaaataaaggcggaggacaccgcaattattagggtgtgctgcagtgcgctcatcattgcggtatcggatgtaagccccgcgtaccagcgggtggaaaagccgttcattacccaaacgctgccgctgccgttgaatgaaaaaataaccatgaccgcaaccggggcgtagaggaacaaaattataagcgcaacataaattcgggagagtattttcacattaacacacctccgtcgtcactgtcggagaacctgttcattataaacaggcaaatcagtatcataaccatcagcaccatggagattgccgaggcgatattgtaatgctcgggacccgaattgaaaaaatattcgattgtatcgcctatgagcattgttttggtgccgccgagcttttgcgaaatgtaaaacgtgctgaccgacggcacaaacaccattgtgatacctgaaataacgccgggctttgtaagcggaaaaattactcttttaaacttggtgaacgagcttgagcctaaatcctctgccgcctccaaaagcgatttatccagctttgacataacagagtaaatcggcagaatcatatacggaatataatcgtacaccatgccgaggattacggcgccgggagttaaaagcagctttataggcttatcaataagccctattttctgcaaaaacgtgtttataagccctgtatttgaaagtatggttatccatgaataggtgcgtatgaggaagttcatccacatgggaatcataacgatcataaaaagcattcgctgcgaggatattttaagctttgtcataaaatatgccatggggtaggcgagcatcagggttataacggtggaaaccgcggcgtaaagtattgaaattccgaacgcctttttatatttgcctatagccgtaatgttagcaagggtgaaaacgccgttattatcggtaagggcgaaataaaacattataacaagcggcacaattataaatatagccgaccacacaatatagggggaggctaccagcttgttgccgaaggattttttgttcacggctattcctcctcgataacatcggagaggtggtcaatttcctcactgtaggaggaataatcgccgtaaagtcccgaatactttgattttttcataatgtgtatagcatcgggctctatgtaaagtccgaccttatcacccacaaaatgctcgtcggtggtttgtatcatccacttaaagccgcctatatccactattatttcataatgcacgccgaggaaagcgaccgatgttaccgtgcctgtaagcatacccttttcggggggaacaatatccacatcctcagggcggactacaacatccaccgcctcgttttcggcaaagcccttatcaaggcaatcaaaccgcgcgcccgaaaattcaacatacaaatcacgcagcataacgccgtccaatatattcgattcgcctataaagtcagctacaaaggcgttctgcggctcattgtaaatatcctgcggagtgcctacctgctgaatcttgccgctgtccattaccacaacccggtcggacatggtgagcgcctcttcctggtcgtgcgttacaaaaacaaaggttatgcctaactgctgctgaatttttttaagctccttttgcatatctttacggagtttaaggtcaagtgcggcaagcggttcgtcaagcagcagcaccttggggtggtttgcaatggcgcgggcaatggccacacgctgctgctgaccgcccgaaagggtatcaatatgccgtttttcaagccccgtgaggtttacaaggcgcagcatttcggcaaccttttcctttatctctttttcggggcgctttttaacccgcagaccgaaagcaatgttttcatacacgttaaggtgcggaaacagcgcataacgctgaaaaatggtgttaacctggcgcttatacgccggaacaccatttattttcttgccctcgaacaaaatctcgccgccgtccggctccaaaaagccggctataagccgcagggtggtggttttaccgcaacccgagggaccgagcagagttataaactccttatccttaatttcaaggtcaagcccgtctaaaacctgctcgccgtcaaaagcgaccgaaatgtttttaagctccacaatattttcttttttcataaagcatccccctttgtctgggctgatgaaagccaagccggtaacggtctcgttgctgatttttccatacggacttgcgttcattttttgacatacataagtatgtctgcaaattcacgcttcaccgaatgaaaaaaatcagctaacagagactccgtgacctgatattcaagaaaatcgcagtttgggtgaagtcgaggaatgcagtaatacttacagtattacaaatgacaagacaagaccaagcaagattttctgaatatcaggcgttacaggattggctttcattagccccgcaccaagtgccgacacaagaataattttccccgtgcgatacccgcagactcttcgtaatatgccctgaacaaagggtttttcatagttttcaaaggtcctctgacccgaaactacggcataaaatctgaacctgctctctacacagatgcttaaacatattaaattcaatgtctaactaaatatagactatactatcaaaacgctaaaatgtcaagtattttttgcgatttttctacatttttctgccgtattttgcgccttaaattttattgtctttaaaatactccgtttttctcgcaaatactcgtgaatgctcactttttattatttgaaaaaaatgatgaaaaagcaccccgatatgttatattgggctttaaatatttcacaaagataggaatggctcaaatttatgagtcttaaagtgtattcatgccctcactgatgtaatcggggtgcgacatttgcacggtatgttatttcggcaaataaattgaatgcgcccgctgcgaaaggattatcaatcaagccgttacggcacaaggtatcatgagcttgtcgctcccacgcttaaatatatcgaggagcactacaccctccccgaaaagcttgatgcggaaactctcgccgccaaatgcggaatcagcgcccaatatctgcgcaagctttttgccgggtgctacggagtctcgctcaaggattatgtgataaatctgtggtcggatcacgctgtggagctgatgataaagggcggattcggcgtggagacgccttccgatatgtgcggctttagcaacgcgaaatatttcagccgcttctttaaggagcgctacggtatgcgcttcgggctttggtttgaaccggaaatggtaaatccggacagtgatctttaccgcgctcaccccgattggatcctgcacgcaaagggcaggcagtcaagccttgtacgaaatcagctgacgctggatctgtcaagaaaggatgtctgcgattatataaccgaggcggtttccgatgtgcttaataaagcaaatatcgagtatgtcaagtgggatatgaaccgctatatgtccgaggtcggctcatcagagctgcccgccgacagacagggcgaggtaaagcaccgctatatgctcggtctttacagtgtgcttgagaccttaacgcagcgtttcccgaacgttttgtttgaaagctgcgccagcggcggcggaagatttgatcccggaatgctttactatatgccgcagacctggacgagcgacgacagcgacgcggcagagcggcttcgcatacagtacggcacaagcattgtttatccgtattcctcaatgggcgcgcatgtttcggcggtgccgaatcatcagatcggaagaataacctcctttgaaatgcgctgtgatgttgcgcttccgggtcagttcgggtttgagcttgatttgaataaatgcacagatcatgagcttgagattgcaaagaagaaggtgtgcgaataccgcgagctgcaggaggtcttccataagggcgactgctatcgcttaaaatctccctttgaaaccgatttgtcggctgtggaatttgtgtcggaggataagaaaaccgcggtcgtttgcataagcaactataaggcgacggcttattctccggatgaatttataaagccgcagggtctttgcgaaaacgcgacctaccgaatcggcgaaaattcatatgacggcaaatatcttatgaattacggaatcgttttcagaaacgacagggaaaacaagtccgaaataattgttttgcacgcggaataggcaaatacaggaatacataaggcatcagccgtatgtgcgaataagcatagtcgacgaaagcggcaaaaaagcatggactaatcccatattcctttactcttcggtaattaggattccgcgatggtttctgtaactttttgtcggtatttgggttcaagagttgaaacagtatttcagaacaggtatttctccggtctttaagccaagattgctttaagaatcaaacaataaaaaacgggatagggcgtaatgccttatcccgtttttttcgtgttgactttctgccgaatttaagggtaattttcttatggctgaaaacaaccgcaaatccgcataaacagcggaaatttatggagcgaaacaacactgaagcatttggcgccgatacttgcagtcggtagcttgactttaaaccgcaaatctaccgttaattcactattggcattctcaaaaaaatttttctgcaaatacttgacacgaacgtatgataaattcaggcttgtctttccgaaacaaataatgtataataatatgtaaaaacaaaaacgaggtgcgcgaatggatataagggtgggcgataagctgcttatgaagaaaaagcacccatgcggcgcggacatcttttccgtgctgcgcataggtatggattttcgccttaaatgcgacggctgcggcagggaagtaatggtgccgcgcgcaaaggcggaaaaaagccttaaaaaaataatcagaaccgacggagaagaaaatgtttaataaattggaggcggttgcaagccgctatgagcagatagccgcagagctttcgcagccgcagaccgtggctgataccgagcttttcacaaagcttatgaaggagcacgcggcgctttcacccatagtggaaaaataccgcgagtatgtatcagcacagcaggccgaaaaagaggcgctgcaaataatagcggaaaacggcggggataaggagctgaaagagcttgccgaggaagagctgaaggaggcaaaggcaaaccttgaaaggtattcagatgaattaaagctgcttatgttaccgcgtgaccctaatgatgaaaaaaatgtaatcgtggaaatccgcggcggcgcgggcggcgaggaggcggcgctttttgcgggaacgctttacagaatgtataccatgtactccgaatcccgccgctggcacattgaggttataaacgccaacgaaacggagctcggcggctttaaggaaatcgtatttatgattgagggcgcgggcgcatactcacgccttaaatacgaaagcggcgtgcaccgcgttcagcgtgtgcccgataccgaaacgcaggggcgcatacacacctctaccgttacagtggcggttttgcccgaggcggaggatgtagagctggagataaaccccgccgaccttaaaattgataccttccgttcatcgggagcgggcggtcagcacataaacaagacctcgtccgcaattcgcgtgacgcatattcccacaggcacggttgttgagtgccaggatgagcgaagccagtataaaaataaggataaggcccttaaaattctgcgctcacgcctgcttgacgcagcccagcgcgagcatgacgaggcaatagcctccgaccgtaagtcacaggtgggcacgggcgaccgcagcgagcgcataagaacctacaattacccgcagggcagggtgaccgaccaccgaatagggcttaccctttataagcttgagcagattttgaacggtgatatggacgaaataatagacgcactcacaaccttctaccgcaccgaggctttgcgggctgaaaacggggaatgatatgattaccgaaagactgaaaacggattcggaaaattatgaaaacagcatagcgcgcgcggcggagcttctgaaaaacggcggaaccgttgcgattcccaccgaaacggtatatgggcttgcggcgtccgcctatgatgaaaacgcggtcaaaaaggtttttgaggctaagggaagaccgcaggataacccgcttatagtgcatattgcggatatatcggtgcttaccgaaatagcgcgggatataccggaaagcgcctataaatgcgcagagcttttctggccgggaccgcttacaatgatattaaagcgaaccgataaaattccgccctgcgtgtcagcggggcttgataccgtggcggtgagaatgccgcttgatgctaccgcacgggatataatagcggcgagcgtgccgcttgcagcgccctctgcaaatacctcgggcagacccagccccacaagcgccgagtgcgttataggcgatcttgacggcaaaattgatgccgtggtcatgggaaaggattgtgctgtaggggtggaatccaccgttataaccttggttacagacccgcccaaaattttaagaccgggtgcggtaacgcccgagcagcttaaaaccgtaataccgaatattcagcttgataaggcggttttatcaatgcccgcagagggtgagaaggttgcttcccccgggatgaaatacaagcattacgcccctaagaccgaaacctatttggttgagggcgagagcgaaaagttcgccgaatttgtaaattccaagccgaacgccgcggcggtctgcttttatgaggacggggaaaaaataaccgttccgcgccttttttacggcacggcggaggatgaaaagacccttgcccacagcgtttttgcagtgcttagaaaggctgataagctgggtgtttccgaaatttacgttcatgccccctcaaaaagcggaatagggcttgcggtgtataaccgccttatccgcgcggcggctttcagggtgataaagctatgagcgtaattataggcttaacaggacccacgggcgcgggcaaaagcacggctgcggcggcagcgaaaagcttcggcttgcaggttattgattgcgataaatctgcaagagccgccaccgaaaagggaactgacggcttaaaggctttggttgccgctttcggtaaagaaatacttttaaccgacggctcgcttgaccgcagggctttagctgcggcggcttttgcaagcccccaaaaaaccgagcttttaaacgaaacaattttaccgcatatagtaaagctggttttggcggaggctgagggtaaaaacgtcctgcttgatgcgcccacgctttttgaaagcgggcttgattcggtatgcactgcggtaattgcggtttccgccgatacgggaatacgcagagagcggattataaagcgcgacggactgaccgccgacgctgccgatttaagaataaacgcaggcaagacggatgaatactataaacaaaaagcggattattttctttacaacaattcggatgaaaaagcgttttctaagcgcttttcagatatattgaaaaaaattatcggaggtaatataaatggctgaaaaaacagcatcggagcttttaagggagcagcttgcctacaagcgtaaaaacggaagactttacagtgacgaaagcattgtaaatgcggcggacagctactgtgacggctacaaggcttttcttgataaggcaaaaaccgagcgcgaggcggcaaaggctgcaatggaaatggcaaatgcggcgggctttaccgagtttgagcacggcaaaaagtacggcgcgggcgacagggttttctttaacaaccgcggcaaaacggttgcctttgcggtaataggcaagcagcctgttgaaaacggcgttaatataactgcggcgcatatcgactcaccccgccttgatttaaagccgaatccgctttatgaggacgtggaccttgcgcttttcaagacccactattacggcggaattaaaaaataccagtggacggctgtgccgctggcgctgcacggcgttttcgtattaaaggacggaacggttaaagaggtatcggtcggtgaaagggaagacgagccgaaatttgttataaacgatcttttgccccaccttgcaagcgagcagataaagcgcccgcttaatgaaggaataaagggcgaggaattaaacgtgcttataggcagccatccctttaaggacgacaagggcagcgagcttgtaaagctgaatattttaaagctgctcaatgaaaaatacggcgttacagaggaggatttcctctctgccgagcttgaaatggtacctgcggcgcacgcctgcgatatcggctttgaccgctctatgataggcgcttacggtcaggacgaccgtgtttgcgcataccccgctttaaccgctgttttagaggttaaaacgcccgacagaactgcccttgcaattcttaccgataaggaagaggtaggctctatgggcaacacggggcttgaatcggactttttacgctatgttgtgggcgatcttgcaaaaatgcagggcggcgacccgaccttggcgctcaggcgctcaaagtgcttatccgccgatgtaaacgccgcaatggatccgactttccaagacgttatggagcgcaaaaacgcctctttcttaaattacggcgttgttgttacaaagtatactggcgcaaggggtaagtcttccacgtccgatgcgtccgccgagtatgtggccgaggttcgcgcgctgcttgaccgtgaaaatatagtatggcagatgggcgaaatgggcaaggtagatataggcggcggcggaacggttgcaatgttcgttgccaatatgggggttgacgttgtagacctcggcgttccggtgctttccatgcacgcgccctttgaaaccaccgcaaagttcgatgtatatatgtgctaccgcgccatgtatgagtttatgaaataatttcggtgttacacctgtcctcacttgcgcatataatgggaatggtcatgacctaatattaaagggatgtgaaattatgtgcgataacagaggactgacaacaggctgctgccgtatgagttgcccgcacgccgtggcgctcacattgcttgtactcctattctttgtgggaggagcaattgcaggcgcatatgtcgcggagcttatagtagcttcgatcgttccgattgcgatattcggaatagttctgcttatagcaaccgcgatagcgctttatctcggcagctgccgctgcagaaggcagtaggaattaatgaaaaagatgcagggcttaatttaacggagacttttttcgggagcttccgcagcgtataagccttgcaaacaatccctccgtcagccgaacggctgacacctccctttacacaagggaggctttttatattgatttttttaaaggatgagtgaagaaatgtccgaacgcacaatagcggcggttgccacacccccgggagagggctcggtgggggttataagaatatcgggagaaaaggcgatagaaattgccgacagtgtttttttcgctgtatcggacaagcctctttccgttttaaagggctataccgccgcttacggcgaaataagagacggcgaaaccgttttagatgatgcggtggcgcttgttttcaaagcgccgaaaagctacaccggtgaagatgtggtggaaatatccgtacacggcggcgcgcttattctgcgcgatacactgcggcttttatataaaaaaggcgcgttccccgcagagcctggcgagtttactaagcgcgcgtttttaaacggcaagaccgatcttgcaagggctgaaagcattatggggcttatatcggctaaaaacgagtcgcagctgcggctttcccgcgcggcgcatttgggaaaaataagcgaaaagatcgacggtataatttcaaggcttacatctgccgacgcggcgatagccgtttactccgattaccccgatgaggaaatagaggggcttgacagagaaagctttttgtctttgcttaaggcctgcgccgatgagaccgagcaaatgctttcaacctacaacgcgggcagagttttgcgcgagggaattgaaacggtaatagtgggcaagccgaacgtgggaaaatcaacacttatgaatatgttaagcggtgcggagcgctcaatcgtgaccgaggttgcgggcaccacgcgcgatgttatagaggacacggtaaccgtgggggatattttactgcgcctttccgatactgcgggaataagggacaccgacgaccgcgttgaaagcataggcgtagagcttgcgaaaagaagaatagagcttgccgaccttgtgcttgcggtatttgacataacaaaaccgcttgataatgacgataaacagcttttggagcttgtaaagcataaaaatactgttgtgatacttaataaatccgatatgggaagcaacgcggatacatcggcgtttacgggcttcagaacagttgtgacctcggctgtaaacggcgggggatatgaagcgctctgcagcaccattgccgatattgcgggaactgcggggcttgaccccgaatctgccgtgctgataaacgaacggcagcgcgcctgcgccgaacgcgcgcttgacggcataaatgaggcgatatcggcgctgaacgacggcaacacggtggatgccgtgggcgtttgcgtggacgacgcgcttgcggctttgctggagcttacgggcaggcgggtcacaaacgaggtgtccgatgaaattttcagaaaattctgcgtaggtaaataattccttgaatcgtcggtacacggcataaaccgccattgacaaaacaacggttttataatataatagccttgtaatttgattttaattaattctatatctacgaattagttttcggaggaaaaagaatgattcccaaaaaaatttccgcggtaactgctttggtgattatatcggttttgttttttacgggctgtaaggacaaggcaaatacttcttcggcttcttccgaaacggtgagcagtaagccttcggtcagctccgatgaaactccgatcaattcggattcgccgcccgcgagcgatacatcgtccgtaagcagcaagccgcataatgatgcaagcagtcagccgcatttgcacgcgtataagattacggtggttccgccgacctgcaccgaggacggctataagctgttcaaatgcagctgcggccgctggtatactcaaaaggataaggaaaaaaccggtcacaaatggaaggaatggctggtcaccgttatgccgaccgcaagcaccgagggcatggaagagcgtgtttgttcggtttgcggcaaaaaggaaagcagggtgcttgaaaaggaagcggctgccactgccgaagagctggagcaggagcttttaaagcttataaataccgcgagaacggaaaacggagcggcggagcttcagcttgtaaccgaggggacgcttacaaatattgttaaatatcttgcggagaacgataccgaaaaatacgaagcggaatccgcgaagctcaacacagagcataaatatgcaagcagatcggacggacatgcgtcagtcagcgcagcgtttgagactcttatgaaggacgaggaatataagtcgaaaattttaagctccgattttaagtatatatccttaaaaataacaatgaccgacgtcaaggcggagatatcccaatttatatcggatctcgccgaataggcagtacggctcaagtaataacatcggctcttttctactatattgtagagaaagggctgatgttttttgtttagtgccgaaactctgtttaaggcggtcgtatcacttttatgcgccttggtgcttttggttttgactgttacggtaaagcagaacgagaagagagtcgaaagcaaagccgcagagcttgactcggtgaagaccgagcttgaagcgcaaaggtctgcgataagtacggtgctgtccggcttcggtgaaatatgccgcgaaagcgagaccgccgcggaaacgggggatatatggaaagaaccgtccggcgggacaactccgcaggcacgccagcccgacggaaggcgcgtttgctaccttacatttgatgacggcccatcggataaaacgcttgaaattctcgatatactcggtaaataccgcgtcaaggcgacctttttcgtaatcgaaagcgagaatatagagtatgttaaaaaaatatatgaggcggggcatacgataggtctgcactcggcgtcgcatgattattcggtcatatattcgggcgaagaaatgttttacagggatataaccgagctttccgacaaaatatatgagctgataggtgtaagacccacgcttctgcgttttccgggcggcagcagcaataccgtcagccgcaattactgccgcggcattatgacaaggcttgttaaaaccgtgggcggcaggggatattcgtattttgactggaacataagctcgggcgacgcggataatccgacaccgagctacacctatatcaggaacagggtgctgataagcgccgcagataaaaattccgcatgtgttttaatgcacgattcggcggataaggcgtcaaccgtgcaggcgctgcccgagattatagagggaatgctgcgtatgggctattccatagaaccgcttaaatcggatacctacggctatcatcacagaaatttgaataattagacttgacacagagagtatataactgtaaaataaatgatgtacctaaattgacttatttcggagtgataatgtgagccgacgctatttgaatattataccgtcggtgctttattttatatgctttgccgcgcttttcgttatgctttgcaacgcctctggaattttaagctttgcgcacggaataaaaatcgcagcgggaacagccgcagttgtgaccggctatttttccgcctggttttctgcgcttaaatccgaggacgcgggcattcggcacaaaataataagaaaccgaattttcgcgctttttttattttatataattcttatagtggatttcacccttatcgacgacgctctgggtcgggatattttcggcgtacttaaatggaacactgcggaattttacagatatataaatgaaagcaccaatttaataccctttgaaacgctcaagctgtttataaacgcccttaagaacggcacgcttccgttctggagtgtttttgagaacattttcggaaattttgccgcgtttatgcctctgccgtttttcacggtgtgtctattcaaaaggataaacaggtggtattccgttctcgcggtcacgctgacctctgtgctgctgatagagcttctgcagcttttgcttttgacaggttcaagcgatatcgacgatgtaatcctaaatgtttcgggcgctatgcttttttacgcgcttctccgtatacctgccgtgagccgtttcttgacccgcttcacaatggacgtatggcaataaaaaggaatgaaaaaatatggacagtatactttttgcggcaaacgcaaaaattaatcttgcgctttcggtaatcggcaaacgccatgatagctaccacgagttggatacggtaatgcaaacggtggatataagcgatgagatatcaataaaaaaaagccgctttttctcttttgagagcgacagctttaacggagaaaacaatattgcttttaaagcggcgcactgttttttcggtgcggcggggataaagccgcaggtgcaaataaaaataaaaaagttcattccgtcttctgccggactcggaggcggcagcacggacgccgcaggtgtgcttacagcgcttgataaaatttttgaaacgggattttcaaaggcaaggctttgcgaaatggcggtatccctcggggcggatgtaccgtttttgattgacgggggaacgcagcgcgcaaggggaataggggagatattgaccccgctgccggctatcccgaaatgctcggctgtaataatacttgcgggagataagccgtctaccgccgaaatgttcgcaaggcttgataaaacggattacccgagacccgatatcgaaaagaccgtgaccgccgttaaaaacggcagctattccgagctgacactggcgctcggaaactccttttcggtactgtgggagggcagcaatatacccgaccgcctatactcctgcggcgcggacgcagtatccctttcaggcagcggccccgcaagattcgcgcttttttccgatgatgaaaaggcaaagattgcaagtgaatatcttaagaacgaaggctttttcgtctattcgtgccgcccttccgaaagctcatttgttattaaataataattagagaaaattttcatgtgattcggtgaattctgtcacttcgtgacatctcctcacactgtgaggagtcaccctaaacaccgggagcctttgttttgttaaaaaatgcctccccggtgttttggggaggcttttttgcatatcgagccgataaattacccgataattccgattataaatattgcgagtataagtatcggcaggacgataagaaaataccatttcatccattttgcaacctttaagcccttgccggtatttgcttcttttctgtaattatcaaagccccagccgaattttgtaacgcagaagagcaggtaaataagcgaccccaagggcagcagaatattgcttacaataaaatcctcggtatcaagaatatctctgccgcctataaggtgaacgttgctccataaattatagcccagaacgcagggaatacttgctgtaagaattacaatgccgtttatcagagcggctttttttctgctccagccgagcgtatccatacaggaggacattatgttttcaaacaccgctataacggttgagaacgaagcgaatgtcataaacaggaagaaaagcgagccccagattctgccgccggacatgttcacaaatacattgggcagtgtaacaaaaataagtccgggtccctgattcacttcaatcccgtagctgaagcaggcagggaagattataagtcccgcggaaatcgccacaaaggtatcaagcccgcaaatgcgcgcgccctcgcccataagcgagtgctccttgcccatatagctgccgaaaatctccattgccgcaattccaaggcttaaagtaaagaatgattgattcatagccgcggctataacattgccaagccctaccgatttaatgttttctatgttcggcacaaggtaaaatttaagtccttcgcccgcgccagagagggtaaagctgtgtattgccaaaatgagtataagcacgaaaagcgcgctcatcataaccttgcttactctttcaagccccttttgcacgcctatgctgcaaataagtattccggcaataaccgttacagccatccaaaagcccatttcgccggggcttgccagcatatcggtgaaaaccttgcccgcgccctcatatccggaacttaataccgcttcgggcgtgctgcccgagtggaaggtgccggttaaaaacttaaagaaatagttcagcatccaccccgaaaccgtggtgtagtacatcataagcacatagcagcctattattgcaaaccaaccgtgaatgtgccatttgtgtccgggcttttcaagcgccttgtaagccaataccgtgctcttgcggcttgctctgcccacagccagctccattgttaaaaccggaagacccattattaccagcattaaaagataaataagaacaaaaaatccgccgccgttttgccccacaataaacgggaaacgccaaacattgcctatgcctattgcacagccggcgctcaccagcagaaagccgagccgcgatttaaaagattctctctccatacataaaccccttattagtttttaatatgactattatatagtggaagaccgcaaatgtcaataaaatacaatatgtatcggcgcgaattttgtcattttttgaaaattgtacataaagccgcgtaatcgctatatcatatttgtaatagaaatatgtaaatagtgtatttacaaaaccgctcgatatatgttataataagtggaatattgtagtaatggaaggtgtattatgaacaaagtatcaattatcgggaccggaagcgtcggttccaccatcgcttatacgcttactgtaatggggcttgcctcggaaatcgttatgatagatatcaataacgaaaaggctctcggcgaggcgctcgacatccgccagggcacacccttttgcggtgcctgctcaatctatgcgggagactaccgcgacgcggttaattccgacattgtaatcgtaacctcgggcattgcaagaaagccgggtcagtcaagacttgagcttgcgcagactaacgtaaacataacaaagcagataatccccgaaattaccaaatacgcgccggatgcaacctatattatagtaagcaacccggttgatattcttacatatactttctacaagatgtcgggactgccggaaaaccgtataatcggttcgggcaccattcttgataccgcgcgtctgcgttcaagactttccgaatattacaacataaatcagagcaacgttcacgcctatgttttcggcgagcacggcgattcttctttcattccgtggtcggtcgcaaacatctcgaatgttccgataaaggagtgcaaaaagcttataaccacccccggcattaacacccccgagcttgatttcggcgagattgagcagtatgtaagaaaatcgggcgcgcgcgttattgcaagaaagggagctaccttctatgccgtttcggtatccgtttgccacatctgcaaatgtctgctcggcggtatcgacaccacaatgaccgtttctaccatgatgcacggtgagtacggcattgaggatgtagctttaagcacccttaatatggtaggtcacgacggtgtgcgcggcaaggttaacgttcctatgaccgacgaagaagtaatgctgctgcgcaagagcgccgatacattaaaggacgttataagcaatcttgagatataaggggtaatacagaaatggaataccgtatagaacatgattctatgggcgaaatgaaggttcctgccgacagattgtgggcggcacagaccgaaagaagccacgaaaactttgagataggtgtaggcattgaaaccatgccgcgcgagataacccacgccttcggcatacttaaaaaggcagcggcacttgcaaacgccgagcttaagcccgaaaaaatgacggcgcaaaaggtaaaggctatttccgccgcgtgcgatgaagtaatatcgggcagccttaacgatcatttcccgcttgttgtctggcagacgggatcgggcacgcaatccaatatgaacgcaaacgaggttattgccaaccgcgctaaccaaattgcgggcgaaaagctttgccacccgaatgatgatataaatatgagccaatcctctaacgacaccttcccgaccgctatgcatatttcggcggttgtagctattgaggataagcttttgcccgcaatagagcttttaataaatacttttaaaaaattagaggctgaaaacgagggtatcgtaaaatcgggcagaacccatttgcaggacgcaactcccattaaattcagccaggaaatctccggctggagggcaagccttgagcgagacgcggagcttttaagaatggctgttaagccgctttatgagttggctctcggcggcacagccgtcggcacggggcttaacgcacctaagggcttttcggagcttgttgccgcgaaggtggctgagcttacgggcaagccgtttgtaaccgcagcaaacaaattccacgcccttacttcaaaggatgaatttgttttcgcgcacggcgctattaaggctgccgcctgcgatatgatgaaaatagcgaacgacgttcgctggttggcttcaggtccgcgcgacggtctcggggagatacacattcccgaaaacgagcctggctcatcaataatgcccggtaaggtaaaccccacccagtgcgaggcggtaacaatggttgccgttcaggtaatgggtaacgatgttgcagtaggtattgcggcgtcgcagggcaattttgagcttaacgtatttatgcctgttgcggcgtataacttcttacagtccgcccgactgcttgcagaagctattatttcctttaacaacaagtgcgctgtgggaattaccgcaaataaggataaaatgtatcacaatctgcacaattcacttatgcttgttaccgcgcttaacccctatatcggttacgaaaacgcggctaaaaccgccaaaaaggcgtttaaggataatatctccttaaagcaggcgtgcgtggaattgggctttttaaccgaagaaaaatttgacgaggtattccaccccgagcagatggtttaatttttcagggaggaagaataatgattaaggtcagttattttcccggctgcacgctccgcacaaaagctaaacagcttgacctttatgcccgcagatgcgccgaggttttgggcgttgaattatgtgagatagaggactggcagtgctgcggcggcgtgtttataagcaataacgacgagatagcgtcaaagctgtcctccgtccgtgcgcttatagccgctaaagaggcggaaagaccgcttgttacggtatgctccgcctgccataatgttattaaacaaacaaattatcagataacgaacgacgaagcgttcagaaaccgcgccaacctgtatcttgcacaggataaggaaaaaagagagccttattcgggtgagacgaaggttatgcactatttcgagcttttgcgcgacgttgtaggctttgataaaattaaggaaaaggtcgtaaaccccctaacgggcagaaagatttccgcttattacggctgcctgcttttgcgtcccggaaaggtaatggcgtttgacgaccccgaaaaccccgcgattatggaggagtttataagggcgataggcgcagagcctgtaatttacccctacagaaacgagtgctgcggcggctatgttgcgcttgaagaccccgagagtgcaaagaaaaaaagcaacgccgttacaaacagcgccgaaagccacggcgcagagctggcggttaccgcctgcccgctttgcaagtacaatttggtgcataacggcagcaatatacccgttgtgtactttaccgaattattagccgaggcgttaggcgtaaaggaggatataaatgcctgataaaaaagagctgttaaaggagcaggttataagggcaagcggcgttaatccgcttaaatgtatgcgctgcggcaaatgctcgggtacatgcccctcatacgacgaaatggaatatcacccccaccagtttgtttatatggtggaaatgggcgatattgaaacccttatgaaatcggaatcggtttataaatgtctttcctgctttgcctgcgttgagcgctgtccgcgcggtgtagagccggcaaagattattgaggcggtgcgccttgaagcaatacgccgaaagggaaacaaccatatgaccgctaatgatattcccgaaaaaataaatgacgatattccccagcaggcgattatgagcgccatgcgcaaatattctaaataggaaaggagaaaataacatatgcaaagaatcggagtattcgtatgtcactgcggtaccaatattgcgggcaccgttgatgtaaaggctgtcgcagaggctcttaaaactgaacccggtgttgttttctccaccgattatcagtatatgtgctcacaggcaggtcaggagatcattaaaaatgcaatagccgagtataagcttaccggcattgtggtctgctcctgttcgccccgtatgcacgagaccaccttccgcaaaactgcggctgccgcagggcttaatccatacatggtggaaattgccaatatccgtgagcagtgctcctgggtacataaggaaatgcccataggcaccgaaaaggcaataattcttgccaaggctgcggttgcaaaggttaatcttaacgcaccgctcaccccgggtgaaagccccgttacaaagcgtgctttggttataggcggcggtattgcgggtattcaaaccgcgcttgatattgccgatgcgggcttcccggtcgatatagttgaaaccaagccgacaataggcggcaaaatggcacagcttgataaaaccttcccgacgcttgactgcgccgcatgtattttaacccctaaaatggtggatgtggcacagaacgacaaaattcgcattttctcatactccgaggtaaccgaggtagacggctttgtgggtaattttgaggttaccattaagcgccgcgcgcgttacgttaaagaggatatatgcacgggctgcggactttgcaccgaaaaatgtccgcaaaagaaggttcccaacgagttcaacctcggtatggataaccgcagcgctatttacattccgttcgcgcaggcagtgccgaaggttgcaacgatcgacccgaatcactgcatgaagctcaaaacagggaagtgcggtgtttgctcgaaggtctgcactgccggtgccattgattacgaggcaaaggacgagtttgttaaggaaaaatacggcgcaatagtagtggctacgggctttaatcccatttctatggagaagtttgacgagtttgcttactcccagtcaaaggatgttataacttccctcgaattggagcgccttatgaatgcggcagggcctacaggcggcacgcttttgcgtccgtcagaccatgagcatccgcacacgatagtttttgttcagtgcgtgggctcaaggtgcgaggcatgcgctgaaaagggcaaggaatattgctctaaaatatgctgtatgtataccgcaaagcacgcaatgcttataagagataaataccctgataccgaggtttatgtgttctatatagacgtgcgtacccccggcaaaaactttgatgagttctaccgccgcgcggtggaggaatacggcgttcactacataaagggtatggtgggtaaggtttctcccgagggcaaaaagcttaaggttcagggctccgatttaatttacggcaaacagctgcatatagacgctgacttagtggtgcttgccgcggctattgagccggataaatccgcccgtccgcttgctacaatgcttactgccagtatggatacaaacgacttctttaccgaggcgcaccccaagctccgcccggttgaaagccccactgcgggcgtgttcctttcgggtacatgccaagggcctaaggatatacccgaaaccgtttcccaggcgggagccgccgcttcaaaggttatagggcttctgtgtaaggataagcttacgggtaacccctgcgttgcgcactccgatgaaatgatgtgcaacggctgctcaacctgcgaaaaagtttgtccctacggcgcgatttcctatgttgaaaaggaattcagaatgcctgacagaaccacaaaggttcgccgcgtagcggttgtaaacgaggctgtgtgccagggctgcggcgcttgcacggttgcctgtatgtccggtgctatggacttaaagggctttatgaataaacagattatggcggaggtagacgcaatatgcaagtaaacgaatataagccgcttatagtggcgttttgctgcaactggtgctcctatgccggcgccgaccttgcgggaaacaacagactcaattatcctgccgatgttaaaataatccgcgtaccctgctcgtgcagagtaaacccgatgtttattttacgcgcgtttcagcgcggggcagacggcgtaattctttgcggctgccaccccggcgactgccactacacctcgggtaactattacacccgccgccgtatggctctgcttttctcaatgcttgactttttaggcattgaaaaggagcgcacccgcgttgagtgggtctccgcggcagagggcgcaaagttcgccgccacaatgaacgattttgcaaaaacagttgcggcgcttggtgaaaacaagagattggaggatttaagatgcaagaaataaaacgcgaagttttagtaaataaagcctccgaattgcttaaaaacggcacggttgaccgtgttttcggctggaaaaagggcgagtttgattacgatatcacccccgcgcttttcactactgccgaggatattgaaaaagagtttgtatggggagatttttgcggcgctaacttttcaaagtaccttataaaggaaaccggaaagagtgaaaataaggttcttgttttcttaaagccctgcgatacatacagctttaaccagcttttaaccgagcatcgctttgaccgtgaaaaggtttacgccgtgggcgttccgtgcgcgggtatgcttgatacgggaaaaataaaaagccatgccgagagtattgcaaaggtaaccgataacggcgataaggtggtaatagaaaccctgtttgacggcgaaattacgctcgacagaaacgagcttttgcccgaccgctgcttaaactgcaaatccaaaaagcacgttgcttacgatgagcttttgggcgaggacggtactgttttagactctcaccgtttcgatgaggttgaaagattggaaaaaatgaccccggacgagcgtttcgctttctggcagaacgaattatcccgctgcatacgctgcaacgcctgccgcgacgtttgccccgcctgcacctgcgaaaagtgcgtgtttgataaccccgattcgggcgttgaaaacaaggcggcttcaaacgagtttgaggaaaaaatgttccatattatccgcgctttccatgttgtgggaagatgcaccgattgcggcgagtgctcaagagtatgtccgcagcacattccgctgcacctgctcaaccgcaagtttataaaggatattgacagcttttacggcgaatatcaggcaggggcagaggtaggctcgcgcgctccgatagtaaactacaccaccgaggatattgagccgggcgacgctgtaaggaggaatgaaaatgcgtaaaatatcgcttgaaaaaatagattcgcttttctccgccattgcagaaaacaatgtgctttatatgccggttgataccaaaacaggcgcaaaatatgagaaatgggaaaacggcaaaaagctttcaaacgcgcttaacaccgtaaggagcgcaaaggatttcttcttcccccaaaccgaaaaccttatggattttaaggtagagggcaaaaagatagaggttatagacacccgcagcgaaaccgaggattttgtggtcttcggcgtgcgcgcgtgcgatgttaaaagctttgatgtgctcgataaggtatttttggcagagccgcaggacagttactataaaaaccgccgcgagcacggggttataatgtcccttgcctgcacaaagccgaacgagacctgcttttgtaccaccttcggtatagacgcggcagagcctgcgggcgatgtggtatgctataaaaccgaagacgcgctttatatggacgctaagaccgaaaagggcgaaaagcttttaaaggcgcttgaaggcattaccgaagaagccgataacaaggcggttgccgagcagcaaaaggtaacgcgcgagcgtatggcaaagctgccgctggcaaacctcaaagctgacgcattcggtgacggcaaaacaaaagaattttttgaccgccccgaatggaaagagctttcagaaagctgcctcggctgcggcacatgcacctttgtgtgccccacctgccagtgctacgatattaaggacttcaacaccggtcacggcgttaagcgtttccgctgctgggattcctgcatgtattccgaattcaccaaaatgtccgcaggtcagccgcgactgactcaattagagcgtttccgtcagagatttatgcacaagcttgtgtatttcccgacgaataacgacggtatgttctcctgcgtaggctgcggcagatgtcttgcgaaatgcccgatacagatgaacattgttaaggtaatgaaaaaactgggaggtaacacaaatggctgatattaaagaaccgcttattccgaaaatcggcgttgttaccgatatcaggatggacactcccgatgttaagaccttccgcgttgtaacgcccgacggcaaaaaggctttcgagcatatgccggggcaatgcgcaatgctttccattcccggagtgggcgaggctatgttttcaatcacatcttcccccacaaattccgagtttatggaattttccataaagaaatgcggctgtgttacagagtggctgcactctatggaggtagggcaggaaataaccattcgcgggccttacggcagacccttcccggtcgataccgaatttgcgggtcacgacctgctcttcgttgcgggcggtataggtcttgcacccctgcgttcggttattaactactgccgccactaccgcgaccgctacggcaagattgatattgtttacggctcgcgcagtaagcaggatcttgttgactacaaggaaataatcgatgaatgggcaaatgatgcgggtgttaacgttcacctaaccattgaccgcgagcagcccgagtgggacggtcacgttggctttgttccgaattatgttaaggagctgggctttacaaccgataaaattgccgtgctttgcggaccgcctataatgattaaatttacccttgcggggcttcaggaattaggttttgataaaacccaggtttacaccacaatggagcttagaatgaagtgcggcattggcaaatgcggccgctgcaatataggcgcaaaatatgtctgcaaggacggacccgttttccgctttgacgaaatagacgagctgcccgacgagtactgataaggaataaggaggaaaacaaatggatacaatggttgatgtttacctgttcggcaaaaaatacagcgtgccggataaccttacaataatgcgcgcaatggaatacgcgggctttcagcttgtacgtggctgcggctgccgtaacggcttttgcggcgcctgcgccaccatttaccgcataaagggcgaccgcgagcttaaaacctgccttgcctgccagactaaggttgagaacaatatgtatgttgcaacactgcctttcttcccgctggtaaaacaggtttacgatattgaaaaaattaaacccaccgagcagattatgatgcagctttaccccgaaatttatgcatgcgtaggctgcaatgcctgcacaaaaagctgcacgcagtcgcttaacgttatgcagtatatagcgtatgctcagcgcggcgagtttgataaatgcgcagaggaatcgtttgactgcgttatgtgcggcgtttgctcttccagatgccctgccggtatttcccacccgcaggttgcaatgcttgcacgcagacttaacggcaagtatatagagccgaagtcagagcaccttgaaaaacgcgttgaggaaattaaagagggcgcgtttaccgagattatagagtcgcttatgggcaagcctgttgaggagcttaaggagctttacaacaaccgcgaaattgagaaataaggaggcgcgcagattatgtattcaaaagaatttgaaaaatctttaaaggcggttgaggctgcaagagaagataacattgcattagagccgcgccgtatgaccgcggacgaaaaggacgcccttttggcagcttaccaccccgattataaaaagagcgaattttccacccttaaaatagggccgaacaagggcgagcaggtgccgcacgagctttgcgaaatgcttgaggcgcacagccgcattaaggcggaagacgttgatttaaacgacgttacatatgatgttgacgtgcttataatcggcggcggcggcgcgggtgcgtctgccgcaattgaggcggataacgccggcgctaagactatgatagttaccaagctgcgcataggcgacgccaacacaatgatggctgagggcggtattcaggcggctgataagccgaacgattcgcctgccatacactttgttgacgcattcggcggcggtcatttcgctgcaaagcgcgagctgctttcaaagcttgtgtgcgacgcacccgaggctattaagtggcttaatgaactcggagttgagtttgataaaacacccgacggcaccatggttaccacccacggcggcggtacttcgagaaagcgtatgcacgcagcaaaagactattccggcgctgaaattatgcgcaccttgcgcgacgaggttttaaaccgcggcattcccgtggtggactttacctcggctattgagcttattcttgatgaaaacggcaatgccgcaggtgcagtgcttatgaatatggaaacaaaggagcttatggtggcgcgcgccaaaaccgttattattgcaacgggcggggcgggaagaatgcactatcagggctttccgacctctaaccactacggcgctacggcggacggattggtgctggcttaccgtgtaggctcaaagcttttgtatgccgatacattgcagtaccaccccacgggcgcggctttcccgcagcagatcttcggtacgcttgttaccgaaaaggtgcgttccttgggagctaagcttgtaaaccgcgacggcaaggtatttatgcatccgcttgaaacgcgcgatgttgcggcggcttccattataagagaatgctccgaccgcgacgagggcgtggacacaggcagcggcaaggctgtttggcttgataccccgatgattgaaaaaatcggcggcgagggcactattgaaaagagaatacccgctatgatgcgtatgttcgcaagctacggtattgatatccgcaaggagccgatacttgtatacccgacccttcactaccagaacggcggtattgacattaatgttacaggtatgagcacctgcgttgaaaatctgtatgttgcgggcgaggctgtcggcggaatacacggcagaaaccgccttatgggcaactctctgcttgatataattgtattcggcagaaccgccggcaaaaacgcggcagaaaagtcaaagggcgttaaggtgggcaagttgacccttgaacacattaacaaatttgacgccgagcgtgaggcggcaggcattaagaccgacgccgtatcgccgaagctgttgcccgattacagaagacaaaaataatataaaaacacaatatccgaaccccgaaaggggctcggattattaaggggtttaaagatgattgttgatttacttgaagcactgacaatattctgtttcggtctttcgtggccgatttccatccgcaaatcgtggatttcgcgcaccgcgaagggcaaaagcctgttttttgaaatttttctgcttataggctatgcctgcggaataacaaaaaaaataatagaggctgcgggctttttcggaattgcaccgaaatcaggctttatatttgtcctcagctttttcttctatgtgcttaactttattgagatttcaatagatgtggcgctctatttcagaaacaaaaagctggatgaaattgccgacagagctgctgcggaacgataaaacaccgcaggataatgcgcgctctttgatacacacttggggtgcgcattatccgaaaagcagcggcttattataaagcggctttcgcggctgccgatgaaatttcaaaaaatcgaaatttgtacttgacattgcgcggactttgtcgtataataatcaagtcgctgatatagcttcatgctgctatggctcagatggtagagcgcgtccttggtaaggacgaggtcaccggttcaattccggttagcagctccagagaaaaagcactccatacggagtgcttttttctttggcatttgattttagaggttaaatctacgagcctgcgagccgcaaagcggacgcagggcgccgagcacgaccgccgcctgtggcggaagaaggaagtgcgcaggtggtgtcacaacaaggtgaaatgagccaccgtaagtgtggcgaaattgagccgctgttgtaaacggacgtaggttcgagccctacagtaggcgccatgaaagcatgaagaaaaagatgcatgccgtgaaaccccgataaattcggggttttttgcgttttttggaaagattttttaatgatagttttatagatgcaaacggcactttttcagcattttttcgactcgaacctacgaaagcccttttaccgacattttttcacgaattatatatgtttttataatccgaccgatagaactaaaaaatctatcggtcttttttatttttcgggctgtgcctattttaaggcgcagccttttaatatatatgaaaaaagaaagagaggatcaaaatgaaaaaatgtaccgacttaaattcagtaaaagaggttgcaaggtgtcttttgtataccgatgttcacaaggttgaaaattattcgtttatagttaaacacccgtttacggattatgcatttgcaaccatagtaaaaaatccggacaaggttacggataatgcggtaataaatattcttgaaagtgaaagcaaccttaaccgctggcgtgaatatgtagccgaacggattgattcggctgagagtacagatgaaatatattgccgcataacaaaaccgtataggctgacatttatgaaatatgcagggcaatatctttcggaaaaggattttgccgaaatgctgtgctcggcttggattacttccgaaaatcccaacaacgatgctaatgtaagtcaatcggagttgctgcggatgttcaggagcgcagataaatcgttgcttatgacagccgaggaaagaaaacggctggacgaacttgacgacccggttacggtataccgaggggtgacgccgtataacgcgaaatccgtaaaggcaatgtcttggacattggattacgaaaaggctttgtggtttgcaaaacgctttgactcggacggaacggtatataccgcagaaatagaaaaatcacatatacttgcgttatttgacggcagagatgaatcggaaatagttgttgaaccctcatatcttttaaatattgaagaatatgaggaagaaaatatcggatttttattgacataacaggaggtaaaaatatgttacaaaaggaattgattaaacggctcaaaggcaagtatgaaaccaagatggatgacaaaggatggctgaatttctcctcggacggtattctgctttgcaaggtgaaatataacggcaactgcattataaacgacgctgaaaatctgccggatgaataccgtgaaaaaattgcgggtatacaggatgaggtgctgacggttc

SEQ ID NO: 2228 - DNA, 32759 bp, Unknown
  16S sequences of unknown bacteria
gcttttttatccacccccagtactactgggggttttgttaagctaaagcagccaagcaataccgccccgaacgaaacgagttcggggcggtattttcaccttatttcagctacatttcaacacggcgcggaaaaatttatatcccatcagcatcgtcctgccctgcagcttaaacggcatccaatccacaataacgggatatgtgttatacttcagataacgatacagctttttgtctctcgatttaatatattcccaaacctctttcaatgctctttttcgttttgtcggattatccttgccgcccgtcgtaaacatcagcgtcatgatcaccccaaggtcgtgcagcatatatctctttaagcccttcgcgaagctcttgatttcctcgtagctatacgcggccgccatttctttcatgacgcggatctgctgttcgtaacgcctcacgatattctcccgactcaccgactgatcctcgcgcccgataaaataacgataaaggtctatatccagataatacagctttttcatatacggcagcggtttatacgcgaaaatattatccacataaaaagtatgctcgggcagaaccgtgttgctctcgcgcagtttttccgtcttatagatcaaggaatgcatcaacaataccgaggaggtgtgaaactttttcaccttctcccagccgaataatttatttaccgggaaattcttcgtgaaccttctcacatacctgctgccctcatataccttttcatagacgaaattggtcaggtacagatcgggcaaggcgttttccgtcctatgcttttttatcgtttccagcagcgttttaagcgcggtctcgtccagccagtcgtccgaatccaccaccttatagtagagtcccgaggcaagctccaggcccttattcacgcccgagccgtgtccgccgttctctttatgcaccgccttgacgatcgagggataacgccgcacgtagtcctccgcaatctcgcgcgtattgtcgtgggagccgtcgttcaccacgatgatttccacgtcctctccgccctttaataaactctctatgcatttcttcatatattcttccgaattataacagggaactgcaaaactcatcagtttcatattattacccgtctttttgccgttttaattttgtttttcttcttttgtttgcttatcttcctttttgggctcgccctcggggaacacgattttgaaaatggggaagaagatgaccatggaaatcccgcccacaactacggtattgatgacctgatacagcgcggtcggtaagtgctccgccgccagcggcagccaaaggctgttcagcgccgtcgtcgcaaacgtaatcaatacccacgcgataaaataccacataatctgaaagggaatctttcctttagatttataggtgatattcctttgcaaagggaaattgatacactgcgccagaaacgagccgatccaaaaagaaatcgtatatcccaggcctccgccgatgatcacttctcccgccgcgttatacgccggcgcaaacccgatgatcgtccatttcgcgccccacggcagctctatccccggccatatccattcgatctttgccattcccagcccgaacgcatacggcaaaaaggtatataccaggtattggaatatcgtcacgccgttggagaaaacaaagaatttgataaactgccagatgagcttgctgcccttggggtgccgttcggaaaatctgctccaccacgccttgaactttgcaataaatccgtttttcggcgtttcggcgatggcaggggcggtttcgggaagtgtttgcatacctgcccccgccgtttccgtaatcgccgattcctttttttcttcttcgttcatgcttttgcctcctttttcttctttcccttcgtcaggaatttgcccagccccttaaacagatgtccgttgaacatttccagcatgccttccatctgccgccgcgacattccgccgaactttgcaagcccgcgcacgggctgatgatatacgcccatcataatcgtgtttgccgccgaacggttgcccgttttccagaggaacgcatgggcaaaccgtattgcgcccgaaaacaggcgccctacccaacgtttggaataccgcaggtcggccacggtgcagttttcgtctatcaccattcggttctttttataaaaccgatagcccgcttccggaagtttgcggcccagcagccgttcaaattccttttcaccgacgtcggccgtttttcccgcataataggaaggcagcagctcctccacataaggcgtcgtctccgtcgttcccgtcttatgtatttcgccgtgcagacggatatcctccgacgacgcgcctatgcttacctcgtacctgcccccttcctcttcccatgcgttggtctttacattataataacggaaggtgcgtttgctcaacctctttagaacaccttttgagcctattttcatcatatttcaatgtaaacaagcgtatttcgagtgcctttgaactttgggttaaggccttttttctttaatccctgaaaactgtattcgtctattttcgtcatagtcgtaaaaagtaaatattccccacaaaaatgggggctttaagaatcgtcctaaagggcgtgaataccggcgaggtgcttaagcaccactcaagactgcctaccgcattggggcaagccgattatttctttttcgggatatccctcttttctttatttgatttcagacatttctcaaacgggtcgtaatattctaccatactgatttgggctgaaatcaaatcctctttctcttggttttggatatacttttgtacggcttgcttgttattccctaccgtgcttacgtaatatccccggctccaaacatgtcggtttcctaacttatatttcatatgagcataccgctcgaaaattatcatggtactccttcctttgaggtaccccatgaacgatgatactttttcattcggcggtatgcgtggcccaaagcctcacatatagtttagcgcaaaggagcttttttgtatagtgcacgaatgcatgaagctaaagctttccaccaccggcatagccggtggattttacaaggcagggactttttggcccctgccttgttctccataaaaaaagatttttttagaatttttcagtgcgtatcgaaccagcacagtctatttctatttttaatattaaatcatcttgcaatctctttatcagccatataaattataatatataaacagacgactttgtaagatgaacgctgatacacaaagaaattcagaaactgttcttttccttttttcggtttctattttgaacttttttgtttttaacgtctatataaaaacggaaagataaatcgctgaaaacctttatttataaaggataaaagaaaacacctattgccgtctaaacctcgtgggttcgaatttcaataggtgtttcaatcaccgtccgcgacgtttcacggtaaaacaacggcaatttttcctgggcttggagattggggacactattttttcgatattagaaacgaagataggcgaaaaaatacgttttaatatcgataattcaatttttaatctacaaacaatggggggggataaaaggcttcctttttttattgtcctaaaaattgtaaatgagcattagacgtgcgcttatcttgaaacaagaaatttctgtgctgctaacatctttcctgtatgcgacgcacccgccctcaaaactatcattcgcctaaaagcgtgcatatataaggttcgcccgattcttttcagtccttagtctctaacttcaaaggatagtcgttgagatgctccattttgaaaccattctttttataagcttcgtaatcgaaagcttccagctcgtctatcgccagcttatgaaattcgtaaaaattatgccaccattcgtaaccgctgccgagctccgcgttcaggtatgcgtccgcaatatcgcagcccatctgcggcgccacgtaaaacgcacccatcgcgagaacgtttactccgttgcccgtgatcgcgcgcagcgccgcgggaacgctctctaccacccccgcgtgaacgtgcggacatttacttgccgcgatatggattcccattcctgttccgcagaagatgagcgcgcgttcaaattcgccctccgaaattttacttcccactctaagccccacgcggtggaacatattttccgtatcgtcgggatcgctttcggctgtaacgccgagatcggtgattttccagccctttgccttcaaatgcgccaccaccgcttctttcagcggataccccgcgaaatccgcgcctaccaccagatacttgtcctttaccgtcttcatttttccttatctcctgatacaataaatttaaccgaaaaaagtgcgggatgtgaattagcacttttcaagttccgttacccttttgttattcatctgcgcgctcgggaagtttgacatccaggcgcgcttcctccgatttttcccgtttttctcgcaatgcggataaatttttatccgaaagaacgaggtctttgagacacacttttacgggatcctccgcgcggaacaaaaattccgcttccacaatattttttcgaaattcccttgaaaattttgcgggagcagagtcctccgccatccccgaagtcaaacggacggcatacggtgaaaactcctcgtccaaaggcagaaaatccgtcgtctcctccccgttcatgaggtcgaaacgggataccagtccgtccgccgtgcgaaagcatactccgtaaaaatccaccttgccctccgctttgagttcaaaattccaaaaattataatctgcgatatggtttttatgccccgaaagacaaattgcgggagaagtgccgaaaaaaaagtattcttctgcggtcggagcggcggaaaaagcaacacagtcctcttcacccgaaacgagggtgggcgcaccgtcgtatattcccccgtttttccaaaccgccgctttcctgcaagaacccgcttgccagccgaaacagttttcgtataccttcaaagcgccattcaccgtatacgcaggagggaaacaataattttcgttcaccggttcgattttgctccgatagggaagcagcggcgctccgtccgcactcttcgcgttgcagaaatcctggtattgcatgaatgcgtaggtcagattttttggctcttccacgtcgggacaggtgacagttattttccgctcccccgtgatgcgcgccttcgcgggataatattttccgttttctcccgcgagcgtaaagccctctatgtctcccccatttaagggtgcgacgctctccacaaaacagaccgccccgcccttccgataatccacccttgcgatttggggatattttcttctctttcccgccaaagcgagggcaaaacgctcggaaacaggcgctttatttaccgggtgaatgggatgaaaatatttatctccgtccgctttcaaccacctgggttccacgtcgtatatgggcaaaaccgtcgcgccgttcttctccaaaagggaaagggcctcgttgatatagagatacccgaatccgtcgccgtaatggtaaaactcgggcgcgatatgcgccgcgacaaagggaatctctccgaaagcctttttgaactcccgcatgacgagaagcatttccctgtgaaagaactgtccgaactcaaagtcgaaagcggagctttctccgagataccacaatattcccttgaactctattccgacgagaggggctatcttttcgttccatacacccgaaagctgcgtgaaattccgtccccccgaagtgttataattttcggtagtcgcatacctgccgactcgttttagaaattcgacgagttcgttatcctcctccacgattccgccgggaatataggcttctacgctcaaaccgcccatggaggtatccacgaagccgacgggaattctttccgattcggataaaagcgtagccgtctgcacgcaaatggcggaaatatttttaagcctctcttccccgctcccgacccagtcgtaatcgagcgccaactcctcttgcggaagagcgggacgaagaaacgacagctgtgttccctcaggaacgggcttttcttccaatttcaaaagggaaatacggcagtctttcgtccttttcagccatttttcgtaatcctccgtcgcggagagacaatagttcatattggactgaccgagtgctaaatatacatccccgaatcggagtcgagctgagatccttttcccgctgcattcagcgaaaaggaggaattcgctctccgtatcctccacagggggaaagaagacggaaaatttgcccgcttcggaagagaccgttcgcctttctttgtattttccgccgataagggaacaggtcacctcgccgtccgctctgcccctcactaaaacgggacggtagcgctgcacgatcgctccatccttgaaatatccgaaaaatttcatcttttttgccccatatatttatctaaaacataacaggcgaccgcagaccagccgtggcaaagactgcccgcgtccgcgaagtccgcttctcccaacgctgtttcccagtacgaggtggcacccgcaaagagcattttaccgaaggtttcgcatacgtcctctatacaccagtccacatccccttccgccttaactattccgtcgtatttaagctggaacgcggcaaaagtcatgggaacgacctttccttcgggattcttgagaatttcggaaagcgttttctgccgctctttagacatattttcgcacgccagaagagctgccgcctgcgtataggcgtggtaacctctcctttcccctttatctatgtaagaagcgtacagtcccttttccgcgtcgaaaaagttttccaagctctcttccaggctcttcgcataaaactccgcctccttcgccttttctgcattcccaaacttttcttcgagcgccgcgaattttttcgccgcaatagcgacaacggaggtcaggatacagtcggacgccgccgagattttttccgtgcgattgaaatccccgccgtccaagccttccgaccattcgtgaaaattccaatactcgggttctgcgaacagggatacacccttttcgtcgctcctcttctcaaacgctttcaacgctttttccgccttgggaaggatctcctcgacaaacgttccgtcataatccgcttcagcgttttcgcagacggcgagaatccagtaagcggtaaaagaaggaatagtcatgcgcccgcgcgcgggcgcacacaaaacgatgagcccgtcatctcgctgcgtatccgcaaacaggcgaagggatgccctgggatattcgtattcctcgaaagctccgtaaccgaaaagcatctggtttctcgaatccatgccgtagagtgcctgttctctccaagggcagtcttcgtaatgctcgtgcgcgcaaagctccaaggtgcggcgccccatctcataaatcttatcgagtagtctgtctccgaattttttcttttcctttttgaaaggatagaccgcctcccgtaccgtcagacggtttaacgtaaacgctcccccttccacgtataatccgagatatctgcaccccacgcggcaaagatattcgtccaaggagttttcccccgcctttaaggcgagttcggaggcaaaattccgtccttccaccgaagagcggattctcaaatcggagaggtgttccccccagcacagaatggcagaacagggcttttccaccgtcagggaaaaggagagatacccgctggtctccccgctcaaatccgctacgacgaagagcccgtccccgccgcttaaatcagcggaaaaaccgagcggtttatcgacaacggcattccccaccctgtatcggcccgtcatatcggcaaaacggagagtggacagccaggcgttctgcgctctctccgccgccgtctccccgccgcggtatctgaaaattccctgtgcgacgatttcggaaggaaggggttcggacaaggagagtttacggacagggcgttctgccagcgtaaatccccccacggcgggacggcattttttccactccccgccccgaatcgtaaaatcgtatttccagccccagccgagctgcggggtaatcctatctcccaaaaggtagttcgccgcaaccctgcccaaggtattttcgctcgatgcggcgaggacgacaccccttgaaagcacctcaaaaacgagatacgcgtccatagcgcgggcgatagaaaaatcctctaaggtgtgcatggcaacgatatataattcgttttccccctttcgcacaaaggaggagacgtcaatttcgtctatccgtttcttttcgggaatatccgcatactgtccgttggagacgaacacgccgttgataaacgctgcatagcgaaaagcggcgcttatccgaacaaccgcgccgccgccagcatagttaaagctctgtttgaattcggcaaagccgcacgtttcgctctctgtccaaatgcctttcatacctctttcacacctctttcatacctctttttatcgtcctgagcggaggcgtaaatgcccgtcttttcgcaagccactatgccatccgttatcatgtttacgtaaaagccgtccgcatacggctgaaaacgaagttcccgttcgttgaaaaacacttttctccttttgtccgcttccgcgatctcctcttcgcttctcccctcaatcttcaatacgagaacctcgacgagattcaagacgttttccgccataaagcggagtatctccatgctctccacgaatacgggcgccgctccttccgtgctcgggaattttttcaaaagcaccgtcaaaaaggcagtcccttccttgaataagggaagcgcctccgatgcggaaatctcctccttcatgtatgcgaaactcaccgttcgttctatttctccgtgcgctttagctgcgaagtccttaaagggaccgaacgcggaggcgtaatagtcctcacgtatttcttcaaagctcgcttttccgtccgtcaaagccctgcccatgagataaaaggcaaagccgctgggatagaacgcgcgctggatctgacagctcaaaaaaccgttcagacctatctttttcaaggaacgaatatcctcgaagagaactttggctatcgtctctccgccgaagtcgcggttgatgtcccacatcaagtgataatcgaagtcgaatccgtcaccgcggaatgcctttttccacccctccaaaaacgcgaggtattccgccgcgtccgaagggtaagtcatcttatttttctcataaggcatgggaggacgcgttttccagttccccgtcacatcgaaaggaagtgtatagctcctgaaaataggcgcgaacatcaaaagaaacctgtcggggttgcgtatttgctctgtcagcggcgcccaatacaactccatatagacgagaaaaactatcttcacgccgagaccggattcggtcaaaagttcatctatctcgttcaagatcatcacgtaccagtcggacaggcgttttttcgagcatgcctcgcactcgcagacgttgttgaaatcgtccgccagccagaaatgcaggacatccgtgtccggatgggtctttgcgtaatcgaccacttctttcgccagcatatgccgcgccaagggattggagtagcaaaggtgggtgttgaggggtttgcccttgaaaaactcccgtttgccgttcacttcggctatcagcgcgcgcttttcctttgaaagaatttcgtcgcacgtattccagccgttgcagtctatccccagacacgcggacgtccagccatgccccaccgaatgatagagcatggaacgcttcttgatttcccttacgatacgttctatgtatcctttcgccttctccccgcttatcttttcgggcgggaggagcggattgccgatatgctcataccaacggctgaaaaattcgaacgaggtggtgaactgggtgaaatagctgttaaatcctgccttgggcgcccagtcaataagttctaaaacattctcgacgctgacggcgccctctatagtgatgccgcggtgcctctccgcaggctcgaaaacgcaggagacggtcacttcggaaagttttctgcaagggatatattcccccttttcgcccgggcgcacgaatcggcaaccgcaggatttcaaaaactcgtacacgcccaaaagaagggctcggggacagtttgccgatatgcttccccgtccctcttttacggatatttccgagcgctcgcggaaaaggtctccgtcttcgcccgcaaacagggaaattttcccttcctcgcccgtcatcttcaaaagatatttattcagttcgctctttgcaaattcaagcgtttcaagtttcatcattttataaaagtccgtcaaaaaccgctaatatgcccgcattgatcgtgcccatgatcgtagcatcagaaccgagttccgaaaatactacgggacaattttttgcatacttggatatatatttcaaatattcctttccgagccccgtcaccgagccgatgaggataacggtgtccaagtccaaaaattcggacatggaggaggcgaaagtgccgatgacgcgtgcagccgagtgtatcgcccgcacgaccaaagcgtcctttaagcgatacgccttcaaaagttcgtctatcgtcacatcgtcccaggaacgtccggacgcttccagccaatctttgagcaccgtctccgtgccgagggaaatttccctcttaacgatagaaaggacgctgaacagagaggtggagtcataataatttccgtagtttaagttgccgtaattattttcgtcggaaaggagcatattcaatttgaaatagcctatttcccccgcgaaaccgtgagagccctcgtacaccttcccgtcgatgaggagcgccgcgcccatacccacgtccacgtgcaacattaaagcgttctgaacgtttttcaagactcctccgtacattttttctcccagaagagcgagatttatgtcattttttatcacgaccttgcaaccgaacgcctcctcgaataccgcttgcagggaaatgttccctatttcgcggaagcgggggttcagaataaattttccgctttttttgtctatctttccgggcgaggctaccgctatacaacggagtgttctccctttgagttcctcccgtttcgtgagcgcctctacggcggcgactatcttttctatgtccccttttttgaaagtaatgtcgtcgatggtcgccgtcgtaagaatgttgctcccaaaatccgcagcactcaaaattatctgccagcgcgagagatccactgccacgacgtagccgtagtccgcgttaatagagaggtttatcccgcccctgcccttggaatcgctttcgcggtagaccacgttttccgaaatgaggtcgtccacgatgttagctatcgccgtgttgctgagtttgagctcccgcgcgagatccgaatagctttgcgtctttttgcgcagaagttcaatgatactgttcttattttttcttcttaaatacgattgatttcttacctgcatacgacttcccgctctctcctctatttattgtatcgtccttttatcgaattgtcgatcaaaaaagggctttttttcgttttcgtcaagatatttgcgggaaagcaaaccgctttatctcttccgcttcgacaccgccgccgcgattatccccgccagcgcaagggaaccgaaagccgccgtactgccgcaacctttttcgtcgttatccgtactttcggacgaggaggcggcaaccgtatagacgacttcggcggaaaggtcgctgtccagtgcttcaaaggtatcctctgatacagccttaacctgcactttgtgctcgcctgcggaaagcgtattctcaaactcgtatttcgtcttatttgaagtcttgaccacttctccgtcgatatacacagtatagaggttagcgcccgctattctgtcccactttatcgactttccgtcctcacccaaggcaacgacgggggaaggcagcttttcgatgacgggcggcagctcggtatccgcgatgtttacataaaaatcatccaccaaaatatccgctgtacagcagttcaagctcaaaaatccgaaataatcgaacgtttttacgtcaaaggtacaatcggcgacgagaaaatcgtccaaatacattttgtacgtattgccgttgacttccagcttataatccacccagggcatatcctccccgctcgccgaggagggcaccttataggaagcgtcctcaaacctaagcgcatccccgaacatgctctgcatggaagcgtccccaaaatcgtttgtcgcgcctccgttgaatacggcataagtatgcggcgttatctcggtatttttcgtatacctctgcacggtaaaaagaagattattcgtccccacgtagtgtgcggtcgccttcttgcggaaggagattcccgcccagccgcgctcgcctgcgttcttcgtcataaatttaaggcgaaatcccgcggtgaaatttttcgtgcggtaatcccctgcgggaccgatatggaagtaggagtccattcccaccgaagcgttgtcgaggtggagcactttattgcccgattcgccgttttcgtactctattttacctattcctttaaggtgggcgtctatgccctgttcctcgccgcccgcaaggacgttgttcgtccaattttttgcaaactcctcgttctcttcaatgaatttcccatccgcttcgtaggaatcgaagttgtcggaaaaatcaggaagaacggagttctccgccgccgcgcgcggcgcggcaaagggtgccgtcagtatgcacgctaccaaagcggcggcgacaaaacaaagctttcctttcatttctttctcctttaacccaaaaccaccagcatcccttcgcctgctcccaaatcgaaggagaccgatgaggcggaaaattccttcttctcctctccgttcagggtatagcccgaaatgctcccctcaaaattcagtttgacggtatccgccgccgtgcagccgactatcgtatcgtccgctattgcgttattgacgacgtacagcgccgtttttccgttatagtcgaagcaaccgatgagcgcgtgattggcttctgcggagaggagttccttatacgaatccaccaaatcctcctcgggtatggtcatacgcgcctcgccgcggttaagctggggcatcacgcccgcgaggagcaacccctcgctcttcgagcacatgagtacctcgtccacggcggagatcatcttgcccgccgacttgacaatgtcatacatctccgtcttattcccctcgcggtcaaatatggagcccgtgaagttgcccatcggattaacaccgcagaaatactgtatgcccttggcgccgtaagcaaggcaggtatttacgttccagagaagttccgcttccgaaggcaggcgctgtcccgtatagaaagagcaggtctgaataaaggtccaaaaaggtatattcgcttccagcgctgtagcgcggatgacggacatattctcgaaatagccgttggaaagttccggaaacgctctgtctatgggataaaagtcgtaggagagtacctgaggattataaatttccataaaatcatccaggtactgctcgtaggtatatgtcttttcgagcggggttccgtcgtcattcctataccagagttgtctctgcgtggcgtaggtagggaaaaggttgacgtggtagagcttatcccccgcctcctcgagcacttcctcgaacacgccgcgggcggtggaaagattttcgaactgtaccctgcccggctcgtcgtagagcataattccgccgaagctgtcgtgatacatgacctgagcaagggtgctcctgacgctgctcgcgtctttgacctcacccgcgcccgcataggcgatgagataggaaagaccatagtcgtaacaatagtcgagcgccgtctgcacgtccttttgattgagcccgatataatcggttaagcccatcatggtgttgacgcccgcttccgcatacgccttaaaaatcttctcgtccgtgaggaaatttttattgtagccatccttggcgggcggaatggaattataagcgcccacaggcatggtcttatagtcgtgcgtgggaaaccatcgggagccgtaagtggaaaaatcgacggtttcgggcccgacggggctcacgggcgaggaggaagaactcccgccatgggaagccgacgagtccgacccgacgttttccgcaggcgcgccgcaggccgcggctgaaagcatgaacagcaagacaagaaacgccgtcgccgtttttcgcattattttttgcattgtattatccccttttaattttttcagcccttgatgccgccgaccgtggtgttgttcatgatcgtcttctggaaaaggctgaacacgataagcacgggaatcatggagaatatcatcgcagcaaacacctgcggtaggttgttcttattctgatcggctatcatctgcaagccataagcgatggtcgccttttcgggcagatacatatagacggtgaaatagtcgttccagtacccgatggcggagagtatgcccaaggatacaagcacgggcaccgccatggggatcatgattgtaaaatatatcctgaaatgccccgcgccgtctatctgcgcggcttccgcatacgtccaggacaagtttttataaaaaccgtacatgatgaggaagtaagagccgaatcccccgcaagcgaagataaaataccccgtgtacgtattaataagccctatcgcgttatacattttataggtggaagccatggatcccatggtggggatcatcatgacgatgaccgcaaacgaatagaaaacatccctgcccggaaactcgtacttggtaatcacataggcggtcgccgagcaggacatcagggaaagaaaagtcgcacccaaagtcatgaacaggctgttgaaatacatcatatgcaggggcacgcggtccgcagacagcgaaaaacttttcacccagttttctatcgtccatatttcgggcaagccgtttatgttacgaaaaaattcctttctcgtcttgaaagagttcatcaaacaccagaaaaagggaaagagcagggataaggcatagagcgcgaaaaccgcgaacaccacccacattactatcgtatctgtttttgtcctgtgcaccttgttcgttctcattgataacctcgaaaaatctttttccggggaaagggaaaagttttccctttccccggtcaagccgttttaaatcagtcctttttgctcttcttcaagacaagcgccgcgcccatacccgcaaggagcagggaaatcgcaccgatgcccgcaaccgagccgcaaccgctttcgtccgtatctgcgggatcggaagtatccgatttcgaagaatcggactccgaagtatcgggcccgggggtagaagcggtaacggtatagtccgcagtcgccctcgaagcgagtttttcggcagtattttcgggaacggcttccacggttactttatacgtgccttccaccgtcaaggaggaaaggtctatctccgtcgtcgtcacgttcttttcgagaacagtctccgtgccgagttttactgtcacgttatagctctccgcgccttcgaccgcgttccaagtaaccttcttcgccgttgcgtccgtcttcaaaacgggctttgcgaggggagtaggcatagggtcgtttgccatattttcgggagcgacgtccaccacgaaatccgcggtaagcggttttccggaagccgcaaattcaagcgttgcctcgcgggaaacgggagtcaccgcgaaattgtctatttcgaaataagcgggggagtcggaaccgatgccgagatagccggacgtatccaccgcgtcgaaggctgctatccggacatactcgcccttgactttgcccgtggcagtatccacttcgccgaagtagagctccactttgttgttcacacagacgagtttgatcctcgtggtcttgttatacaggctatacacggtcccttccgcgtcgggatcgtagtcgtaccatgcgtccacattgttatcgggcttggaggggtcgtatccgccgccgttcgcatagtggggaatggaggcagccgtaggcgtatccacctgcttgttcttggatatacccttggtctcaaagccgcaggtttccgtcatgcccatgcccgcgataacagtctcgttattgccgtaaaattcgattgcggcgagtccctcgtagagaccgaaggcatagacgctggagtcggtgaggggaagcccgccctccttcatgccgaacatgatatatgcggcggaaggtctgttcccgggaaggacgagcgcgcccctctgctgtacgggaacggagatataatcgaactgcatcacaaagtcggaatacatcttggtggtgagaatgcgggagtttgtagaggtgccgtagaacccaatcttgccgttttccgcggtgatgcccgtaagcgcgtgcgccgtcttatccgtggcgatcatatgattttcgggcgcgatctgggaagaaatctggaatttatccgtgctgatatatcctcctgtaaagttgctggaaatcgcttccgcaccctcctcgttatccttgaactggtaacccgtcatggtgacattttcttccagcttatagatcagatctccttcgcccttgtgcaggatggcgaagtatccgtcgggatcgaagtcttccagttttatcttttcgttggtaccgacgacgatttccatatcggcgcctttgcccgtaaaggtaacggggatagcagccgccttttcgccgatcttcgcgcccgcgacctccgtttccgcaaagagcggcgtcgtttttccgtcgccgtccgtccgctcgccgccgaacatcaccttaccctctttttcggtaaagtagaaataatcgtgcgcgcccgaaagggagcggttagcttcatatccgaacgcaaatcccactttctgccccgcagaaacgtcttggagaagtactttcgcattcgtttcgaggttgaccgcaaggtccttatccgtctgcaactcggctctcgtgataatgccggaaccttcggcgggattggtaacggtaagtccgcccgcgcctatcggataatattccatgccgcgtgccatgaacttgcccgcttccgcctgaccgtccgccgctgtgaccactttagaggaatcgttcatgttcgtctcgaacacgacgtccgtcttggtctcttcgttctccgtataggaggcttcgagtttcacgttgtccaaaatcattccgtcggagtaacgggtccatacgttagtgtagaaatccttcgtgccgtcgtagggcgcccagttggtaatggtggcgccaggcgcccagcgctgccactcgtcaaaatagcccgcggcgaccataacgtccacccatcctgcatcgttgaccgtcatctctatcttgaaatcggtcatgccgtaggcggcgatgttatttttgaaggtgccgcagctccaggaatatgcctgccactgctgaggtatatcgaacaccgcgtcgccgccgtggtgagcaataagcttagagacggggtccgagtcttttgcttccgttctatcggagggaacgacggcaatgccgttgtccgagccggtaagtacgtagccgtaagtatgggactccgttaaagaacccgcgccggggacgattttcagctgggcgttattcccttgcaagcctatcatcctgaaagtcaaagttaccttcgcgccctctttcgccatgatctccttggggacgggggaaccgaccagcatttcctgccattcgccctcgttatattcgatcacgtagtcgttggactttcctgcgacataggcgtccgcgtcccccgcctcagtctcgacgatcttgaagttggtgaggttgagttcgctcttggaggtaatcaacccgtcgcccgcaggcctgctttccacggttcccgcactggcgataatcgcgcccgtacccaaagatccggcaagaagcgctgccgtgaacaaagtcacaatttttttgtttctcatcttatttctcctttacgggctcccgcccgttattttttatagagtcaatactcatagacggggaaggctttatccagcgccttcctcgttataagcactatcggagtgcctataagcgcgcacaatacgcctatcgtcgcgcccatcgacatctgcggcgtgccgttgtcgcggacgttgttgacgatgtagagggctatcgtgaatcctttcgcgttggcggcggcgtcaccgagaagcagtttgggctgtaaaaaataactgaaaattaccgccgtacccatgagcaggagggtggcgagcgtggacccgataaggggtatgaccacatgccagagttctcccatcagtccgagtccgtccagttttcccgcctcctgcacctcggcgggaatcctcgccatcgcgcccgacatgagcacgatgtttccccctatacccgaccataagccgtagaagagtatcgtccaccatgccgtcttgggggaaccgaaaaatccctcgaaaggaataaggtcaaaaattcccatcttcatgaacaggtcgggaagaaagctgttcagcatatatgaaaaggacagcgtaagaacggtgacggatatgatggagggcaggaaaaagacgaccttgtaaaaattgttcaggggcatctttttatacagcatatacgcgcagaaaagagagattggcaaaatgacgaaatcgttccataaaaagaccgagaacgaattgactatcgcgcggggaagcacgctgcccggcttgttgaactccgtccacagcgccctgtaattagcgagccccgcccactcccacatgccttccatcatgttgaatttcttgaaggaaaggagaatggaatctatgttaataaacagccaaaacacgcaaaagtgcaggacgggtatcgccatcaaagtgaccatgaacacgatttcgttcacgctctttttttttcgttttcccttaaaaagaatcttcgtttgctccatagtcattccttaaaacgttcagattaacgtatcccaagaatctctgacgcccgcgtattcggaagcacaccagctgtcggcggtcacgcccggataattgacgatgagattggtataagggtcgcccgcgttgaatttacggattttcagccccgtccacagcggactcctcgaatcttcgaaccaggtgacggaattcttccagatgtctatgcacgactgctggaaggcgttgaattcaattccctcgacactgtaatcgaaaggcagaggagtgcccgaaacttccgtgagcatgcgaagcatatcgtcgcggcaggaataggcgaggaaagctttcgcgccctctttgtttcccgcctgcttgggaatagccgcaaagctgggctgaccgctgtaattgtaagtgacgggtttaccgtcctcgcccgtcagggcatcgtccatgagaggaatgggcatcatgcggatttcatcctcaatgtcctcgcccgattcgttctgaatccagcttccgttgggaatcatcgcagccatgcccgcgccgaacgcctgctgcgcctgatagtgatcgtaggagccagacattttcgcgatatactttgtcttattctttacaatgatatcctcgaaagtttgaagcatggtcagcttgccgtaggagggactgtctaaaagatcggcattgaatacgtcagagctttcaaatttcatgaattcgttcattttcttttcgcccgtaacttggagccaccagttggtgccgatgaaatcccagtaaccgccgctcaccttgccagggtacacgaagggtgccaccgaccctttcgtatcggagacgatggtctcgcacagtgttttcagctcggaaaccgtctcgggcactttccagccgaactcgtcgaacatagtcttattatacacgatccccgttaccgacgtaaactgggggaaaatataatatcccagttctttcccgttatatgcctgcccgtaggtcttccaagtgcccgttatcttatctcctatcttttcatcctccccgggaacgactgtatcgtacagcccgtcaagattttccagctggtcgagagcggcatagctctgccagggagaagcgagaaggtaataaatatcgtccaaattgctgcccgcttccagcttggaactcatcgcggtggtcgcctgcggatcgatggtgaggacgatatagtaatccttcccctcttccgcttgcaggaaggaagcggaaagggaacgtatccactcattgccgttaccctcagagtaggttattttaacgggcgttttcccctctttggaaccgaggtacatttccccgctcttggcgtcgaacgttacgtcgccgtagtcgccgcccgaagaatcgccgccgtggggagtccgctcaccgcaagcagccatgacgcccgcgccgaaaatgcttacagccgaaaggcacacagccaaaagttttttaagtttcattctattttcctccaattataaattttattagtagggaatgacgaagcagccctcgccgcttttgagttccagcgtcagtttgccttttttgagagattgaacgctcttttcgccgttgagaatgattatcgcgtcctttactccctcaaaggataacgtcaccgtattgttcagttttcttccggggtcggtaaagttgactaccatgcatccctctcttccgtccttatcatcgaacatgccgacaagcacgtcctccgtcccctctacctttttcaggttttttccgctctccatgcgctcgatgagcttgaagttgccttcgccgccattttcgctggacgtcataactcctttccaggtgaaattcttataccagggcatcagagactgaatatagccgttcgccgtctttacgtaatcgaaagcgggagttttctgataattcctgtcgaggagcgcgtcgtttccgaaataactggctccatcatagggaggcggacaggcaaagcagaaccactgtatggcgtcgccgccgtaggcgaggaagctgtacgcctggaatgtggcgtctcccacactttcgagagaacggttgctgccgaaggagatactttgaaggaaggtccacatctctctcccttcgccctcttcgttgagcgccttcctgataatttccatattttgaaggaagctgctttcgaggaaatagtcctttccctttttcaaaggatagtggtcgtaactgagatagggggttttgattttttcgagatactgcgctatgtacgtatcgtagttgataggggtgactccgcccaactgcgcgccgcccgcaatgacgggaaagagatttgtatagtagcaaagatcgggcgccgcctggctgaatatcttataggagaaagcgtgctggtcaaattcgtccgcgcccggctcgtctccaataaaacagccgtagaaggcgtctgcatactcgtattcgagataaggcttcaaatagcctttaaccttttcaaccgcctgctcttccgtttcaagccccgattctacaagcgttttcgcctttatcatatagtcgttgagggcaggaatggaaatgatctgcttaatccccacctcgtgagcagctttcagacattttttgttgtacgcttccgtaccccagagcatgtactcgtatcccggataagcgatggtgaagcctgcttccgcaatccactcgtatttttcgaggaactcctcgtccgtgagttgaatttcttttcccgttttctgcccccattcgtcgtattcgactattttgtcggatacgcctacccacatgccaatgtcaaatttctcctcggagctgtacatgggttcgggcgccggtttgcggtcggaatcctctcctcccccgcacgctccagctgaaagcagaaatattcccacaagcatacacgtaacaatttttctcataatacctccatatctgtacatagtttataatatttttttggtcgtgccaaattttttaacttttggctgaacaattgtttttttgtcagttagaaactgacaaaaagagcctaggctctttttattttttcttttccgaaaacaaaatttcgaaaaaaatttgttttacggttttattctatcatacactttgccctttgtcaatacaaaaattaaaaaaagtttaagatttttcagattttttttgagtttaatttctttaatcactatttttagagttataatataaactttattgaaattaaacaatgattcgggcaattgttcccgcttaaatcatacgcagagactccaaggaaatatttattggtttctccttactttttatccctttttgcaaaaaagctcagaggcgagcaaaagcatcggattcctcgcctccgcctcttcgcttccagcatgagcgaacgcattttcggattcgaacgcgcgtatggaatttcattaaaaaggacgatgagctctccgtatccaaaaccgaggaaacgccggacgaaaaatcggaaaggtatttttccgagtctcccgaaacggacgggttcctttatctatctttggactttttccgcgattatatttgactcgatttcatttttcagttcatcaaatcctttttacgcgaatagtaatagcgtatttctcttaaatctttcatgatttcttacccggattaaggaaaatttcagatgtgttaacgcaaatgcacgcagccgatcccgataccgtcattacaagacattttatagaatcgcttattcattcgggacagctcacagctctcaaatacggcgacgcctggctcgtcaatctcgacgaactctatctgctcttatcagcagaaaaacccgatgataccgagattgcagacgatcacgtccccaatgaacggatcatgtggacttccggtgaaatttaccgagcctttttggaaaacgatcctcaaaccatcgtccgcaaacctaatctacgacgctttgttcagcaatacgggattcaccattttattcttaacgataaatggattattgatttccctgctttcgcggcagccgtaaacccgaaagccataaagcaccataggagccaaccgcgattgagagcgcacgacgacgccgttttcgatttcaaacgcctccacccccatctccacgtttctctacaaatgattgaacagcagctttgctctcccgaagtcttttctataaaaaacggcaaccgctggattattaattacgacgaactcgaacttgccaccttaaaggctgtaaacaatcttcccgaagggaaacgccctccccctacttacaagaaaaagactaaagccaaactcgacatcaaacctgtccatattcagcaaaaagacaaaggttactatactctttatttcaaactgacagtaattgaatatatggtaaaacacaatctttcgtataaagaaaccgtaattaaattctggggaatagagagcagaaagaaaatccgcgctcgtatcacccttttaatgaactgggaagccgcttataaaagcggcggcaaacgagccttaatcgagcaacactctcctaaaaaacataattaagcggcttatctttatacaaaacaaacctccatgaatatttctatacatcataaacgttgtattttgcccgattgaaagaatttacactcaaatttacactcttaaaaagaataaaaatttcattattttgcaaatattttatatattcgagagcatatagaacaaaaaaagaacgaattttgaaaaattcgttctttttcatggtgtgtccgccggggctcgaacccggaccgggagcgtcggaggcgcataaccgcatgaaatatataaactttttgaatattttatctgattttatagataatttcttctaaaatgaatattttatgtatattttacactcaaaatagacaaacttttcaaactaaaaatcatcaagagtgtaaatcgagtgtaaattttacactcttgatttctattcgtttttcttttccacataaattttcgctatgtatttttataaaatttctaagtggtcatctattagaactcaccttttgctttttttatttccaaccttaacatttgttccagcaaatatccgttcccgaatccgtgaaattccacgctaacttttctttcgctgctttcattacacatcaaaaaatgcaattcatatttatcctcattctttggaatctctaccgcttccacggttgttatggcaaaaggctttatcttttcggcataaaagtcctcatgttatatatccctcaaaagccagaattcaagccgaattcgttagataggagaagtttccgcataaccgtttctctcttttcatatgatgaatcatggttaaatcatctaaaaatactaattttataaaagggcttcagtcttttctcttgatattctttccttatttccttttgagtatggtcgtttatcacggaacgtacttccaaaattggcttcacgcctcttattctcctccgaacaaatttattttgtttctctcttggagcattctctttgctttgttcgttcttatttttcattccataagacgatcggagaaaaagaatccgctttgtctttttttatttatccttcaatttcttggcttctttgtcctttgtatttctttatcgtgttttgcggcttaccttgtggctctcgtgagtaatattgttacgctgcttatttctgtttggcttatggtcgctttatggaaaaacggtcatagaacgagcgcactcttgctcgtcccttttattgtatatctgttatttcaattattcatctgttttctatggtattcattagcttacggggaatggaaaaattaaggaagatcctcgtaacggttttctatcatatcccgaaacgaattctttatcatacgattccgctctttcttatcgtcagagtttgaagtcacatagtgcggaacgccttgaatcgcagcctgcgttttattataatacagagaatacccgcgcaaaacagtatgctccgaaattgttacagctttgccaaaacaagccgcaaaatcttttactttctcgatctccttacagggaaacagtatccaatatccgtcgccgctcattaagttcttaaaattcgcaatccgttcggcgcttatattttccgcatacttttcggttaacaatatgattttatacagacggctggaatacttttcctcggtcttgttatatgttttctgactttcgataggcgtttttaatacgtttgtgtgtagaaaaaacacaaatgtctcttaggcatatagttgtcttaatataaagatttagttttggctataatattggagtgcggctggtagaacatactcttacttcggggttaaagttactttatcccttttgccattaagacctcaatttattttctacgattattgttaaatctatagacctacaaatagggcttttatacagcatataattatatcaagccaattacaaaaaataaattagtaagagtaaagaaaaccactaaaaaaaagtaaaatgaaataatgacacctatcccaaattgtgaacgcgaacgtacatacccagttgaaaaactatttgtcttttgaaaaatattgttttttcttgcaacgcgactaaaatattcgcccaataaaactccccctatccccgttcctattaatagtaataacacgggtataaaaaaaacaaatccaggattttcgaactttttcggtgtccttccaagaaaaaaagcaagtagggcaataaaaaaggcaattaaaacctttagtatcagtattatttctaatcgtagaaaagaattttccatataccgttccaacggcttattctttctatttctttgaagatcgattttttctacccttacaggaaatcgaattaattctttaatcagcaaaagaaacaacaccaaacaatcaatatataacaatacatcaaaaaatagtttcatagtatattatcattaaatacttttaatcgatattccccatttatctttccaagtcggaatccaacatcctttcacctcaacacctttatcatatttacaagcattatacaatactaatacgccatccactattgaaggcaaaacaatcgaaattgccaacgttataacttttataaatatactggaatttcctgcaatagtcaataatatagataatccattcgccaaaatacttataacaggatctgtaaagagtcctgcaacacccgacgctatatcagaaggaataactaaaagagtttcttgtaaaactgaaactaatgctgcatcgtcctgcataaatatcattgtattacgcatatcccaaccatgaaaaacagttcttaaccctaacgtaacaagcgcaacaacaatagcagcatcgctatccatattcatagttaccttgttccatttcactttaactccccataatgcccactgttgtacatattcatcttcaatatagaaaatcaactcatattcatcattgatgtatccaaatttttcatctaccagctcattcataatagaaatatttcgattaatcattcgcaaggtagcaatctcgaatgccgcttcttccgaataatcagtgatatcaaaatcccaacttaaaaaatccggtccgtataattcttcaaaataccctatatccaatgtcaaatattcataatagtcttcgtcaaaacggatatactctttatatgtttcctcaacataattatcaacgcagtcaatatattcatcagacacatcactattagataaatattcgtcaatttctccatcttgaaatcctgactcatcaagctccaagttgtaaatcgattcgtatatttccccttcggctttcgctcgcattatagaatttgaaaatggatttaaaatacaaatagatgtacacactacaaacaaaaaaaatgctattatctttgtcttcttgcctaataatttttttaacataccttttctcctaatataatatatttaaacacgaaagtgcatagggttaaatttacactttctttgtttccgtaccaagcaataatgtaaaagagcagacattcaggaacttatgattttctcccgaaacaatttatattcaataaattatatctaataaatcaattgaacctatttttctaaattttgtatatacatcaataacatcatattcatttaaagaatctaaatatagtgcgagaattccagaaaatactgcagtagctatacttgaaccgcttttttttgtttctatcctctccttaaaaatattatattttataattctaacatcaactccaggagccaaaacatctacactttcattaaaattacttttattgtataacaaaccattacaatcaattgctgcaacacttaacgtattatctaatagagcgggaaataaaatagaattttttccttgatccccgactgcgcttgttacaacaatgttattatttacagctctcattatcgccgtagtcacattatcatttatattttcacttcctaatgaaagattaattatgttcgctttattttctatcgcaaaatctatagcacgaatcaatgtttccgaattcgttgtccctacttcattaagagcttttattattataaacttgcaggcaggagccactccgtaaaagccattttccccgcttgcgccaataatacttaccatagaagtaccatgtgaagtataatccgttaaatcattattacaatcaaaggcattatatgttgcgataatacgcgtcgtatcaaattcttgtccaagaaaatcgtaatcgattcctgaatcaataatggctattgtaatactttctccttttgttttagcccacatcataggcgcatgaatgtattctaaatgccaatcacaatcctgatgttttatctcttcttgtttattattaaaagtacagccattgcaaaaagcggtaatcagtaatataattaatgttatacatttctcaacacttttcatataaaacaccatttagcgtttaattacccatttttttaataaacatttgcaaacaattaataatcgttgtctaataacgatatactttatttgcatatatattatcacatctttttaactttgtcaacacttaaatcaattttttttaatattaaattaaaaatgaaaagtatatattttccccttaattaacaaggcaaaacacccgatgacaatcctttataatgtttttatcttcagacaattttctaaaacataggtataatcctatatttcacctttcaaatcacttgagaatttcgacaaaaaactttttagttttcgaatagttaaaatcaacattttctgctgtagcctcgtcaaagtccttctttggcatttctaatatgaacattgctttctctcggtctttattcatccacattcttcaacacgccttaattcaaaaatttctcggttcataaacttttcttagagaaggtctatttccgactgtttttcctcttaaaaataccacgtttgaaaatgcacaaaatattctaactatacaaatgagtgttaggcgtgtgcttgttgtgacacaattttatggacgctctttgacaaagggtttagaatataaaaaaagtgtacgggtcgcagttgccccatacactttatcgctatttattgagtttatgccgtaaaaccgacgcgatatccactttatagactatatctatttcgcgttcttttccggttatgttcggcgatccgcctacgataattctgtcaatcagctcgtaacacatttctcgggtaagctcgggcacctcgagatatttcttgatattccgtataaagtcatcggcgctttgtatcgtgtttcccgtttcggtcaacctcgtttccgattccgcgatttcggcttccaaccttttctgctcttcggaatacttttggataaagccaatgcaaatatcttcaggcattttgcctttcactctgtcctcataagccacctgcatcagtcgggataattcttcttttcgtttacgctttccctgcaattcttttttgactgcttttattgccttgtccgcaagttcggcattgcgccggataaattcttcgcggatggtcttctcatcaagcacgattcttctcgccatttcacgtatatcttccagtataatctcttctaagacactcgccgctatgaaatgtgaaaaacaatacgcttttccgtaccgtatatgatatccgcaatcgaatcgatataaccgtttcccggtactacgactgattgccgtacttaatttcattttatttccgcaatctgcacaaaagagaaagccggacagcggatgcgtatagccgacttttgttcttctgccttttgccaccgatttttttcgttcctgacatctgctccaaagctcctgtgaaataatgggctcatgggtattgtaaacgatcgcccactcgcattcagcctttctgaaccgtttatgatttttataggactgtgacgtccagcgcaactgtgccatatgtccgatgtatatgatattgttcagcatttctcttaccgtactggccaaccacaatcccagccctttcggcctcggcttttgtccgagcttcgtataagcatacaccgccggtgacattaccccttccagattcagcgtctccgatattttcaacgggcttatccccgaagcgtacatttcgaatatccgtcttacaatcggcgccgtttcttcatctatgacgggcgtccgttttttatccgttcctattttgtatccgtatgccgctttcttggccgtatagattccctctttcgctttggctctcttcaccgcacggattttcttgctggtattcgctgcatgccactcgttaaaaacgttcatgatcggcatcatttccatcgcgttactgtctcggttttccgtatctacattgtcttgtatcgctataaaccgtatcccgaacgcgggaaacacataatccagatattgtcccacttcgatatagttccttccaaacctcgaaaggtcttttacaattatggtattgataacacccgccttggcgtcgtccaacagtcgctggacctcgggtcagtcaaacgtcgttcccgataccccgtcgtctatgtattccccgtaaatctcaaatccgtgttcttccgcgtatttacggagtatttgcctctggttatctatagaaagcgattctcccgctcgttcgtcctcctgggacagtctgaaatacaatcccgtgatatatttgttcatataatctccttcatttttttgtttgacttttttagccggtcttaaatttctgttttggtcatccactgccttatccgtagattaccgtgtatctttgacgcatttttataaagtattcgaataccgtggattgcgctctgtccagtattcggcctatctcgggataactcaagcccgacattcggcattcgagagccactcgcatattgtccgttaatttcaggctctccacgattttatcgcagaaggtataatcccgtttcgcttcttccttgatttccatagacggctcggccgccggctttatttcttccgtgcttatgttgcggtaataatcgcttgtctttctgttgattaatttcatcatcttcttgatacacgctatccgaatcgtaacagctttgcctttcttggtatagcctataacgtcgcttagacgccgtccgtaatgctcgcacagatacagcgctccttcctgcaccaaatcgtatccgtcgctcaatacacggcgtatatcattcttatgttttatatccgcatatacttccgcgtacagcttctgcattcgcgttcccatatagcctatgagaaaccgcgtttgcgcaaacgctataacctccgacatttcaagtacgttctccgccgtgatttcttctttgagaacttcgaatttcagaatgttacatttcatttcgcttttcctccgttttcgggtgatttcgcctttcggcaaaaccaaaaacaaaacgaaaaggctatgcttgactgttttttgtaagtcccgtgtcctttaagtcaagggcgaacgccagggagtgcatttacccttgacttaaaggggcttttcgtttactcctccacgccgaaaggcgaaaccggaaacggaggtttactttccgttactcttgtttgacggcaagcctttccatggttttttcgaagtccttgccgcccgtgaagaacctccggacataatacgtctttttccccacggttttccgtttgcttatggacggagaaaagaaatagcaattcttttcgcaatcctcgccgctataaaatattttttgtaccgttgtcattgcttccatgttgttgacctcctttgatttagtttgctttaggcattctttcgatgacctcaaaaccgaccttgcccatgatttcaccgtccaccatacaagtgaagtcagaggcaaggatatacttgaagccgtggtcctcatctcccattttacagaggatatcctcgtccagaacgtcggacacgatgtaggttttcagtccccgcgaatatacgatcctttcgtcgttcttgccgatgtatttgagcatatatttgatgctgtctccgacttcgaagagattgccgatctttgagaaatcgcttcttccgaaccgctcgttgaagaagctgttctgtacgctcttttcccgcctgtgacgcttggtactgtaatcttcgtgttcctctaactctccgggcatttggccgttcggaatgtaagtaagcgcgtggaaatgcagccgccctcccaactccccgcgttcccacgcgcccatgtaacgccatccccgcctcgaagaaagatgatacagggtattcatcagcgtttttcggaagctttcttccgtttgctttcgggtatcgaaggtataggtgcagaagaaattccatcggttggtgtagccgcggcgtatcattcgcttataccgctcccaacggttgcggcttaacctgttgaagtgttctttcacgaactgttccgcctcatcctcgtccttgaacatcggcgtaaactcctgcaacaattcggctttgcggttcttcctcttgcctttgaccttttcaaaccgttcctcgaaccgctgcaattcctcactcttttcggacttcttccgctgccgcctccgcctgtaagggcgttccgtatgcggtatcgctatccattggcttccgtcatagtagatctttgcctcgagaaggttcatttgtcacctccccgctttaacagcgtaaagaaacacgcccgtttccgtttcggcaaatagaagatatccgccgtgccgctcgccgttatcttaacggcttttgtcttgttttcctgcaaattcttgtcctcccaagaaaaaaatttgcacgaaaaaaagggcatagcacaaaagagagaactacttgtcagtcagttagtttctttcttttattctatgcccttg

SEQ ID NO: 2229 - DNA, 32759 bp, Unknown
  16S sequences of unknown bacteria
tattacttttcgttcctcaccttgcttttcctttgttcggtttttagggtgcgagtaaagcattaatttaaagcgattggtttttccaatcgcttttttgtatattttttgctgttaaataccggaaaagcctgtgagcaattacttgtttgcaggcttgtgcgttcggcgggagaattctttaggctctggtttagcttcttcctgagtattttttcgagatgggcgagagctttatggattgttttgacagtcatatttgtactatgtcatattaatttcttataaaatgtcgtaaagtaaggagctgttaacctaaaggtgtatatttatgcttttacctttaatcgtccagattaatctgcttcatcgtgaaattattccgcttcgtcattttccttattaatgcagaagtctatcagcatttcaatcattttataatcctgttcattcagcttcagcagctttgtaaaggcttcttctttattgctgtcgattaattcgccctttagtatataatccgtactcacattcagtatttcgcacagcttcaataagttttctatttttatagatttatttccgcgttcaagatttgaaatcatttgaacagatacattcattttttcagctaaaacttcctgagtaagatttagttgtttccttcttttgatatgcgatttcctatttcgatgagtttttgattaagcatagttacacctcttagtctttaggtatattatattcatttttagttttaaatataataacttaaaggttgataaacttaatctacaggtgtataatttaaaaaaaggataaggaagtgctccaatgaaaaaagcagttttggtatttttaagcttggtgctgttatgcaccacagtcggttgcggcggaaagtccggtgggaattcataggatgattcaaatccggtatatgatgtgactgacagcaaaaacgactacatcgataacagcataggaggatataccgattactctcctaaggattatgtatcgcaggatacggattatggcaataccgtatcggagtcgcatacgcattattatacttcaagtgttaccaaataagccacctgtgcttctgccggtgtgagaatctttaagtgtgactgcggcaaatcgtacaccgaaagtatagagaaaaattcaaatcatgattgggaatatgccacatgcaaatcaccgaaacgttgtaaggtatgcggtttaaccgaaggtacagcggaagggcacagatatgattactacggcaaatgccacagctgtgggaaggttaacccggcagtatcaaaaacgcttgcaagctgctctctgtcaatacctgccgtgcctaagaccgtatcacattactcatattcaaataaattatgtacaagtgttaatgtgactgcaattacttataagtttgaatgcaataacaatggtgaaatttcgcttaaattatattttttcggtgaaaaaacatacgattacaggggtgcaggtcaaagtgattcatgtttaataggctggaagctttatgctccgaatggctctgtcataagaagcggaactgtttattcaccgaatattgcaatcggtgaaagcttttcgaacaaagaggagacggcgttatttacttcggataaaggtgctgcaggagcttacagattggaaatttcaaatgtgaattagcagcctttaaaaaatgaaaaatataagcgtactgtcaaaaatgttctgaaagcttttcgtgacggtacgcttatttcagcttttcacggctgcttttatcaaattatatcgaagcatgcataaattatcccgcctgccaataatttaatatcggggggatttgaaattgagggcttttcttaacttttcagagaatctgatatccggtatgctgccgttcgttctccttataatatgcggtatttattttacggtaaaatgccgtttttttcaatttcgctttttgcccgagtcattgaaatatgcattgggcggcatgcggaaggggagcaggacggacggggtcagcccttttcaggcagcctgcacggcgctttccgctacggtcggaacgggaaatatcgcaggagttgcgggtgcggtcgccataggcggtgcaggagcggttttttggatgtggatcagcgcatttgcgggaatgactgtcaaggtggctgaaattcttctgtcgcttgaataccgcgagaaaaagaacggtgaatatgtcggcggccctatgtattacataaaaaacggtttgccgaagctttttgctccgctggctgtgctttattctgcggcggctgttccggcggttttttgcagcggaaactttacgcagacgaattctgccgttctttcaataggcggaagcagtattataaggcttgcgggaggaatcttttttgcgctgctgacgctgattgttttggcgggcggtgcccaaagggttgccggttttacgtgtaaaacaattccgtttatggcggttctttatcttttgatgacatttggaattatatttgttaattttgagcgcctgccgaatgcactgtctatgatttttaagggagcatttgatccgtcggctgttacgggaggtgcggtcggctctgctgccgccgcggtgttcacgggcgcttcgcgcggagtattctcgaatgaggcgggactcggtacatcggcaatggcgcattctgcttcctcccacacagacggtgtgcggcaggggcttttcggtattttcgaggtgtttgcggatacggtggtaatctgcacccttacggcgctttcattgctttgctcgggtgtgggcatagaatacggaaagggcgcgtcggcagagcttgtaagctccgctttcgcaaccctttacggtaaatatgcggttattctgttggcggttatgatgtgcctgttcggattgtcaagcgttataggatggggctattacggaatcgtttcctgcgattatcttttcgggaaaacgggcagaagactgtttgttattctttatccgctcgcctgtattcccggcgctcttattaatgcggatacggcatggcggctttcgggaatattcaacggcatcatgctctgcataaatgcggcggcggtgttgcttttatccgaaaatgcaataaacagcatgaacggctgccgccgcaagggcttaaacgccgccgcttcttccgagaagcgtatcgaaaatattccgtaaatattccgaggaggatattccgctccttgccggcacaacgaatatgcaatagcagagaattgcggctatcacaagcagcgcaatgagaacaatgacgagaggcatactgtccgataaaaacggacgcggcttttccgggaaatcgccgccgatacggtagggcaactcgtcgctgctgtcagagccttgcgcagcgctgcggtgaggggctgcggagggcttcatgcggaaatcgttgttcggtttatcatttgacgcaggctcagcaaaaacatcctcatccgggaaatcaagctcgggtaaagctgttttatctgctgcagcggcatatgcgtcaagcggcaacgccgtttcctgtgaaatatccgtaatatccgactctatgctttcggattgcaagccgacgtcgtgttcgggcacggctgtttccgcggccgaatcgggcagcggctcttcatcggctgcttctgccgcgttatcgcctgatgaagaaaacaggtttgtaatatcgtcgtcctgcggcagtgcttccggctcttgagcaggcgcaacctcggcttccgcagccttttgggctgcggattcggcgtgcgttttaagctcgcccgcgcacagctcctctatatacggatgaataagcgactgcataattgccttacggacgctttttccgtcggacagcattatcatggattgcgggccgctttcgataatgcagcctccaaagcagccgtcggatgttacaagcggcgttgccccgcttatgatcgaaatttcactgctatcggaaatgccgtaaagcttattatcgatttttgtgagggttttgccgattgctccggaaacggtgttcagaataccctcctcgccgaaaagactgccgacgattattataaccctgctccttgaaacagcacgggcaagattctgcaccaaggatcttctgtcaggcgctttatcggtaagaagccgcattcggcagcagccgcaaagattaaattccatttcaaaatcggtggctgttttgtaatagataatgtcaacctttatattctgaagcataattttccccattctgccgccgaatttttaaagagctgtttatcgctgcggcggcgctgcgaggtgagccctgatacggagagtgtcattacaagcacccttcgtgtttttattcaaagggatattttatcccgcggtcgtcataccagcgcttcggatacctcggcgaaggatttgccttcgcggcggaggtgtcgaccgaggtgtcttcatcctcacgggtttcgcgtgccatgactacaaggcgggcgtcgtcaaaatcgtaaacgcaggtcacaagagtaataatattatcatccttgttaacatccacacctgtgtttataaggcttctctcatatgcctcgccggaccagctttcaaagtcctcgtcattggcgaagctcttgcgtgagatattgtatatgtaattgttatcatccgattttgaagcgttgagaacaaaaacggcatagaccttatatgtgctttttttgtaaagcgtggaaaattcaagcgtgggattttgacggtaaaagcttaaggaacggtactttgtgagatcggcaaacatactgccgtttttcatgtgatgaccgtatataaccaaatttttatcggtctcttcttcggttattttgttttcacaatcaaaaaacagcgagccgtaggcgcttttttgctttttctgattgtgggtgaggtaaaagctgttgtccgccgtctgatagatcgggttatccacccgagtgttcgggacggttatccagcccttaaaatcgctgttttctcgcagcatatattcgttaaccgtcagcttttgtgcggagctgtcggtcgataccgtgccgtgccatatgttgcggctgcttttaattatattatcctgctttttagccgataaaaaataatttgcgagatacgaagcggaaactatgagagttataagcgaaataaggaaaaaaaccttgataatcatttgcttgatattatcccgtccgttcggaatataggataaataaagcctgtgaaaaaaatttttaaaggtttttctttcctttgcatgtgcgtgcttcattcaaaaaacttcctcaatagtgtgtattgccagctttaaaagctgcttggctgcctgctcccttacatattcgcggcttatagggtttatattaagctcacacacggctgtaccgccgcggtgcgccgccgctatgaaaacaagaccgggggagtgcccttcggagctgtccggccctgcgacgccggttaccgaaacgcctatatcggcgtcggctttttttcgtatgcattccgccatttgccgcgccgtgtcacggcttactgcgcctaaagtatcaagcgtctccttttttacccctaaagcctcgttctttattcggcaggagtatgacgccatgccgagctcgaaaaccgcagacgatcccggcactgcggttatataggaggaaacaagtccgcctgtgcaggattcggcagtggctataagcagctttttttctttaagcagccctaccaactcttctgccgtgttgtaaatttcagcgttcattactcaatcaccgaaaattcggtgccgtttacggctttttctataagctcgtccaccgctaagcccttttccgcctcttcgcatgccgaaagagtaggtctcgttttcggatgcttcggggtgaataccgtgcagcaatcctcataaggtaaaatggaggtttcaaacgcgtcaatatcgcgggagatttttataatttcttccttatccatacctataagagggcgcagaacaggcatatttgtgacgctgtctgtcgtgacgagtgcgggcagggtttgacttgcaacctgaccgagactttctccggttataagagcgagacttcccgaattccgcgccagtctttcggaaatgcgcatcatcatccttcgcattataagcgtgaaataatcctcggggcagtttttgcctatttcatcctgtatttctgtgaacggtacgattgcaagattaattgctccggaataagccgcgacctttttaagcagagtgcgcaccttaagctcggcgcgaggacttgtatagggcgggcttgcaaagtgtatcgcgtcaaggcgtaagccgcgctttgccattgtccaggcggctacggggctgtcaatcccgccggaaataagaattgacgctttgcctgcggtgcctacgggcaagccgcccgcgccctttatctgctcgcatcttatatacgccgcgtaatcgcgcacctcaacgaaaaccgttctgtcgggattatgaacatcaaccgtaagatgcggaaaattatcgagcagcacgccgcctaattccctgcaaatttcgggggaggtgagcgggaatgttttatcggcgcgtttcgcctcaaccttgaaggttttaacgctttccattatcggctttaaatattcgggtgcgcgggtgaatatatcctcggctgttttttcgcaaacgcaggcgcggctgaagccggcaattccgaatattttcttcacacggcagagcgcttcctcaaaatcgtaattttccgatttcggttctatatatattgtagactgcgagctgcgaacctctgtttcgccgaggcttttaagccgccttttaatgttttttataagagcgtcttcaaaatttctgcggttaagccctttgagcgccagctcgccgtttttaataagtattatttccttcatattttcgcctttcttaacgacccttcggcggcgcaaagagcgtccgccagcagattcacatcattctccgtattatccttgcaaaagctgattcgaagtgcactgtcggtaagcgtggggttaagccccatttcctttaaaacatagctgccgtgcccctttgcacaggcgctgccgcttgaaacaaaaatatttcttgcctctaaatagtgaagcagtgtttccgagcgatagcccggcagggatatgtttagtatgtacggcagtgcgtcatccggggaatttattacggcgccgcagcgggacataagagtctcacgagcgtaattccacagctgcttttgcttttcaagctgtgtatttaagttcggtaagtcttcaaccgcgcctttaagccccattataagcggaacaggttctgttcccgagcgcatgccgttttcctgcccgccgcctgttataagcggcggaatatttacggtttttctcttgaaaaggaagcctatgcctttaggcccgtgaattttatgcccgctggcagtcagcaaatctatacccgactgccttacatttatgggcagctttccgaatgcctgcaccgcatcgcagtggaaaagagccctcgggcttatgcgctttgtaagtgccgcagcctctgttacaggctgaaccgcaccggtttcgttgtttacaagcatcatgctcacaagcagtgtgttatctgtcagagcgttttttaagtcttcgggcaataccttaccgtcatgcgcgggctttaagtaaattacctccagccctgcgtcggtaagctttttgcaggtctccaaaacggacggatgctcaattgcggttgtaataactctgccgccgcgtttggctgccttaaggcaggaaagaagcgcggtattgtttgcctcggttccgctgccggtgaatataatttcatcgctgcgcgcacctattgcttcggcaactttttcccttgcggcgctcatctcggcttccgcctctatccccaatgtgtggagtgaggacggattgccccagctgtcgcacagagctttatttatgcaatcaacagcccgcttgcagggtcttgttgtggagctgttgtcaagataaatcataccgttcaaaaaacgcgcacttccctttggaaaattaatatacatattatacattatattttgaaaataaacaatagtaaaataaattaaaatttataattgataacctgggagtttcctgttataattaaatggaaaatgaatttaaaggggaacatgaaatggcaaaggttattctgctggcgcacacgccgaatcccgagcagacggttgcagcggcggcaaagctgtgctacagcagctcggatataacagggcttaccgacagcctgacagacgaaaaggcggcggcatttgtggaaatgctttcggagatagggcacgaaagccccattgagcacgcaagcttcaccttcggtattgagggcgtttcgcgctcgcttttggcacagataacaaggcacagaatggcgtccttctcggtaaagagccagcgctatgtgcgcgagggcagcttcggctatgttaccccgcccgaaattgcggcagatcccgaggctaaaaggctttatgacgaaataatggcggaggatcagagaaagtacgaccgccttgccgaaattttaaaggaaaagcatataaaaacctttatggctgagggtaaggatgaaaagaccgcgacccgccttgctgagaaaaaggcgattgaggacgcgcgctttgtgctgcccaactcctgcgaaacgcagatggttatgacaatgaacgcccgctcgcttaaaaatttcttccgtattcgctgctgcaacagggcacagtgggaaataaggaatattgcagatcaaatgctggcactggtatcggctgtagcgcccgagcttttcaaaaatgcgggacctgcctgcgtttgcggcgcctgctcggagggtaaaatgtcctgcggaagggcagacgaggtgcgccgccatataggagagcttaaaaacaatgggtaggcttatagtgattgagggactggacggcagcgggaaatccacccagttagagcttttgccgaaaaagctgaaagcacgcggaacagactgccgcaccgtttctttcccgcagtatgaaagcgattcaagcgcgcttgtaaaaatgtatctgcgcggcgacttcggcactcaccccgatgatgtaaacccatacgccgcctcggccttttacacggtggacaggtatgcctcatataaatccgtttggggagattattacaacgcgggcggaacggtggttgcggggaggtacaccacatctaatgccattcatcaggcttcaaagctcggccccgataaatggaaaccgtttcttgactggctttacgattttgagtataacaaaataggtattccgcaacccgacagagtaatattcttggatatgccgatcgaggtgtcacaggggcttttaaaccgccgctactcagaggacggcggcaaaaaggatattcacgaaagcgatattgaataccttgaaagctgcagaaaagcggcgctttttacggcggaatattcgggctggataaccgtgtcctgcgctagggacggcaagccgcgcggaattgaggatatatcagacgaaatacttgagaaggtgctttaatatggtatatatttttttagcaaacggctttgaagaatgcgaggcgcttgttcccgttgatattctgcggcgcggcggcataaaggttagcaccgtcggtgtgggcggcagtgtaataaccggcgcgcacggaataagggtctgctgcgatataggcgaaaatgaaattaaagaaagcgatatgcaggcggtaatactgccgggcggaatgcccggcacgattaaccttgaaaaaagcgcagcggtgcaaaacgcgcttgactatgccgccgaacggggcttgattataggcgcgatatgcgcggcaccctcggtgctcgggcacaaggggcttttaaagggaaaaaaagccacctgttttcccgggtttgaaaaggacttaatcggcgctgaatttgcagaagtgcccgcccagcgcgacggcaatattgtaaccgcctgcggtgccggagcggcttttgacttcggttttttgctgctcgaaacgctttcaggcgataaggcggcaaccgaggaactgaaaaaaacaatgctttataaaaaataatttttgcggagaggaaaacaatggacgaaaaaaatcccgatattatccccgaaaatcccgaaaacactacatttgaggacgattttgtaatcggcaagggctttgaaataagcgaggagcctataatgcccgcacccaagaaacgaggagccaagcattctgcaggcaaaaacacacttaaaaacattatttggattctttgcatagtggtagtctccgtaggtcttgccttcggcataatttttgcgggagcggactatatgggcataggcttcggaaggggcaaggactgcgaggttgtaatagagcagggaatgtcgacccggcagatagcagagcagttaaaggagtgcggcgcggttaagatgcctgtgctttttagggtttacgcaaagcttaagcattacgacggcaaatttaagtatggtctttatacctttaataacgaggcgggctacgaggcgctttcggttatgcttatagaagagggcgcaaaggcgaacagcattaaggtgactatacccgaaatgtcctcggttgacgatattgcgaaaattcttgaggaaaagggcatttgcgaaaaagccgattttatcgatgaggttcagcacggcagctttgattacgattttgtaaaggctatacctaccgaaaaggtttattatcggcttgaaggctaccttttccccgaaacatataatttttattcatacgattccaaggagtgtgcgcacttagccattgaccgtatgctcaaaacgctcgacagcaagcttaccgagggcgtgcgggataagatcgcaaaaagcggctacacgctgcatgaggttatgaccttggcgtcaattgttgagcttgaggcgggcggcagtcccgaggaaatgccgaatgtggcggcggtgttctgcaaccgcttaaagagcgatgaatacccgaagctgcaatcctccccaacacagaaatacccctacggctcgggcaagtacgatacctataaatcggaaggcttaccgcccggtcccctgtgttcgccgagtgaaaactccataaaggcggcagccgacccgactgcgaatttcgattactactactttgtgaccgacgctaaaatgaagttttactataacaagaccttaaccgagcacaacaacacgataaaccgacttaaaagggagaacaactggattggcgataaataaaattccggagcttttgtgccccgcaggcgaccttacgcggctttgcgccgccgttgattacggagcggacgcggtgtatcttgcgggcgaggagttcggtatgcgcaccgccgcgacgaatttcggcgaggaagacctgaaaaaaggcatagaatacgcccataggcacggcgtaaaggtgcatattgcctgcaatattataccgcacaatgaggaaatagcccgcctgcccgatttcttgaaaaccgtgaacgctttgggggcggatgcgcttatagcggcggatataggcacaataggactcataaaaaaatacgcgcccgatacagagctgcatgcctcggtgcaatcgggcatatgcaattacgaaactgcgaacgcgttttacaatatgggggctaaaagggtggttttggcaagagagctttctctttcggaaattgcggaaatacgcgcaaaaaccccgcaggacttagagcttgaagcctttgcgcacggcgctatgtgcgtttcgttttcggcaaggtgcctgctttcaagctatatgaccgggcgggacgcaaaccgcggcgactgcgcgcagccctgccgctggagctattcgcttatggaggaaaagcgcccggggcagtattttgatattaccgagaccgataaaggcacatatattttaaacgctaacgacctttgcatggcagagcagcttgataaaatggcagccgccggagtagacagcataaaaattgagggcagggcgaaatcgcactattatgtagccgttaccgcaaatgcctaccgcggcgcgctcgacagcctgaaaaccgccgacggcgattggaaatgccccgaatgggtgacagaagagcttaacaaaataagccacagaacctactctacaggcttttatttcggcacgccgcaaaacgcgcagacctaccaaaacgcgggatatatacgggattactccgtagcggcaatagttgagggttatgaaaacggctgtatcacagccgtgctcaaaaataaatttctgcgcgggcaggagtttgattgcttagagccgggcaagccgcccttcaccgtttcggcaaatacgctttttgacggcgacggaaacgaaatagaggttgctccccatccgatgatgaagctgaaaattccctttgaccgcccggtaaagcccggcgcaatgctcagaatgaagtattaaaaaaataccttacgtcaataataaaggcgtgaggtgttttttatgtctgatacgggcttcggcgcggtttttgcaagaagggctgcaatttcattctttatttgcgtggttttgtttttcagctgtatattaagggtagcggtgtccgctctgacggattattccgctgttttaaaccgccaaagcggctataggcttaccgtaggaaagctgcgaggtacaatatacgacagaaatatggtgcctcttaccaacgccgaaagcaaaattatagccgccgtatcgcccacaccccgagcagttacggctataagcggcgcactctacggtgatgagctgcaaggcgtgcttgaaaagctgaaaggcggcaagcccgtgctttgcgaggttccgcgggaaatagactgcgacggtattgcctgtatgcaggtatacacgcacaattccgccgatacgcccgcagttcaccttttgggctataccgattcggatcttcgcggtatgtcgggaatagaaaaagcctatgacggtattttgtactcggaaaaggaggcggcttttgtatacacaaaggacggcaagggcgatattttagcgggtgtaaagcccgttgcggagaacgacagctcggtcacggcgggcggggtactcactacgcttgatataaatattcaggcaatagctgaaacggaggctgaggcaatagatgcgggagcggtcataatagccgattcaaaaacctccgaaatcagagcggcggtcagccgtcccgatttcgactgcacggatattgcgaaatacctgaccgccgataattcaccccttttgaaccgtgcgcttgctgcttttaatgtcggctcggtttttaagccctgcgttgcggcagcgggaatggagtcgggccaggggagcttcggctataattgcacgggcagctgcaaaataatcgaccgcgttttcaagtgccacaagcgctcgggacatggacttatgacccttaaaagcggtcttgcaaattcctgcaacacgtttttttataatttcgccttcaacataggcgcggacgcggtttttaatatggcttcaagccttaatttcggtaaaagctttgatatatgcgagggaatagcaagcgcggcgggaagcctgccacagagagaaagccttgataatatagcctacctcgctaatttttcaatagggcagggggagctgctgctttctcccgcagctatgctgacattatactgcgcggcggcatatgacggcagctacgcgctgcccacggcggtttcgggcacactgtccggcggcagatttactcccgtgtcggagcgcggcagaacgagggtcatgtccgccaaaaccgcaaaaaaattaagagaatatttaagcgcggttataaccgagggcacaggtacggcggcaaagcctaaatccgtgagcgccgcggggaaaaccgcaacggcgcaaaccggtaaatatgaaaacggcaaagagatatgcgagggctggttctgcggctttttccctgcagacgagcccgaatacaccgtaatagtcttttcggaaaacatcagtaagcaaagtaaaagctgcgcggagatattcgccggaatagccgacagcgtctgtgagagaattgcaaaataaaagtttaaaccgagtgcggcgggtgattcggttcgcccgtaaaccacaaaattttttgcggcgtcattgccgcatttttttatttcgcaaaaaataaaaaaatgattgacattaccacttttgtggagtattatgtatttcgttggagatgattggaattgtttgcaaatgagcgaatgaattatatatgtgagctgctcaaaaagaacggcgcggtaacaacggtgcaggcaagccatgatctgaatgtctcggttgaaaccatacgccgtgattttttggcgcttgaagaggaaaacaggctgttaagggtgcacggcggcgcggttctgccgagcggcggcgttgaaagaatgccgcttaccgacaggttggaaataaaccgtgaggaaaagcgaattttatcggacgcggcgtgcgatttcataaaaaacggcgatatcattgcagtggacacgggcagcaccgccgtggaatttgccgagatattaagtcttcgctttaaagagctgacagtgattacccattcgcttgatgtttttgagcgtttgcaaaacaaaagcggctttaaaaatatattggtgggcggaatttatctgccggacgaaaaagcgttctgcggtcttcctgcggtggaagcatataaaatactgcattgcgataaggcgttcatcactcctgcggcgatatcactgaaaaacggcttgagcgattgcggcgaaaggcttatgacggtggagcggcagatgatagaatccgctgatgagatatttgttttggctgacagcgataaatttgaaaaaaccgcactttacaggctggctcccataagctcgcggtttaccttggttacggattcgggactttcagaggagcttaaaagtctttataaagaaaacggcataacggtcgccgcaaaggggtagaaatgatggataagaacacgcaaaaggcatggcgaataggatctttctgtattgcgacatatcttgcaagctatgtaaccagaaatatattgagcgtttccacaccggaaatgataaaggaagcgttttttacaaaggaatacaccggtctgctttcctcgatatgcttcattttttacgcggcgggacagctgataaacggctttatcggcgaccgtgtgcatccgaaatatatgataataatgggactcggaatcagcagcgtcagcacctttgtcattcccatctttgataaccgaatcctgcattttacggcgtttgcgctcatcggattcgggctttccatgcttcgcggaccgcttatgaaggtgatatccgaaaatactgcggcaacacacgcacgaatgatatgcactcttttcagcatggcgggctttgcgggaccgcttattgcaagtatattatccatattttttaaatggagagcggtcttcacggcaaccggcgtaatatcggttattattactgtgcttgcggtggcggcgataacgacgcttgaaaagcgaggcgaaataaaatttgctccgaagtacgataagggaatcgccggaattttgaatgtcttcaagctggaggactttatattttatatgctcataagctcaataggcgagattgcgggctcttcaataaccttttggattcctacatacacaacagagcatctcggcttttcaaacgacgccgcatcaacaatatactcggttgtttctttttccacgcttttcactccgtttataacccttctcatatatgaaaagcttataaggaacggtataaagcttgcgcttgtaatgtatgttatatccgcggtattctttatagcggttcgatttactgcagcccctgttctaaatgtatcaatgctgataattgcaaaagttgcggctgctgccgcttcaagcatcgtttggagcgcatacataccggggcttgcaagaagcggcaaggtatcaagcgcaaacggtgtgatagacgcggcgggctatgctatggcgtcacttgcgaatgttttgttttcaacctttgtcggcagactcggctggggcggaatcgtgaatatgtggtatatcataatgctgataggcgcggcggtgtcattcataaagctcattatgaagaaaaaacaaaaagcataaagatacgagccttcgcttttgcgaaggctcgtttggcagaattcagtttgaagcctttgcaaccggctcttctctgaacagcagggatatacaccatatgcctgcaagagctataacggtatatataattcggctgattacggctgtggcgccgccgaaagcccatgcaaccaggtcaaactcgaaaagcccgaccagtccccagtttaaagcgccgataattacaaggataaggcaaatcttatcaaacatatcatcactccttctgcaaggttagtttttgcagaggaaaagactttatacatttgatttttttttgtaataatcgagacttctttctatcttgtgtaaacctccgaaagggtataaaacagaaatatcaaatcggaggttaaaattatgccaaggtacaaaaaagcccctttaggggcggctgaaaaaacaatgcggtcggtaaaccttttcagcaccccttgaggcgtttgcatgtaaagctccctttccgggcgactcaagatattttaacgttgagttcctttataacggcgagtgtgttttcaaaggtctcttcaaccttaagatatatataggtatatttgtggctcttatccacaccgcttatctccaaagaaagcggacattcatcggttatgcttttgtaggttgctttcggcagatccgaaatatatgcttcaaccaattttttgagctgcgcctcggtcagggcggtttcctcatatacagcttcctcataggaataaccgagggctgcttttccttcgtctgtcacggtgtagtcgcttacgctgaccgaacggttgctgattatgctgtcagatatcgagctgcgtatttttttaatatgctcggggcttttgtaaagcttaagcagcaaccgtatataatccgaatagcttatgtcggtataattccgcacaaaatgcctgccgcttttaagggtataatcaaggcttaaataatccccgttatctgttgaatcggtaacgattttttcatggagctcaagcaccgttttgggatctttaaaggctatttcggtgcctgtaaaccgcacggtcacgctttcaattttgtcagcggcgggaatgcgacggctgtagccgaagcagtcggttgcaagcattgcggcgaatgtaccgagcataactaccgatacagctcccataacagcggatcttttaattgatttaaagccgcggtcgttaattgcaccgaaggttattgccgcaagcacaccgcccacagccgcgaatatccagaataaagggcttatttctccctcggcgaagatcgaccctgcaccgaacgccgcgattatgccgattataagtccgcataccgtatatatgaaattatatgcataggagattccgcttttttcactctttctgcggcggtaaagcgcaaggcttgccgccagtgataaaaaggtgatgatgagcagcgcgattgcaagcgttatttccgaccgccgcgaaagctcgcccgaaagcaaattcccaaatcttgtaaacgcgaaccagtagggggaggaaaggtttaccaggctgccggtatatgcgtcatacgggtagccgcggagaaaatagctgcaaagcgaggaatttatgatttgaacaagcacgattcccgcattgaaggtaaaaaatgagataataaggtcaaaaatactgccggcgcagatcataaatataagcgaaaacgcagccagcgcgaacagtataagcagattaaaggcgtagccctttaaaataggctttacgctgcattctacatattttgaaattttcagcccgcacatcgtaccgtaaaccagagtcacgggaatgattataggcagaacgcttgatataagccgcgcaagcaaaagccccgtgcgggtggtgggcaatgaatgaaaaaagtcgcttgagctgcggctgtagagaaacgcaaagtttataaacatataaacaagcgccgccgcaacagaggctattgcggtaatgaacataagcgtcggggctatggtattaaggttataaacccttgcggtattctcgtatatccgctcaatcttaagcagcgtgtaaaccgggcaggcaagcagggctacgaccgtcataagcacggtcagtcccgcggtgcgcttgagcgaataggcaaacagctgccttgcgggatgaaaattattcggcaatgcttttgacgtcatatccgttcacctccaactcaaacataaatgtttcctcaagcgacggctcaatgcattcagaaaaaacaggtgaaaggcgatttatataattcatgatttggatctcatcaccgcgcactatcaactgtaaaattgagccgctgcgctctgccttaataacgtcaagtcccgaaaacgccgtgacatccggcactccgcggaatgccgcctgaaccttgtgcaggttgcctttgagcttgtcaacctcatcgcttaacaccatatgaccgttgtgaacaagtcccacgctgtcacacaagtcttcaagctcacgcaggttgtgcgaggctattaccgttgtcattcctcttgcggtaacgccgtcaaccagtatgcccttgagcgccttgcggataactacatcaagcccgtcaaacgcttcgtcaagcagaagataatcgggggatgacgcgattgcgtgtataagcgccgcctgccgctgcattccctttgacatggtggagatcttagccttgtaatcgagcgggaagacctcgagcagacggttgtaaagcgtattgtcaaagcgggggtatagccgtctgtaaaagtcagccgtttcctttattgtggcattctgcatgaaataaggcgtatcgccgaggtaggcaatgcgcgatttgaccttcggattatcgaatattttttcgccgtcggaggtaatgcttccgccgtctgccatatacacgccggacgccagccttaaaagtgtcgattttcccgagccgtttgagcctacaagtccgtatatagagccgtctccgatattaacgcttaccgaatcgagcgcctttttgccgccgaatattttagtgaggttttcagctcttatcattttgcgtccccctccttttcaaacatctcggatactatttcaataagctccggcttgcgaagccccagctctgccgcagccgataccgccgcgcggaaatccctttttgccgacattataatcgcagtgtccgccgcggcgtcgtccgatatgaacgagcccctgccctttaccgaatatataatgccgttggtttccagtgtctgatatgccttttgtatcgtattggggtttacgcccagctccatcgcaagcgcgcgcacgcttggcagctgctcgccgctttcaacgagcccgagcgccttcatccgcacaaagccgtttactatctgttcgcaaataggaacgccgcttttataattaagcttgagcataaagcacctcccaaaactgtattagtgtttatagtacagttaaataatacactgtaacgcgcggtttgtcaataaaaaatttattaattttatcatcttgcaaaaaatgccgaaagttgtataatataatagttttaaaaatactgtaaagggttgtttgttttgagtgcatacggatatttgctggcgcttgcgctgatattgctttttacgaaaattttcgggcttgcaaccgcgcatgttcatctgccgcaggtagtgggcgcgcttattgcgggcattcttttgggaccgagcggaataggaatactccacgaatcggatttcctcacgaaaaccgccgaaataggcgttataatgctgctttttattgcgggaatcgatacggatataaacgagcttaagcgcaccggtcccgccgcctgcttaattgcggttttgggtgttgccgtgccgataatcggctgcggcggcgtttactggcttttcttttcgcgcagcttttcatacgcgggctttatgaaggcggcgtttgtgggaattgtttttgcggcgacctcggtcagtataacggtggaaacgctaaacgaaatgggcaagctgaaaaccaaggcaggcgcgacgctgctttccgccgccataatcgatgatattataggtatagtggtattaagcattctgtctgctatgggcgacagctcggtcagccccgctatggtaacccttaaaatattcggcttctttgtgtttaccgccgtggtcgggtttattgtgtataaggtcttcaggcgtatcgccgtaaaccatgccacgagccgccgcgttgcggtgtgggcaatggcgttttgctttatcatggcattctgtgccgaaaggtttttcggcgtggcggatattaccggcgcatatttcgcgggcgttatactctgcaatgttaccgattcgcggcgctatgttgcaaaaaaggttaccgcggcttcgtatcttgttttctccccggtattctttgccggaatagggcttaaaaccgagcttaacggcataacgcctaatataatcgtatttgcgcttgtgctggcggtaatggcggtaatcaccaagattatcggctgcggtttaggggcgcgattctgcaaaatgacgccgcacgagtcattgaccgtcggcgttggcatggtggcacgcggtgaggttgcgcttatggtggcgcaaaagggaatcgacagcggaaatatcgatccgcatgtgttccccgcaatagtgctttgtgtggttatagccgcgcttctaacaccggtgcttttaaagcttgtgatttcaaagggagacgctgcaggcggcaataccgagccgcagccggcagcttgaatcttacaaaaccgttagaattaaaggggaatttgtaagccgattcaatggcgatgcaaattcccctttggtataattgcggcagaaataacaaaggatgatttttgttgtgaggtttcggacgggcagaccgttttaacggttacccactctgtaaaggcagcgagccgctccccacgcgttcatatataaattaatatccaattcctactatgccgtagtgagcggaaaaggctccgaaaaataatccatgcgaattaacaaaattcttactttttcatattttatgaagaggaagaatttttattttcagggggaggatactatgcctataatatatttaagtccgtccacacaggaattcaacccttattacggcgggggaaacgaagaatattatatgaatcttatagccgacgcaatggagccgtaccttgcggcaagcggcatacagtttacgcgcaacacacccgatatgaccgctgcgtcctcaattgccgcttcgaacgccgggaattacgacctgcatttggcgctgcattcaaacgccgtcgggagcggtcagcagcccaccgtgcgcggaatagatgtttactattatcccgcaagcgttagcggcaagcgctttgcagatatcgcggcaaataatttacagcttatatatccgctgccgggaatggtgaaaaccgttccgacgacaaggctcggcgaggttgcaagggtaagggcgcccggcgtgcttatagagctcggttatcacgataacccgcttgacgccgactggatacggaacaatataaataatatcgccgaaaatcttgtgctgtcacttacggagtatttcggaataccctttaatatgccgcagcccatacaggtgggatatgtctcaaccgaggggtcgaaccttaatatccgctcgcgcccggatatcggcgcgcctataatcggcaaaataccgaacggctcggaaattgtaatttacaatcgtctgcccgaatgggatttggcaggctacggcggagttatgggctatgtgagcagccgttatgtggcggtataaataaattgagcgtgccgaattttcggcacgccaccttcggaaatgccgttcagcattcttcaatcagccgttcaagctcctttgcggcaacgcttaagggctgctccttacgctttattaaaacaatatttcgctcgggaattttttcctttaaatcaattatatttacgtcttcgctttgcaaaaattcctcgggaacaaaccccacgccgaggtctgccgctaccatcggtaatatctggtcggcggtaaacgcctcaatatcggggcggtaggtaagcccgtgggaagaaaagaagcccgaataaaactcaaaggactttgtgtcctcaccgagtgagatgagcgggtaattcgtcagctccgaaagagagacctgcctgtttgcaaggcttgaaaagtacggcgaacacaccgcaacctcgtttacggggcgtatgaccctttctgttaatgacgcggagcggacggtcggggtggtcacaactgcaatatccgccgttccgcctttcagagcggctattgcctgcggggtggagtggttgcttattcttatatgtatacccgggtagcgcagcctgtattttttaagcacgggcaaaagcaggcagcgcagcgccacctcgcttgccgcaacatatacgctgcccgagcgcagcgagcggctgtcggtaatttctgcttcgcccatttctatatgctcatacgctattttaatatgctcataaagcctttttccctcgggcgtcagcttcattccctgattgctgcgggaaaaaagcgcgcagccgagctctgcttcaaggtttttaattgttcgggtcaaattaggctggctgttaagcatcagctttgccgcctgggttatattgccgtatttcgcaacataataaaacacacggtaataatcatagcttatatacatttttttgcacgctccgcaatatcaaaatgatattataatcatatctattatatattttacatatgtgcataaaatgattataatatagcagtcaacaaaagtcaaggcttagtgtgacaggactcgaacctgtcacactacggggggacggttatatgaactataaaaatgcggatatgaatgcgcttatgtgcgaaagggataaatgcgcggcagagcttgcgaaatatgccaaaagcgggctttcgcttgacctttcccgcggaaagccctcagcggaacagcttgcgctttcgcttaatatgctggatgttttggatcaccgcagcattttagacagcgaaagcggtcaggactgccgcaactacggcgggcttgacggcatagaagaggcaaaaaggcttttaagccatatgatgggcacgcactcggtaaacaccatagtgggcggaaacagcagccttaccatgatgtacgagcttgtaagccacggcatgaccgacggaatatgcggcgcaaaaccgtggcaggaaataaagaaccgcaaatttttatgtcccgccccggggtatgaccgacactttgcaataaccgagcatttcgggtttgaactgatatctgtaggtatgaccgaaaacggacccaatatggacgaggttgaagaccttataaaggatgaaaccgtaaagggcatttggtgcgttccgaaataccagaacccgacgggaattgttttcagccccgaaacggtgcgaagatttgccgcgcttaaacccgcggcggaggatttccgtattttttgggataacgcgtactgcatacacgcctttgacggagaaaacgccgaaatacccgacattataagcgaatgtgaaaaagcgggaaacgccgatttggtttatgaattttgctccacaagcaaaattacattccccggcgcgggcatttccgcacttgccgcaagtcctaccaatttaattgatataaaatcctttttgcagttttccaccataggacccgataagctcaatcagctgcggcacgcgcggttcttcaaaaacagcgcggggctgcgggcgcatatgaaaaagcacgccgaaatattaaagcctaaattcgaggcggtgtataaaactttgaaagaggagctcggcggcgtcggcattgccgactggactacgccgcgcggcggttatttcctttcctttaatacgctgccggggtgcgcaaaaaaagttgttgaaatgtgcggagaatacggagtgaaatttacgccggctggggcgtccttcccgcacggctacgaccccgaggataaaaatattcgccttgcgccgtcatttgcgacggttgaagaaataacgcaggcaataaaggttttgtgcctttgcacaaagcttgcggcaatagaaaagcttatgaaggagagaacttaaaatggcggaattacttgaaacggttatgacggcggtatttgatattgcactgcttttcctggttatttactcggctaagggcagggcggcaaacggcggcacgcggcttgtggcgcttacattcagcttaggctttttgctcggtattttgtcaaagtgcattgctggcggcggttacgccgtaatgaccctttcggcgctcgggtttatgctttcctatatgctttttgttttcagtattcccgaaaagaggaagcacaatgaaaagcggtaagcccttcaaggggcaaatgtccgacagcttcagagcggcggtgtttataattttgtcgggcggatttcaggacgcatatacctacacctgccgcggcgaggtttttgcaaacgcccaaacgggaaacattgtgcttttaagcacggcgctttacgggcgcgagtggcaaacggttttaaaatatctcgttccggtgctttcctttttggtgggcacggcggttgccgagtttattcatataaagctgaaatgctatgaaaagctgcactggcggcagataatactgctgcttgaaatacttctgcttttttcagtgggctttctgcccgcaaaagttgagccgcttgcaaacgcgtttgtttcgttcgtctgcgctttgcaggtgcaaacctttcataaggtgcggggtcacgcctacgccagcactatgtgcataggtaatatgcgcgcgggcactgaggcgctttgcgcatactttcgcgtgcgggataaagaaatacttaaaaaggcaataacctatttcggcgttatatttgttttcggcataggcgcagggctcggcagcgtgctgacccgcgcggtgggatataaagcaatattgctttgctgcgcgctgctttttataagcttttgtatgatgtttgtgccggagaaagatatgtaaataaatgcggcgacagacatgggctccctctgacgagggagctgtcagccgtatggctgactgagggagagaaaaggcagagcttttatgaattttaaaccctttctctccttccgtctcgctccgcgagccacctccctcgtcagagggaggcaggaagcggttttaattcagtgaaacatagtctgcacgccgtcaacaaaatcgcccacggcttttacaagctttgccgagcccttggtaatgtttttattatcgttaagcattaccttacccacggcaagcgctgcggcaccggctaccattccggctccgagacctttcataaatgtcattgttccgttttgcatttttaaccctcctttttagttattatatcccgaaaattcggcaatttataatgttgtgaaaaaaataacagataaatcaaaagagtaagttaatatttgtgtaaaaataggcttgacattattgggcaaaagtaataaaatagtacaataattgcgagggggtatgctttacggtcagcggtttgattgcgtttatattcggaatagcggaggcgctgatgctcaaaagcgcgctttcctccttcacttcgggaaattacaccaaagcggttacgcttgtgctcataaagcttttgctttacggcgcggctgccgcactgcttgtatttgtatttccaaagtcactttatgcctgccttatcggctatgcggcgggtttgccgctggcggtagtcggttggtttatatattacactgtgcatacccaaagggtaaaatcgggggatgataaaaacgaaagcaataacaataactgaatttgcgttttccgccgtgctttttttactgggatttataggctactgcgccgttcattcctatattaagcaccacggggaaacaaaggcgcttaaaaaacgctcggttctgcttttggcgcttgccgttatagccgcgtggttctttataggcacggcggtaacgtcggtttcaagcggtaaagcgggcatgaatgttgaatttgaaatgttcagcgagcgggtaacgcttttcggcgtttcatttgcgcaaactacggtgcttacctggataataatgcttatagtgcttgttttctgccttattttcaggtttgtactgttcccgcgctttgataaagacagaccgaaaaacgcctttcagaacgtaatggagcttgcggttgaggcaatggaaagcttcaccaaaggcgccgtgggcgattattccgagaaattagcgccctatatgttctcgcttgcggtgtttatggtcttctcggcggcgtcggagcttttcggttgccgaccgcccacatccgatcttttaataaccctttcaatgggtcttataacctttgcgcttattaacttctacggcgttaagaaaaagggcttcggcggaagaataaaatatctttcaagccctacgcccgtaatactgcccatgaagatattgagcgacgttgcggttcctatttcgcttgcctgccgacttttcggcaatatgctcggcggaatgatagtaatggaccttttaaaatcggttttaggcggctatgcgtcgggtattccggcggtggcggggctttatttcaacctcttccacccgcttatacaaacatatattttcataatactttcgcttacgtttatcaacgaggcaatcgaataacaggaggaatttaaaaatggtagcaattggtgcaggtttggcaattttaacggcagtgggcgccggtctcggtatgggcattgcaacaggcaaggcggttgagtcggtggctcgtcagccggaggcttcgggtaaaataaacgcgatactgcttttaggctgcgcgctggcggaatcaactgcaatttacgctttcgttgtggcgcttattttggctgcaaaagtataatttgaacggagaatcatcatgttcggtttgcaaatatcagatgccgtcaaggatctgataataaatataatcaatataatcgttctgtttgttattgttaagtcgcttgcgtacaagccggtcaaaaactttcttgacgcgcgcaaggcgagaatagacgaaagccttaaaaacgccgagaacaaaaatgccgaggctgacgctttaaaggcgcagtatgaggaggctttaaagcaaagcaggcaggaaagcgataaaattatcggtgaggcggagctttccgcgcagaaaagagccgccgaaattacggctgatgccgataaaaaggcggctgacattaccgaaaaggcaagaaaggacgccgagcgcgaatacaacgagcgtatgttggggctcaaagcggatgttaccgatatagcctttgatatttcaaagaaaattctttcgcgcgaggtttccgacgccgataatatggcgattgccgatgagtttttctcgaaatacggggaaaaggaagaaaaagtatgaaaacggtagttataaccgccgcggaaaatatgtcggacgcaacctatgcccgtatatgccgcggttttcgcgagaaattgggcgatgacttaaagtttaaaagagtgaccgataacggaattatcggcggctttattgccgacgcggacggtgaaatttacgatttgagcatttcttcacagcttaaggaaatgcagaaaaaaattgacggataagggcggtgtaagcagtgccggaaattaaaaacgaagatataggcagcgttctaaaaaaaagaatagccgattttcacaccgcaccgatagtataccgctgcggtaaggtttcaagcgtaggcgacggcgttttaagagtaaagggcttgcccgaccgcctttacggcgagctgctcgaatttgagggcggagtttacggtatggcgcttgaccttgaagaggacggcgtgggcgccgtgcttatggataattccgattccgtaagcgtgggcagcaccgttaagggcacgggagttgtggctgaggtgcccgtgggtcagtcgcttataggcagggttatagaccccataggcagaccgcttgacggcgagccgcttattgcaaaggaatacctgccgtgcgagagaacggcgcctacaattatgcagcgccgcccggtggataaaccccttgaaacgggaatactggcaattgacagtatgattccgataggcaggggtcagcgcgagcttattataggcgaccgccagacaggtaagacctcaatagcgattgatacggtcataaaccagaaaaacagcgacgttttgtgcatttactgcgcgataggtcagaaagcctctaacatatcgcagataatagaaacgcttaaaaacacgggggctatgaaatacagcgttgtggttgccgccaccgcgtcggacagccctgcaatgcaatacttagcgccttatgccgcctgcgccgtggcagagggctttatgaaaacgggaaaagacgtgcttgtaatatacgacgatttatcaaagcatgccgtggcttaccgtaccatgtcgctgcttttacacagaccgcccggccgtgaagcataccccggagatgttttctatctgcatagccgtttgcttgagcgcagcgcctgcttatcggaagaactcggcggcggcagcattaccgcaatgccgataattgagactatgggcggaaatatatccgcatatattccgaccaacgttatttccataaccgacggtcagatataccttgaaacagagcttttccacagcggcgttcgcccggctgttaataccggtctttcggtttcgcgtgtgggcagagcggcgcaaagtaaggctatgcaaaaggtttcgggttctttgcgtatagacctttcgcaataccgagaaatggcggtgtttacgcgtttcggcagtgatgttgatgagtcaaccagaaagctgcttgaccgaggcagaacccttaccgagcttttaaagcagccgaaaagccgcccgtacacactgtttgagcaggtggcgctgctgtttgcttaccgtaatgatatttttaccggtgttcccgaagcagagcttaaggcgtttgcgggggatatgctaagaaaccttagcaaaaacctttccgccgtgcgcgatacggtaaactcaagcggcgctttgagcgatgaaaacgccgagcgtatgaaaacggcgcttactaattttaaggaaaattctgcatatggaaaacatcagtgaattaaagcagcatcttcacgccgttacgcagacaaggcagatatcaaacgcaatgtatctgctttccacctcgcgtatcaggaaatcgatgcagaatattgactacaatctcacatatatgcgcaagctgcgtgccaccatgaaggatattgtttccaaaacaaagcacaactctttaagcgacccgtttattgagcttaccgagggcggcaaggcgctgttctttgtaatcacctcggataaggggctttgcggcggctacaattccgcagtagtctcattggcgctgcaaaaaatgcgggaatataaggaaaccgtggtttattccttggggcttaagggcaccgaaatgtttttatcccgcggaataaagcccgatgaaagctggtacggcgcgtcgcagcgaccctcactttactcggcgcgggatttgggagagagaatagtcgagctttatgacgactgcacggtaagcgaggtttatatagtttataccgaatatgtaaattctgcggtgcaaagaccggtttgcaagcgtgttttaccgcttttacggcgcgattttgacgatgttgaatacgaaaacaaatacacctccgaggtaatttacgagccggatttgcaaacggtattcgaccgaatggtgccgcagtatgtaatcggtatgatgtacgatattatgatgcaggcggcggcgagcgaaaacgccgcaagaatgacggcaatgcagaacgcaaccaaaaacgccgataaaatgattgcaaagctgacagagcagataaatgccgtgcgccaattagttattaccaacgagataaccgaaatagcggcggcaacacaggtacagaataacggagtataggtgacgcttaatggaatacacgggtaaaataattaaaatatcgggacctgttatagatattcgctttgataacgggcaaataccgcctataaatgcgcttgttaccgttgaggaatacgcaaagcatgccgaaatagccgcgcatttgggcgacggcgttgcgcgcgcaatagcgcttgaagcaaccgagggcttgcgctgcaaccttaaagtaacatccgacggcaagggcattgaggtgcccgtgggtaaagaggttataggccgcgtggttgacgttctcggcagaccgatcgacgaaaagggcgaaataaaggcggaaaaatacctgcctatacaccgcagcgcacccccgcttaataagcaaaagcccgcaaccgagctgcttgaaacgggaattaaggtaatagaccttttggtgccctatgccaagggcggtaaaataggtcttttcggcggcgcgggcgttggtaaaaccgtgcttataatggaaatgattcacaatatcgccgtaaatcacggcggctactcggtgttcacgggcgtgggcgagcgcagccgcgagggtaacgagcttatccacgatatggaaaagagcggagttattgaaaaatcaatacttgcgttcgggcagatgaacgagccctcgggcagccgtatgagggttgctatgaccgggcttacaatggctgagtatttaagggacgaaaaaaatcaggatgtacttttgtttatagataatatctaccgttttgttcaggcgggcaacgaggtaagcgccctgctcggcagactgccgagcgcggtcggctaccagcctaccttagcgcaggaattgggcgaggtagaagagcgcattgcatctaccgataaggggtctataacctctgttcaggcggtttatgttccggcggacgaccttaccgaccccgcacctgctacaatattcacccaccttgacgccactaccgttttatcaagaagtattgccgagcagggtatttaccccgcggttgacccgcttgagtcaacaagccgcgcgcttgagcccgaaacggtgggcgaaaagcactacagcgtagcccgcagggttcaggaatgcctgcaaagatacgacgatttaaaggatataatcgcgattttgggtatggaagagctttccgcagaggataggctcaccgtttaccgcgcgagaaagattcagaactttttatcgcagcctatgagcgttgcaaaggcttataccggcgccgagggacgctttgtgccgcttgatgagacaattgagggcttccgtcagatagtcgacggcgaggtagacgacctgcccgagcttgccttctttatggtgggcaatattgaagaggcaaaggaaaaagcgaaaacgctttaaggttatagttatattatggacggatttttacttgaaataatcacccctgaaaagcagtttttcaaaggtgaggcggagcagataatctgcgagaccgaaagcggaaagctgggaattttaaagggacaccaaacaatggtttccgcccttgaaataggtgaaatacagataaaggtaaacggcgaatggaaaagcgcctttatttccgagggctttatggaggtaaggcgcgacgaggtggtaatattctcgcagtgctgccagtggcccgatgaaatcgacggcgcgcgggcagaggaatcgcgcatacgcgcgcttgacagattgcaccttgccgaaaatattaaggagcaccgccataacgagatatccttggcgcgggcaatggcgcgcttaaaggttaaaaacaaattataaaaagtgtaatacaataaagaaatcgcgcttcggagcaccgttttggatgcctcggagcgcgatttttaactgtcaatcgtatgcggatgtggattacggcatattgttctgtatatattcaaccacatcgcctattgttttgaggttttcgatttcctcatcgggaatttcaacctcaaattcatcctctatggacataagaagctcgacaacatcaagactgt

SEQ ID NO: 2230 - DNA, 13158 bp, Unknown
  16S sequences of unknown bacteria
cgccacaccgacgaaatgcgtagcattttggaggttggctctgaacagttaccagtattttattttttccgtcctgcgcttaactgctcatacgtcacaccgtacttttccgcgatatcccgcgcatacgaaagtccgtgcggcaccgccacccgcacccggtacgaacgctgtccagcttccgtctccgccaccaggcttgcggccaggctgtccccgtcaccctctgcatttaactcatccagctttctggccagcttatgcatatgcgtattgtagatcgtccgtgcaccgagatcccgcaatgcacgcaccgcatcataggcaataaaaaagccctcctcaaacgaggttgtagaaaaggattcattgagcagaaacagtgctgcctggtctgccgcaagaaagatatcccgaaaacgttttgattcctccccaagacgcccaagatccatcgtcttgttttcatctgccggaaaatgtgtgaagatattgctggccggactgaatacaaatgactcggccggcacgtaaatacctccctgcgccagcagaaacgcaatgccgaccgcctgcgtgatcgttgtcttgccgccgcggttggctccggtcagaatgtagatccggtgtttccggtcaaacacaaggttattcgcaacgatttccgacggcgcatgcttcgtcagcttcagattgtacagcccctctgccttcatcatccgtttttttgctgactctgcctccggcttgcacatggcatatccggcgctgcgcagtttttccacatattccgcccaccgaatatagtaaacaagctccggaatgcgtgcggcaatcacctgtgtgctcacagatacgtggcgcgagagagtctgtttcagcttccgcaccgtcgcggagagcatcgcagttgctgcccggtccagtgaatgcatgacatcatcactgcggctgtccggcggcggtgtcacgattcccgccattcctgcccgtccgcgcatcatcgcatcggctgcctgctcgagcgccggagagcctgcttcgccagctccggtacggaaggtatatttctttttccacgtgatatccggcgaaagttcatcctgccggttcagaaagtcacagaaatttgccagaatgcctgactttgtaaaataacgactgttgatcgatacgatgccgatcccgtttggttcaaaccggtcgttcagattgacgccgagcgtaacgcttttgatctccgatgcgcctaccttcagctgcgcaatgtcctgcttcaacgcctcaaacccattgtcttcatacagcgccttcacgtattccttaagcgcagtcagcccctctgaatgaatctccttttcattcaggcagcggcagatcccctccacacattcgatgtactctttcatctcatccagccgatgaatcagttcccagattcccgatgcgtcggactccttcgtaaagctgccgtacgtccgcaggaaatccacacggtcaagcagtgcatggagttcttcgcgcagcgccgggtagcgcagaatatcctcaaaaatatcgcagcggtactttatcacctgcggatctcccgaaatccgcatcattgtgcgccggatcagattgcgctccggctccattttcgtcagctccgcgcagatctgttccagcgagagatcgtgtgccgtctcctccggaagcatctgatacttcggatcgacgccgggtgggtgcaggaggcttatttcctcatattttgcacctgcaatgtgcacatcagctgtattatccattgtattttgttctgtaggcaaaatgtgttcccttctttcattcttctattttatctgttttaaccgaagcaagccagatcacttgatttccgggtctctccccgatccgcccaccatccgtccgttccaccagatcacaggcctgagcggtcgccattctccagctcttccagtgccggaagcagcgcctggctggaatttccgaccgcctcgctcattccgtaaacggatccctccttacgagattccgcaagcgggtccttccttatgatatttcataacctatatcatgagtgaggtacctcacttatgatacaagcaagcccctacccactgcttattgctccgcaattgaagcaggggtcttgcttgactcgataaaaatacaccgacacaaatcccttcaacaggtctcctgccagtgtaaatacgccgcaccggaaaccgccctgcataaacgcattggcggttccctgatttttctccccctgctgcctttttccggtatcagttaaaagtatcttattcgaaaaagaaccttctgtcaatcttgtgcaggaagaatcatttgttttactcgctcaccccggctacaccgctgaccggcagcgaaaacagaaacgtcttcgcctttgattccatcccggcccgctccatgatcgcacgcatgatgtcgtttttctgctcttttctggtcacgatcatcgtcatctctttttctgccgcaagcgacatgccgaaaaatttccccatctcgttcgttccggtgccctttgcatgaatcacagtgccgccgcccgctcccgcgctgcgcgccgcttccatgatcggttcgatatagccctgattcgccaccgcaataatcatttcgtactctgtatccgccatttcttcttccccctccatctcaaattttctcgtcagaaacgtgtacacgccacgtccgccgatgctccccaccggaagcagaaacgcaacgcctgtgcctggcagatcaatctgcagctttttgtgcatgcccttttgcaattcccgccatttttcccgtgtcacaaacgaaaacagcaccgccttctcgtggctttcaagaccgaaggaatcaagcatcgcgtcgttcaccgtgccgcgtccgagcgtgaccagctgcacctctagttcgtgctccagataaaaattcagatatttttccccaagatgtctcgtgacgatcgtcaccatcaggtagagtcgtttcattcactgtactccttaccattctataatctcgtaatcgccatgtgcttcccataccgcctgctccggcattttccgtgtcctacggttcggaagaagctttgtgagcacgccgagcacctgaagcgtgatcagcggtgtcatcgctaccatcgccacgattccaaacgcatccgtaaccacatttccgccgaccgcatcacacgctccgatcgcaaacggcagcagaaacgtcgccgtcatcgggccggacgccaccccgccggaatcaaaggcgatcgccgtgaatatcttcggcacgaaaaaggaaagtgtgattgcaatcgcatagcccgggatcagaaaccacaggatcgaaatcccggtcagtacccggatcatcgcaaggccgagcgaaagagcgacgccaaatgaaaggctgtatcccattgcctttgcagaaaccgccccagacgtgatctcctcgacctgctgcgtcagcacatggaccgccggctccgccataacgataaaatatccgatcaccataccaatcggcacaatcacccaccggtaaggcagtgacgcaatcgtccgtccaagctgcgtgccgaccggcataaatccaacattcactcccgtcaggaaaagtaccagaccaacgtacgtataaacgagtccgactatgatacgcaaaagccctttctttccgatccgcaaagaagccacctggaaaacgccgaaaaatgcaatgatcggcaaaagtgcacccgcaatctccttcatatactccggaaactccctcaggaacatccatccaagctccacggagtcctccgcttccacgagacccgtaagcccataggcgccctgcggctcaaacaaaagacctaaaatcagcacagccatcaccggcccgattgagcacagtgcgaccagtccgaagctgtcatctgccgcgtggcggtcacttcggatcgccgagataccgacccccatcgccatgataaacggcaccgtcatcggcccggtcgtgacaccgcccgcatcaaacgccaccgccagaaagctttccggcacaaagtatgcaagtgcaaatacaatcagataaaaaaataccagcagccacggcagcgcgatcccaaaaagcatacgcagcaccgcaatcacaagaaatacgccaacaccgcacgccaccgtcacgatcagcgtcaggttcggtaccgacggcacctgctgcgccagcacctgcagatccggctccgacaccgtgatgatcacaccgagcagaaaggcaagcgggatgatcaccgcaagcttccgcgactgtgtcatcgcagtgccgacacgctccccgatcggtgtcatcgccagatccgcccccagcgtaaaaaacatcattccgactatgagcagcaccgctccgatcagaaacaccatcagcaatccgggcgagatcggcgcgatcgtaaagcacagaaacaatacgatcagaatgatcggaatgactgcgcgcagcgcctcctcgagtttctccagcaggttcgtccggtaaaatttcagcaaatcctcgtgcccctttctttttccatatctacagctgacatttgcaaatcactttcgctgtctgcaggaatataagacattccatgatacattttatcgtttactgtgtcacttatcatagcacagtccttttggttcctaccacccctcccctctgttcttagcatttttttaaccgagccactcctgataagctgcgaaacagcaaagcgaattacaaaaaaggcaggatactgattttgtatcctgcctgtgccccgtctgttatgcctcctgcaaaaatgcacaatatccgcggtacgcctcatagacatctgtcttgctcgttacctcctgcggtgcgtgcatgttcagcactgccacgccgctgtcgatgacttccataccataaagcgccgtgatgtatgcgatcgttccgccgccgcccacatcgatcttgccaagctctgcagtctggaatgcaactccgtgcctgtccatcatcgcacggattgctgcgatgtactctgcattcgcatcgttgctgttgccctttcctctggaaccggtgtacttattaaatacgagcccgtgtccgaaatatgcactgttgcgtttctcgaaacaggatgcaaagagcgggtcatacgctgcacttacatccgaagagagcatacggctgcggcttaagcatcttctcaccttcagctcactgtaatctcccgcgtactccatcagctccgcaacggtgttctcaaagaaatgagagcgcataccggtcgctccgacgcttccgatctcctccttgtctaccagcagacagcaggtcgtgcgctcctgcaccggcacatccagctgtgcctccagcgaagtatacgcacacacgcggtcatcctgaccgtacgccatgatcatgctgcggtccagtccgcagtcacgtgcctttgcagccggcacgatctcaagctctgcggagaggaagtcatcctcctccatgccgtactgctctttcaggattgcaaggatattcgcttttaccgcatccttctgtgtctttccgtcctcatctttttctgcgatcgggcggctgccgacaaggatatcaagattttctccctcaatcacaacctttgccttcttctccatctgctcggcagccagatgaatcagcaggtcggagataaatacaaccggatcgtcctctttttcaccgatcgaaatttcaaccacactgccgtccttctttgccacaacgccatgaatcgcaagcgggattgtcacccactgatacttcttgacaccgccgtaataatgtgtatccaggtaagccatctccgtgtcctcatacatcggattctgcttcaggtcaagacgcggagaatcaatgtgggcgccaagaatgcgcataccattttccagcggctgctttccgatctggaacagcaccagcatcttcttcatgccgcaggcataaaccttatcacccggttcaagctttttacctgcttcctgcacttcctccaggctcacatagcctgctgcacgtgcaaggcggatggcttccgccgcacactcacgctctgtttttcctgcgtccaggaattttttgtagcgtcccgccagggcttccagctccgctttctgctcctcgctgtaggacagccatgcattttctttcatatcagttcctccttctaaatcaaagcggatattccaggtccgctccgctgcctgcagaatcacaaggaatcctccttatgagattccgcagatgaccctatcgtaagtaagcctgccttacttgacctggttcagttctcttataaattttattgtgtatggcacgcagatggcaaatgagatcacatccgcgatcggctgcgccacctccacaccggtcagaccgatgaagtgcggaagaagcacgatcagtggcaaaaacgcatatccctggcgccctgtcgacagaaatgtcgcaagtccggcgcgcccgatcgtctgaaatgtcatattacagcagatattcagcggcagaaacggcatggacaggcactgaaaccgaaggctctgcgtaccgatcttcaccacgtccggggcgctgctgataaagaaacggatcagctgcggtgccgccagataaccaagcaccgcaaatactgccataaacaccgttgccgagcagaccataaacgaaaacgattcctttactctgccatacttctttgcaccgtaattgtaaccggccaccggctgatagccctgaccgaatccgatcaacaccgagaataccagcataaacaccttcgtcacaatcgccatcgcggataccgccgcatcgccgtaacccgccgccatcttatttaatgcgatcgatgccacgctcgcaagtccctgccggaaaaatgacgggacaccagactgcacgatctccacatacatttttgcatttcgcgcggcgtttctgattccgagcttcgcgattgtgcgtccgctgacaaacatgtacagaagaatgctgaagctcacaagctgactgagtccggtcgcgatcgctgcaccggcgattccaagatgcagtccgaaaatgaaaagcggatcaagaaaaatgtttaaaattccgccgaatgcaatgccaaacattgcaaatcttgcttttccctccgcgcacagcatcttattcatcgtaaacgatgcaatcaaaaacggtgccgcatacagaatgtactgcgcatactcccgtgcatacggccggatcgtctccgtcgcgcccaaaagtccgacgagcggatccagaaaaatccgtccaaacactgctacaagaaggccgagtgcaaacgcaaaataaaatgcactcgccgccacctgtgaagccttatgatcttttttctgcccgagcaggcgggacatccagctgcccgcgcccataccggtcataaaaccgatgctctggatcagcgccatgagcgacatcacaatgccgaccgcgcccgatgcgctcgtaccaagctgtgacacaaaatacgtgtccgccgtgttgtagatcgcagtgacgatcatactgatgatggtcggcaccgcaagagagaggatcagtcctccgaccggctcctctgtcatctttttatactgcgcttcgtttttatccattttttccataagatcagcagatctccgcaccggacggcatcttcttctccggaaccatcagcgcaagctcgccgttctcatcctctgcgcacagcagcattccctctgaaagcacgcctgccagcttcgccggtttgaggtttacgagtaccatcaccttcttgccgaccatctcttccgggctgtagtgtgccttgattccggaaacgatctgctttacctggcttccgatctttacctgagagcagagcagctttttggatttctttaccgcctcgcaggcaatgatctcgccgacctggaactgcatttttccgaaatcgtcaaacgtgatctcttccttcggctcgatgtcaatcaccggctctgcgtcctcttttttctcctcttccgccggttctcctgctgcagccttctgtgctgcctggaacttctccgcgtactccagcacctctttgagatcctttcttgcgaacaggatctccggctgctccgtcacctttgtgccggactcataaagtccgaactgatccatctcttccagcgtacgcttctttgcatttaactgcgcgaggatcttctctgcggtttccggcataaacgcttccagaagggaggcaccgattgcgatactctcggtcaggttgtaaagcacggttgccagacggtctttcttcgcctcatcctttgccagtgcccacggcatcgtctcatcgatgtatttgttgcagcgcttgaacagcgtaaaaatctctgtaatcgcatccgccacacgcagctcatccatctttgcggtcgccttgcccggtacggaaagtgcaactgctttcagttcctcgtccaccggctctgtcactcctgcatttgtgactactccaccgaaatatttgtttgtcatggagatcgtacggtttaccagatttccaagtgtgtttgcaaggtcggaattcagacgctctaccatcagttcccaggagatcacaccgtcgttgtcaaacggcatctcgtgcaggacgaagtagcggactgcatccacgccgaatacttctaccaggtcatctgcatacagcacatttcccttggatttgctcatcttgccgtcgccctgcagcagccacggatggccaaatacctgcttcggaagcggcagatcaagggacatcaggaagatcggccagtaaatcgtatggaaacggatgatatcctttccgatcagatgaaggtctgccggccagttcttgttaaacagctcactgctgttgccgtcacagtcataaccgattcctgtgatgtagttggtcagcgcgtccagccatacgtatacgacatggcggtcatcaaagtcgaccggaatgccccatttaaaggaagtacgggatacacacagatcctgcaggcccggcagcaggaaattgttcatcatctcgtttttgcgggataccggctgaataaattccggatgcgtattgatatgctcgatcaggcggtctgcatatttgctcatcttaaagaaatatgcctcctcctttgccggttttacttcgcgtccgcagtccgggcacttgccgtccaccagctgagactcggtccagaaggactcgcacggtgtacagtacattccctcataagagcctttgtagatgtcacctttttcatacatttttttgaaaattttctgtacctgacgctcatgatcctcatctgtcgtacggataaatttgtcataggacgtattcatcagatcccagatacgcctgatctcacctgccacgttgtccacgtgctgcttcggcgtgatgcctgctgcctctgccttcagctcgatcttctgaccgtgctcgtcggtaccggtctggaaaaatacgtcgtagccctgcattcttctgtagcgggcaatgctgtctgccagcacgatctcatacgtgttgccgatgtgcggcttgccggacgcataagcgatcgcggtcgtcatataatactttggtttacactgattacacatgttattttcctccaatctatgtgttgattctttttgcagcttttctgttctctgtaacaaagtgaaaaactgctccctctctgtgaaatggctcctcttcaatttccgcattgtctgtcagggtatataaaaccagcaaccggtctggcccggaaatcaaaaaaaccgcctgtcttcttttatcatacagaagacggacggaccgtggtaccacttcttttcatctgccccttgcgatgcagaccttagcgggtgcttcgggatctctccctcttacccttccgctgtaacaggcggtcctgtcgtatcctaactctttggctcagatacgcctctcaaaagccatcttctccatccttctctgtctcccctctcaccagccgggaattctctgtagcagttccagatgggtactctcttcttcactgagtttgcgtttttccagcttccggccgttatcaaagatgccgatagccagttattcactgctttctaaggtagcacaagcaccattttctgtcaacccgtttcgcgctttattcctaaaatacgctgctgttcagagtcaatcaatatttcataaagcaagtagcgaagtggattgcgaatatccgctttgatgtctgtttttgaaatagttctaccgctttatgtctccacataaactagagcaagatgccattcggagtctgccatgtcccgttcctttcctcatttcaattttcgaaaacgattactgctccttctgattgccctgcttctggccggatgcagcacactgcactttctcggctttcctctcacgcaggagaaacgtttttccgaattcacaaaggaagtcttctgctctgagcttggcggaaacactttaaacctgcactacactgttgcaaatccggaaaattatggcatttgtcaggaggaagtctcgcttggcagctccgatctgcaaagccggatgctttcactttctgcctgcgaaaattaccggacagcactgcgggcgtttgaccggaatgaattgtctgcttcccaacagctgacctacgatatttttcttgattatctcaataccgaacttgatgcttcttcccttgtgctgtacgatgaaccgcttggcccttcccttggcattcaggcgcagctgtcgatcctgctcgctgagtatccgcttcgcacaaagggcgatattgaggactatctggcactgctcacccagctgcccgattatttttcctccatcatcgattttgaacagcacaagtctgccgccggactgtttatgagccgtgcaagtgctgcggcggtcatcagacagtgcagcgattttatcaaagatccggaaaacaattatctgatctctgtttttgaggataaaatcaaccgcttcacgaatctgaccgcggatgaaaagatcgcctactgcgaccgctgccaaaagtccgtgctcacctacgtcatccccgcctaccaggatctgattgatgcacttcgcccgctgatcggcagcggaaaaaatgagcttgggctttcgtatctcccaaaggggaaggaatattatgagtatctcgtacataaaacaaccggtgataaacgatcaatcgaggaaattgaagaagcgatcaagcagcagatgacagcggattttgcggcagcgcaaaagctgatggtggctgtggattcaactagcgctgaggatgaatggactgtatcttctgctttaaacgatgacccggtgagcatgctcagggatctccgccagaaaatcacacaggattttccggattctccggcggtctcctgcgcagtgcgccaggtgcatgcctctttgcaggaatatttaagtccggccttttacctgactcccgcaatcgacagctatctcgacaacgtgatttacatcaatccagccgagcattatcagggtcttgagctgtatacaacgcttgcgcacgaggggtatcccggccatctttaccagagcgtttatttccagtcgctctccccggacccgctgcgcagtattcttggcaccggcggctacacggaaggctgggccacctacgtggaaatgtattcctacggtctctggagccaggatacaaaggctgccgccatcgcccagaaaaaccgcgccttcacacttggccttgcctccctgctcgacatcggaatccattaccgcggctactcccttgaagatgtctctgcttttctgacacagcttgggttccgcgaagattccgcgcgtacgttttatcagaatatcctgcagtcgccgggcaattatctgcagtattatgtgggctggctgaatttccagtccctgtgtgaaaaggcaaaaacggagatgggggatacgtttacgctcaaagcgtttcatgaggcggtactgaaggtgggacctgcaccgtttaacattctggaaaaatatgtgatggaagaattagatggatagacagccaaaacatttccgctaactgaaaaacgatcgtcactgaaaaaataaaaaaatattctttccgctttgagatagaaaaacgtccttagagggggcgggcagcgtccttatgaacgctgcccaaaaagtgtgtgtgatatttatttctaatcacagcgaggctgtaattggaaaccgaagtgaatgataaatataaaaaatggcgtctacaccttttggtatagacgccttcgtcatttgctttatttatgcacataaactaccactgtttttttcatttgtcaagccttttttaaatctcctccagcttcttcgagcacgtcactgcaatcgcaccaggcccgatatgacaggatacgcttaaggacagcggatttacaatgatctcatcatgtcccggaaatgcttcgcgcacctcctgctcccactgattgacttcagtcttgtccgtgccggaataagcgatcatgatatccataccagttgcctgctcgtcacttccaaagcgctccacacagtccttacggattccctcgatcatcgcgctctttgctgccttgagtgtacggctctttgtatacgcatccagccgctcaccctgaagctgaagtaccggctttaaccggagcagcgtaccaagtgcagctgcggccggtgtgatgcgtccgcccttcttcagataatataaagtagaaagtgtgatataaatgctggaggtcatcgcagtctcctccagatacgatttgatcttttctgcgctccagcctgcctgtgccagagcttttgcatccagtgccgcctgccgctgagtcacagagatccgtttgttatcgaccacctgcacacgtccgtcgtaatcctgcgccagcatctgtgctgtctggcaggagctgctcagtccgctcgacatcgggatgtgtaccaccgcatcgtacgtcttcagaagccaatgtcatttagttaacgtttaatagggagcgaattcttacagaataaattac

SEQ ID NO: 2231 - DNA, 6317 bp, Unknown
  16S sequences of unknown bacteria
tactcctcttattgtagcttaggaatgagaacgaataaagcacacctggctggtgcgctttacccggcaaatatattgtgacaaatgaggaaattttatgaaagaatatatcggtgataatattaatcaaatagcttttccgcttggcggtatcggaactggcagcatatcgttagcgggtaacggcgcgatagttgaccctgaaattaacggacatcccgacagagaaaaagactgcggttttacaaatttcgcgattaaagccgagtcggacggtaaagttacagacagccgattgctttgcggagattttatacacgactatatgggaacaatacgcggcagttacggcgaaggaaactcagcattgtccggttttaagcactttgaaaagtgtatatttaaaggtgagtttccgtttgcgcggattgaattgacggattcggcatttcccgcggaggttgtcttagaagcgtttaatccctttatcccgtcaaacgataaggacagcagtattcccgcggcatttttcacatttaatattaaaaacatatcggacagtaaaattaaatatacggttttgggaacggtatcaaatctattgaaaaacggcgggctaaaccgttataccgaaaaaagcggaataaaaatgataacccttaacggcgcgtctgataaaaaccgtgacgatagcattacaatcgcaacagacgcggagaatacggctcatcaggattattggttccgcggcggttggtttgatacgcttacaatgtttatgaacgaactcaatacagagggaacggtaaccgagcgtacatatgataccgaaaatcctaacggcaggggagatgcggctactttaactgctgctgtagagttggaacccggagaaattaaaaccattaagtttttaatcagttggtatgtgccgaaatttgatattgaagaatttcatttcggtccttcccgtaaaaccgaaggtattaaaaattattatgcctctttatttgagaactcggagactggggctttatacgctttttgtaattggcaaagacttttttcagacaccgagaaattttcgacggcaatgtattcatcttctcttccggaagaggttaaagaagcaatacagggaaatcttgctattttaaaatccaccacatgtttaagacttgaagacggcagcttttgggcgtgggagggagttcacagaaatgtaggctcttgcgcgggtacttgtcagcatgtgtggaattatgcttatgctttacctttcctttttccaaaccttgaaaaagggatacgcaccaatgagtttaaaaacagtctttccaaagacggaatgatggatttccgcttgcttatatcaatggatggcacctcctggggagcacgctcctgtgttgacggtcagatgggaaatgtggtaaagtgctaccgcgaatggaaaatatccggcgatgacgaatggcttaaagcaaactgggaaaatataaagaaatctattgaatatgcttggagcgaagaaaacttcgataaatgggaccctaataagagcggcgttataaccggcagacagcaccatactcttgatgttgagatgttcgggctttattcgtggcttaccggcttttatcacgcggcactgctggcaggcgctgaaatggcggaatatctgggcgaagaaaaaaccgcaaaggaataccgatcattatttgaaaaaggcagaataacgcttgatgaaacctttaacggtgaatattacgagcagtatgttgatataaccgataaatcgatgcttgaaaactataacggggcagagcattattgggacaaagagacaaagcaaataaaataccagatatgctcgggctgcggtatagatcaggtgcttgcggattggcacacaagccttgtcggactgccgaatgtatttgtaaaggaacaccgcaaaagcgcgcttgaggcaatttataaatataactttgtcaaaatgcacgataaccataatccctgccgagtttttgcctgcaatgatgaaaagggcgttacaatgttccgctggccggatatagaaagaaagccgaaaatacctgtaccttacagtgaggagtgtatgacgggatttgaatacgccgtagcggataatatgctgcaatgcggtatggaagataaagcgcttgaaattgtaagggcaattcgtgaaagatatgacggtaaaaagcgaaatccttgggcggaaatagaatgcggagcgagctatgcccgcgccatggcgtcatattcattcctgcttacatacagcggatttattttcgatatgcctaaaaagcgcatcggctttaagccgattagaaacggtaaatatttttggtcggttgacggcgcgtggggcaccgccaattgttcggacaaatgctgtgaatttaccgttttatacggtgaaattgaacttaaaagctttgttacggcattaagttccgtttcttctgtattaattaacggcaatgacgttaattttgaaaaagacggcgaagcggttattattaattgcgcattgaaagaaaacgacactttgataattctcaaataaaataagaaggtaaaaatatgttttaaaaatcgaaatggataacacgcgcaccgtggcgcgaatggagaataccggctttatattaaaaaagatgttgccttagcggtggttttttctccgaataacaatcaaaatatttttaatctgagttttatttgagtgaaataattttaaggaatgattttatgaattatcctaataacttcatatctgcgggctatgaatacgccgatattgagcgttttgtgcctgctccgtttttccgaaagaaatttacggcttcaaaattcaaaacggcggaaattttaataggcgcggcgggattttacaggctttttgtaaacggcagggatattacaaagggcgagcttgcgccttatataagcaatcccgatgaccttgtttattatgacggctatgatgtaagcggttatataaacgagggtgaaaatgttattgcggttctgttgggcaacggtttccaaaacaaccccggcggcgcttgttgggactttgacaaagccccgtggcgcggcgcgcctgaatttgcgatgcgtttaagccttacctccgaggacggagaggtgaccgagcttgaaagcgacgaaagctttaaggtatgcgagtcgccgatactttttgacgattaccgttgcggcgaatactacgacgcaaggcttgaagttcccgatttccattccgtagattttgatgacagaaagcttaaaaaagcggtaaaggtaaaagctccgcgcggcgaaaaaaggctttgcaaagccgaccccgtccgcatttacgcggaattaaagcctgtttcggttatccgtcaggaaaacggttggctttacgatttcggggaaaataataccggcgtttgcagactttcgcttaacgcgaaagcggggcaaaaaattacgctttattacggcgaatggctcaaggacggtaagctctgccgtgataatattcgctttgacaaccaaagcgatttgcaaaaggaattcgttcaaaagagcgagtatatctgcaaggacggcaagcagacccataccccaagctttatttacaacggcttccgttatgtattggttgaaggcataaccgaggagcaggcgaccgaagacctgcttacatatcttaaaatgagttcgcttaaaggacaggcgggcagctttacctgctccgatgaagttatcaataaaatacaggagataaccgttcgctcggatatttccaatttcaattattttccgaccgactgtccgcagagggaaaagaacggttggaccgccgacgcgtcgctttccgcggagcaaatgctgtttaatctttatcccgagaagtgctataaggaatggatgcgtaatatctataaagccctaaatgataagggacagctgcccggcatagttccgacagccggttggggctatcattggggcaacggaccggcttgggataatgttattataaatctgccttactatacctatatttaccgcggggataaggaaattttagaggagctttctattcctttaatgcgttacctcaattatctgttctcacggcttaacgaaaacggacttatggagataggtctcggcgattgggctcctcccggagtgggcgagggccagtttaaaaccccgcttgttgtgaccgataccatacttacctatgatatagcggtaaaagcggcgtttgtctatgatgttttgggagaagaatcgcaaaagcagtttgcgctaagtttagccgaaagggttaaaaccgcctttagggaaaaccttttggataagcaaagcggagctgtaaagggcgacacccaaacgggtcaggctatggcgatatattacggtctgcttaccgaggaagaaaagccgaaagcgctcgacttgcttattaaatatatagaagaagaaaacggtcattttaatacaggcgttttgggcggcagggttatataccgcgtgcttgccgaaaacggcaaggtcgatttggcgtatgatatgatagtccgccccgattatccgtcttacggcaactgggtaaagcgcggggcgaccaccctttgggagggcttttatcccgagggcggcagagtgacctcccttaatcaccatttttggggagatatttcggcgtggttctatacctaccttgccggtatcaggataaacccgacaggcaatgatcttgctaatatagatgttattccgcttttccccgaaaagcttgacagcgtaaacgcttatcacggtacgcctaacggcagaatatcggtcgcttgggagcgcgggggagaaaacacccttgctttaaaggtagaggcggacgaaagactgcacggaaaaatcgttttgccaaaaggatttgctttctcggacggctctgcggaaaaagagcttgatagcggaagctttaatttggtaataggagtaaattgaaaacaatcaatgccttatagctgttgaaaggaactgtcaatgatatgaaccagattgaaaaaaatacagtaaaagcagaaaatcagcttgcaaagaatcaatttattacctttattaaccccgaaggaaaaggaaaaagggtgttgtttgtaggcaattccataacaagacacggcataaagcacgaaataggctggcacaacgattggggaatggcggcgtccgctttagaaaaggactatgttcacatcgcggcaaaggaaattttgcaaaaagacagcgatgcggctttttgcatatgccaagcagccgaatgggaggtcaactattatgacggtgaaaaaacctttgaactctttaaagcggcgcgagattttaaagccgacatcatcattatgagattggtagaaaactgtccgatagataattataacagtgagcttttcatgcaggaatacggaaagcttgtcgcttatcttaacggttccggaaaggctgaaatcataattaccacaggcttttggaagcatattgcggatagtgcaattagtgagtacgcacataaaaacggatatccgcttgtggagctaaacgatttaggcgaagatgagtctatgaaggcaataggtctctttgagcacgacggagtggcaaatcatcccggtgacaaaggaatggcggcaatagcggagaaaatattaaatgctttaaaggagtttaattagatgtattcatattcaaaatttgaacatcactacacaaagtcgtactttaagtatgttgaacccatatccgaggattacagggtgtttgtaaacggagaagaaattcccgtttacacctgtcggatatcaaagtttccgtttaatactgtctggccgggacatcaaagaccgtttgaacagtccgaggcggcttcttttgtcaatatagtgagtgacgaagagattaagcttgaggtaatttcaaatattgaccataaaagagtattgattaagccgtattcaaaaaatattgaacacagcgagaatgacggcagaataacgttttctctaaaggaaaacggtcagtatgtgctggagtgcgacagtgtacagtcgtcaatgataggttacacttttctcaaaaaaatatgatgaaaactacattgagtaagactttggatgtttggaggagccgaaggcgacgagaaacatccaaagtcggcgctggcgagaccgccgaaaattttgtgtaaaagctgaataagagaaagcctttcagataag

SEQ ID NO: 2232 - DNA, 4742 bp, Unknown
  16S sequences of unknown bacteria
tacggacgtcggcaccatgccgaatctggacccggtgccagatacgctagaacatctgcagccgcagctggatgccatcgcccgcagcgccgtgtgccatgtccacccctacggggccatcaccatgggcgagcagggcaagcagcttgcagcaatgactgagctcgcgccctatgtcctggccttttcggatgacggccgcggcgtgcaggaccgtgcaatgatgcgcgaggcgatgcggcggtccaaggacctgggcaagctcatcgccgcccactgcgaggacaacagcctcctccacggcggctacatccacaacggcgcttacgccaaggctcatgggcacaagggtatctgcagcgagagtgaatggggtcccatcgcccgggacctggagcttgccgccgagacgggctgcggctaccatgtctgtcatatctcctgccgggagagtgtcgagctcatccgccaggccaaggccagcggcgtcgacgtcacctgcgagaccgcgccccactacctggtcctggacgaaacaatgctccaggaggacgggcgctttaaaatgaacccgcccctgcgcagccccgatgaccgggcggccctgcttgccggtctgcgcgacgggacgatcgacatgatcgcgacggaccacgcgccccacagcgcccaggaaaaatccggcggccttgccgggagcctgaacggcatcgtcgggctggagacggccttccccgtcctctacaccgcgctggtccgccccggcatcctgcccctggcgcagctggtggccttgctgaccgacaagccccggcagcgcttcggcttggcgcaagaccccctggactggaccattttcgacctctcccaggcctggaccgtagacccggagggcttctgctcccagggccgcagcacgccctttgccgggtggaccgtctacggcaagtgcctgcgcaccaccgtcggcggccgtgccgcctgggaggacccggcctggcagcagcaatcaagcacacaagcgcatcaagatcataaggaggaagcgccagaatgaagcagcaaacgctcaccgtgcgtgtcaacacaccgctgaccccccaggtctggcggatggtgctggagggcgacacatcggacatcaccgccccgggacagtttctcaacctgcagcttgacgggttctatctccggcggcccatctccatccacgactgggatgacacaagcctgaccatcatctacaaaaccgtcggcgaagggacgctgcacatgacaaagctcgcccccggcgccaggctggacgccctgacaggcctcggcaatggctacgacaccgccaaaagcggcgcggcccccctgctcatcggcggcggcgtcggcatcccacccctgtatgggctgtgcaagcagctgctgcgggagggcaagcggccgacggtcatcctcgggttcaatgcaaaagaagaaatgttcctggaggcggaatttgccgctctgggcgtccccgtccgggtgacgacggcggacggctcctatggcatccgcggctttgtgacggacgccatggcagaccttgcctactcctacttctacacctgcggccccatgcccatgttccgggcagttaatcaggccgcgaagaccagcggccagttcagctttgaggagcggatgggctgcggcttcggcgcctgcatgggctgcagctgcaagacgaaatacggcaacaaacgcatctgccgggacggcccggtgctggaaaaggaggagattatatggtagatctacaggtcaatctctccggctgggagcttgacaaccccatcatccccgccagcggcaccttcggcttcggctatgaatttgccgcgtggtacgatatcaactgcctgggcagcatctccatcaaggggacaacgcaagacgcccgcttcggcaacccgacgccccggatcgctgagtgcaaaagcggacttatcaacgccgtcggcctgcaaaacccaggggtggacgccgtcatcgagcgggagctgccgaagcttgcccagtgctatcagaaaaaggttatcgccaatgtcagcggcttctcgctggaggaatacagccagacttgccggaaaatggacgcgcaggagcaggtgggcattctggaggtcaatatcagctgccccaatgtccacaacggcggcatggccttcgggacaagcccagaagccgctgccagcgtgacccgggccgtgaaggcggtgacgaaaaagcccgtctatatcaagctcagccccaatgtgacggacatcaccgccatcgcccgcgcctgtgaggacgccggggccgacgggctgtgcctcatcaacacactgctgggcatgcgcattgatctcgcccggcgcaagccggtcatcgccaacaaaatgggcggcttctccggcccggccatcttcccggtggcggtgcggatggtctaccaggtctatgaggccgtctccatccccatcatcggcgcgggcggcatcgcttcggcgcgggacgtcgtggagatgatgctggccggtgccaccgctgtggagatcggcgcggcaaatctcatcaacccctgcgcctgccggaatattctcgacgagctcccggcggtcatggaagcatatcatatctcatcgctaaaagaaattattggaggtgcgcacgaacatgggtaaggacgttatcatcgcctgcgatttcagcagcaaagcgcagacactggaatttttggaccgcttcggcacggagcgcccctttgtcaagatcggcatggagctttactatgccgagggcccggccatctgccgggagctcaaagccagagggcacaagatcttcctggacctgaagctgcacgatatccccaacaccgtcaagaaggctatgcatgtgctggcccagctggaggtggacatggtcaatctccacgccgccgggacgaaggccatgatggaagcggccctggagggcctggccatccccggcaagcagcgcccgctgctgatcgccgtgacgcagctgacctcgacgagcgaggcccggatgcaggaggacctgctcatctcccgcagcctggacgagacggtcctgcactacgcgaaaaacgcccgggacgcggggctggacggcgtcgtctgctccccgctggaggctgggaaaattcacgccacctgcggcgctggcttcctgaccgtcacccctggcgtccgctttgccggcggcagcgccgatgaccaggtccgcatcacgaccccggccaaggcaaaggaaattggctctgactatatcgtcgtcggccgccccatcacccaggcggaagacccgctggcggcgtggcgcaagtgcgtccgtgaatttgtcgattaaaaatcgttttgaaaaaagaagcagtcgttgtaaggaggaacttagatgaaagaaaaaattgcaaaggatcttcttaagatcaaggcggtgttcctacggccggacaagccctttatctgggccagcggcatcaagagccccatttactgtgacaaccgcctgaccctctcggaccccgacgtccggctggacgttgaatccggcctggcggagatcatccggcagaattacccggacgtcgaggtcctcatgggcaccagcaccgcgggcatcgcccacgcggccattacggcgcacctgatggagctgcccatgggctatgtccgctccggcgcaaaggaccacgggcggcagaaccagatcgagggcaagctgctccccggccagaaggtcgtcgtcgtcgaggatctgatctccaccggcggcagtgttctggaggtcgtgaatgtactgcgggaggccggggccgaggtcctgggcatcgccagtatcttcacctacgggatgcgcaagagtgtggagcgcctggcggcggcaaacgtgaaaaatgtcagcctgtcggacctggacaccgtcgtcgaggtcgcagcggcggagcattatattgcagaggcggataaggcacggctgctacaattccgtgactgcccgcaggatgaaagctggattggaggcaacaaatgaaaaaagacctgatcgacatccgcgacctctcccaggaggagatcgacaacctcatcaccacggcggaggacatcatcgcccaccccgaggcctaccgcgaaaagtgcaagtataaaaagctggcgacgctcttctacgagccctcgacccggacgcggctgagctttgaggcagccatgtacgagctgggcggcagtgttatcggcttctccgacgccagcccggacggtctcctgctttgccgatatcattgccatgcggcactcgaaagagggcgcgccctttgttgccgcgcagaatgtcaccatcccggtcatcaacgccggggacggcggccacaaccacccgacccagaccctgacggacctgttgaccatccgccgggagaaggggcacctggacaacctgaccatcggctgctgcggtgacctgaagtttggccggacggttcactccctcatctccgccatgagccgctatccgggcgtccggttcatcctgatttccccggaggagctgcgcatcccggagcatgtccgcagtgaaattctggataagaacggcatcgactatatcgagacgacgagcctggacgaggccatgccgcagctggatattctctatatgacccgcgtccagcgggagcgcttcttcaacgaggccgatta

SEQ ID NO: 2233 - DNA, 8602 bp, Unknown
  16S sequences of unknown bacteria
tggctgatgacgaggattgaagatctgatgaaagattcgaataacaaaggactgatgatttatgtcaattcgccgggaggaagcgtctatcagacggatgaactgtatctgcagctgaaagaatacaagaccaggacaaaacgtccgatctatttttacttcggtgaaacagctgcctccggcggttattatatcgcttctgcaggggattacatatgcgctgaccgcaatacgctgaccggttccatcggcgtttatatgggaccggtatattccgccgagaaacttctggaaaaactgggcgtcgaagcggatgtcatcaaatccggacgcaataaggcgatgggcagcggattcgaggatcttacagaggaacagcgggcgatttatcagtctgtcgtagacgagatgttcggacggtttgtctgggtagtggcagaaggcagaggcatgagcgtcgaaagagtcagacagattgcggacggccgcgtctataccgccgctcaggccaaagacaacggtctgatcgacgagatctgttcctatgaagatgcggttcagagaatgcagcaagaagaaaatcttccgtatccggcggtagcgatcaaatacgcggcgccgaaaaatctatacagtgctattttcggtttacaggcgtctgtcaaagaagctctgtcatcagattcagagtcagaagcggagcaggttctccgacttatcgaagaaaacagccagccgggattttattacatgatgcagtagcagaggaaagaaaaagaaggaaaggcgaggggtgtcaagcaattttgcttgacacccctcatttcgtgtgttaatctgtcatagtgacaaaatgaagaaggtgtgtttatgatcgataagatgttcgagatcggcctgctttacgacttttattcggaacttttgactccgcatcagaagcgtatttctcagctgtatttcgaagataactatactctcgcagagatcgcggatgtgacgggcgtcagccgccaggcggtgcatgacgctgtttccaagtcggagaagtctctgaggagctacgaagaaaaactgggtctggcgaagcgcttcctgctgagagaggaggatatccgcaaagcatacgaagctctggacggaatcatccgacggcgttcggaagacggagaactgatcgccgaactccgttcgatcagagacattctcgacagactcggagaataaggaggtgtcccatggcatttgaaggcctttcggaaaaactgcagggcgtatttaagaagctcaagggcaagggcgttatcacggaagcggatgtaaacgacgcgatgcgtgaagtcaaaatggctcttctcgaagcagatgtaaactttaaaattgtaaaacaatttgtggccagcgtaaaagaaaagtgtctgggcgcagatgttcttcagagtctcacacccgcacagcaggtcgtaaaaatcgtaaacgaggagctgaccgctgtcatgggcggcacaaacagcaaactcacttattcgccgaagggatttaccgtgcttcttctggtaggtctgcagggtaccggtaagaccaccaccgccggaaagctggcatcctatctgactaagaacggtaaaaagccgatgctggcggcgtgcgacgtctatcgtccggcggccatcgatcagctggaggtcgtagggcagaaagtcggcgttccggtctatttggaccgggaggagaaacgtccggagattatcgcgcagaaagcggcgcaagaagcggaatacaaagggtatgacgttctcatcgtcgatacctccggccgtcttcatatcgacgaagagctgatggacgaactggttaggatcaaagatacggtaaagcctcatgaaattctgctggtggtcgacgcgctgaccggtcaggacgctgttaccgcggcagagggattcaacgacgccatcggtatcgacggcatcatcatgacgaagctggacggagattccagaggcggagcggcgctttccgtaaaagcggtcaccggaaaacccattaaattcgccggtatgggcgaaaaattcgacgcgctcgaaccgtttcatccggagcgtatggcttcccggattctcggtatgggagacatgctgagcctcatcgaaaaagcgcaggaaaattacgatgaaaaacaggcggaggatctggaaaagaagatccgcaaaaacgagtttactctcgaggactttctggagcagatgggtcagatcaagaagatgggcggtctgggcaagatcatcgatatgctccccggcatgggcggtcagcgtcccagcgacgaggatatggaaaaatctgagaaggaattcgtccggatggaagcgattatcagttccatgacgaaagaagagcggcgggatccgaagatcctcaacgccagccgcagaaagcgcatcgcggcgggttcgggctgttccgtcacccagatcaatacgctgatcaaacgttacgacgaggcgcgcaagatgatgcgccagatgacaaaatccccgaagcagatgggacgtaagatgagaaagaaaggctttcgctaaaaaccggctgaccggcggcggaggattttcaaaatagatagaatgaaatatcaaaatttattattttcaggaggtaaatgatatggcagttaaaatcagattaaagagaatgggcgctaagaaaaagcctttttacagagttgtagtcgctgactcccgcgctccgagagacggcagattcatcgaagaaatcggttactacgatccgatgaaggatcccggagaaatcagcatcgatgcggaaaaagccaagaagtggctcggaaacggcgcgcagccgacagacacggtaaaaagccttctcaaaaaatccggaatcgtagaataagagtggtggtgagcagcgtggtacaattagttgaggctatcgcgaagtcgctcgtagataatccggatgcagtttttgtaactgaaactgaagagaaacagggcattacgattcagctgaaggtggcaccggaagatatgggaaaggtcatcggcaaacagggtcggatcgcccgtgctctcagaaccgtagtacgtgctgcggcgactaaagaaaataaaaaagtaatagtcgaaatcgttcagtaaatctgtctggacccgcaaaacgcagactccgaagggtctgcgttttttgcataagtcgggcctgcatccagggacaattcttttttctttcggtgcggacggcaaacccggagtcgtgtgattttttgaaaattcttttatgtgtttcagcgagagcggtttacaggagagggaaaatatcgtatgaacagcagaaaggacagcagaattaaagtaggcaaaatcgtcagcgccgtgggaatcaaaggggaggtaaaggtctatccttacacggattatcctcagcgcttcgaagagctggattgtgtctatgccggagatgagaaactgcagatcgaaaaagtccgctatcagaaaaacgtggttatcgtcaaattttcaggttccgacgaccggaaccgggcggaggcgctgaaagaccgttttctcaccatcgacagagagaatctgagagaattggatgaagacgaatatttcatcttcgatctcatcggccttgcggcggtagatcaggaagggaggcgcctgggtaccgtcagcgacgtgatccagaacaccgcccaggatctgtatgagattactgcagacggcggtgcgaaatatttaataccggcggtccgggaatttgttacagagatcgatttaaatcatggtataatgaaaataaaaccgatcgaggggctcttaggcgatcaggaggaggtctgaacttgaatatcgacgtgctgacgctttttccggagatgatcgaaccgtagcggcggcgagcatgctgggaagagcttcaaaaaatggaatcctggacatcagagcggtaaacatccgagattttacgcagaacaaacataaaaaaacagacgatacgcccttcggcggaggggcagggatggtcatgtccgcgcagcctgtcttcgatgcgctccgttctgtggacgcgcaggacaagcgtattctctatatgtcgccccggggcagaaagctggaccgcgatctggtgaccgatctggcggcggaggagaatctggtgattctctgcggtcattatgagggaatcgacgagcggatcatcgatttctggaaaccggaggagatctccatcggcgattatattctcacggggggagaactggcggccatggtggtcgtcgatgcggtagcacgtatgattccgtcggtgctgggcaatcaggaatctcatatggaggaatccgtatactccggactcatcgaatatccgcagtatacgaaaccgagagtctatgaggagatggaagtgccggaagtgctgctgtccggcaatcataagctcatccatctgtggaaattcgaaaaggcttgtgagattacgaaagaacgccgccctgatctgtgggaggcgtttgtcagagatctcagcggtctgacgaaagacgagagaaaaatcgtggcccgtctgcgctgaacgaaagcagagcgcatttatctccgacggaaaagccgccggcagaagtgaattttgcggcggtttgctgcgtccgcattttcagagaaacaggacacggaggtgaatatcttgtccgagactacagagaaaaagaagaaaaaatttccgcggcggctgattatcccgctctatcttctgattatcgtactgctgatcgtcatcgtctatgcgctccctaccgttacgggagcgctgaagcagacgatggtggtggaatatggcgatctgaagatatcggagaaagccacgtgttatatcataaaaaatgaaaccctttattttgccaacggagaaggccggctgaagtatgtgtttgacgagggtgctctcgtccggggcggttcggaggtgctttatatcgaaccttccgaagtggataatgattcggatttgggcgttttcgaagatcacgcgcgccctttcacctcgggcagcacgctgctgaatgcaaagagcggcagtctggacaaagttctggctgatctcaggcagcaatacaacgaaaatgaagatatatcctttcggacagaaatcgacagatatatctcccgcttaaatgatataaagaagtcagagggggaagaggattcctcagagggagaattatcggagctcggcgttttgccggacacatatctgatttcgaaaccgggaattatcagttattcgatggacggctatgagagcgagatgagcccttataccatgaagcttctggatcgcgaaaaggcggagaaaatcgacgctgaggtctctgatctgagtcgtgagaccactcgctacggagaacctctgtttaagattatcgacaacagcgaatggtatgctgtgatgtggatcgacgagcgtgatctcggaaaatattccgaaaataaatctgtttctatgaagctgccggacggcgacgctacgggcagagtttacagcatatcggaaagcgacggcgaaatcatggtgatcatgcgttttaatgcgtattatgacagtctttcttctctgcggaaaattcagacagaggtgatttcttcggactgcagcggactgatgatccgaaattcttttatcaccagcaaggacggccagccgggcgtttacgtcctgggcgtagccggggattcggaatttgtaccgattaaagttaaggggaccgatggagaatattctatcgtggagtcaggcagttattatttatacgatgaagagacaggagaaagccagcgctatgagaccgtcggggtctacgacgagatcgaaaagccctgacgacgcagggaggcgacgagaatgggaacgatagcggaaaatatcgaatcgattcagaaggaaaaggcggaagcggccgaaagagcgggaagaaatccggaggatattctgctctgcgcggtgacgaagacgcataccgccgaggagattaacgaagccatccgcgcaggtgtgacggatatcggcgaaaacaaagtgcaggagatcctcgacaagtacgacaaagttctgccggtcagatggcatatgattggacatctgcagacaaataaggtaaaatatataatcgacaaggtttgtctcattcattcggtggattctttccggctggcggaggaaatcaaccgaagagcggcgcagcacggcatcgtgatggacattctcgttcaggtaaacgccgcctgcgacgaagccaaattcggcgtcgatatggatgcagcggaaattctggtgagggaaatcttggaaaactgcagcagcatacgtgtcagaggtctgatgacaattgctccttatgcggaaaatacggaggaaatacggccgtattttcaccagatgcgtcagctgtacgacagacttgcgcgggatatcagccatccttccatggattttaaatacctttccatggggatgtcaaatgaccgaattgttgcggtcgaagagggttctaccgtgatccgggtgggtacagccatcttcggggcccgcagctatacatagaaaatctatcggaaagcctgaaacagggaggtatttttaatgggagacgggttatttaataagtttaaaattctcatcggtgtcgaggatgcggaagaagagcgggaggtccagactgtatcggccgctcctgtagctgccgtacccgccggtgcggaggtgcggagagcacagcctgcttatccggacagaaacaacacatttgttcagccgagaatggatcataatcgggaaaataaggtggtaagcatgcagaatacaggcaaaaaacagtttaagctcgtggtgacggaaccgaagagcttcgacgagtgtccgaagttagtggacaacctaaagagcaaaaagccggtcatcatcaatctcgaaaaactggaaaatgagacggcgagaaagatctttgattttctcagcggagccacttatgcgctggacggcaatgttcagaaggtggcgaataatattttcgtatttgcgccggaaaatgtggatgtgatggctggcatggaacagaacagagccaacattccgctgaacgaaagcccttggcgcaagtaagggagtttttaggttatgggaacatattttatcgtaagagttattacaggattcggcaatgtgatttacgctgatctgtcttcaggcgattatgagctggtttgtcagtgcgatgcctcccggagcgatccggttttataatctgctggcgtcgctgacggagccgttcgtccgcccgtttcggaagcttaccgcgagatttgcgtattccatgggaatcgacttttcgcctctgatcgctattatcgcgattcagttgatctgcagattgatcgcagtgctgattctgtctatttagttcaccagaaaagattttttgaaaaatcgataaatcaggacgggccggaagcggcacgtccttttgcatgtatatatgagcataagggagcttcgtaagtatggtatatatctttctcatcgctgctgtggtggctgtcgatcaggcgctgaaatatgcggtggttcacaatctgggcatgttgaattccgtatccgttatcgataattttttttacattcactgtattccaaacgatggaattgccatgggaatgatgtcggggaggcagccggtcatcatcacgctcacttctctgattatggtcggactgtgcgcttttatcatcgtgtgcagaaagcggctgcacccgtttctcctgtcctgcgtcgcgctgatcgtcggcggaggtatcgggaatatcatcgatcgggtgcgtctgggctatgtggtagatttttttgaattccgggtctggtcctatatctttaatttcgcagatatctgcgtggtagcgggatgttttgcggtgctgttttatgtgttgtttgaagggaagttcaaaggcgggaaaaagcatgagcatgatttttgaagatgaaacagcggagacggaagcggaaagaacgcgggatttttccgggatttcttcccaagatccgcaggcggaatccgaacgcgcgtttgaaatcgaagtaggccagcaggcagcggggatgcggatcgattcttatctgacagaagagattgaggacgccgcccgcagctatatccagcgtctcatcgaggaggggcggatcgccgtgcagggaaggccgaagacagccaagaattataagctgcgtgccggcgaccggattttcgtccggattcctcctccgaaaaaactggatgtggcggcggaagatattcctctggacatcgtctatgaggacgatcatctgcttatcataaataaaccgaaaggtatggtggtccatccggcggcgggcaattacagcggtacgctggtcaacgctctgatgtatcactgcaaaaatcgtttatcgtctatcaacggtgtgatacgtcccggcattgtccaccgcatcgataaggataccagcggacttctggtagcggcgaagacggacgaagcgcaca

SEQ ID NO: 2234 - DNA, 4928 bp, Unknown
  16S sequences of unknown bacteria
agattagcaaagcgagtgaggatcgctttacgctgtgcgggggaggcctgcgaccttgtactgtttcccgccggctacgatgatagcgtacatgcggtttgcacctctcttctttgttagagtctcgctctcggggcggggacaggcccacttctagcccggtcgatgcggcgaagctagtataccatccctttctctaaaagtcaagacatttttcgcgacttttgggtcaccgggcctttttcatagtattctcccggggaaaaggcggcagggtctgggagaaacaggctccacagccgggcacagtccccttccttctgaaaggccgggatggtttttccctgggcgggcttggtgatgaccggcaaagcactctgcttgcgggaaagggccagggcctgccgccccttttcgcccacggccaatacctttatataagaagggggactctggcactcctgctttgtcagccccagaaaaccgcacagagccatgcgccgcagccgggaaaggggatagcggcgggttttggtctcttccagcgccccggtcagattttggtttttctgcaaagcccgggcaaaccggtgctccaggccttcggccgccccgggaagggcggaaagctccggaagggacaggctccagagcttacccagtatggctttttcacccagggcgggcagggccagccgtccggccttttgctcccggcggaaaatttcccggcactccgggggcaggtaggaaagggcctcttgggtttcgcctgcggcgatcttctgccgcaggaaggaggccgaggggaagccatcttccggctccatggcgtcgtggcccgcccctttccgggggatggccaccggctggatgggggaagaaagctgcaaaagggccttgccgtattcggtggccagaatcacattgggcaggcgcagaagggcggcttcttccttgattttttcatagagggcccgttcccgggcggcggcataggagatgccgcttttcagatggagcagggtgttggccgccgtttcgtgatccagaagcagccgggaaagctccatgatcttttcttctcccaccccttcggtgccgaaggacaggtgggtgacgcagcccagggcggcaaggatgcccacggccccccgggcaaaaccctctgccgaggaaagggcgtagggggcagggagggagagcaccaggtcggctccctggctgagggccatttcggcccgggcgtgaggggacagaagcgccggttccccccgctggacaaaataggaggacaggcacaccacaagcagggtgtcttcccccagcttttcccgggtgcgcatgaggtgataccggtggccccggtgaaaaggattgtattccgccacgatgccgcagatgttcatagggattttctccattttgatggttgtacttttaaaaaatatggtgtaaaatagatttggtctcattttataacaaaaataagagatttacaatcataaggagtgcagaagatgaaagtactggttatcaatgcgggcagctcctcgctgaagtatcagctgatggatatgtccaacgaacatgttctggccaagggcctgtgcgagcgcatcggcgtggacggccggatcagccacaagaccgccgacggcgtgaaggtggagtatgatgtgtccttccccacccataaggaagcctttatggagctggtgaaggtgatgagctccggcgagggcaaggtcatcgacagcatgagcgagatctccgccatcggccaccgggtgctccacggcagcgagaagtacaaggtctccactgttgtcaccgataccgtcatcgacgatatcatgtccttcaaggatctgggccccctccacaatccccctcaggccatcgctatgaaggcctgccaggaagtcttcggcaaggacacccccatggtggccgtgttcgatacctccttccatcagaccatgcctcccaaggcttatatgttcggcgtgccctatgagtactatgagaagtactccatccgccgctatggcttccacggcaccagccatcgctatatcgctcatcgcctgggcgagctgaagggctccctggaaggcaagaaggtcatcaactgccatctgggcaacggctcctctctggccgctatccaggacggcaaggttgtggatacctccatgggctttactcctctggacggcttcctgatgggcacccgctgcggcggcatcgacccctctgttgtcaccttcatcatgaagaaggaaggcctgaaccccgatcagatgagcgacctgatgaacaagaagtccggcttcctgggcatctccggtgtctccagcgactgccgtgacctgaacgaggccgcccagaacggcaaccagcgtgctcagctggctctggatatgttcgtctatcagatcaagaagttcatcggcggctatgctgctgccatgggcggcgtggatgccatcgtctttaccggcggcatcggcgaaaacgacgctgagatgcgtgagaagatttgctccgatatggaatacctgggcctgaaggtggaccacgaggcctgccagaacgcttcccgcaaggaggctgctttccaggcggccgattccaaggtggaagcctgggtcctgcccaccaacgaagagctgatgatcgctcgcgacactgtggagctgacctccaaataagcggcgtgacgccgctgtcatatcgcccagcggagtgcctccgcagtcgtactgcccgcaagggggcggtgtgtgagaaagcacctgagtgcttgcgggcacccctgagccttggttgcaaaaggtgcaaagccccgttggccctgttgcaagggcaatgggaatcaaacaacagaaaaatgccgccttcataggcggcattttttgtggcagagtgcctccgctgtcaacctgcgctcccgcgcttggcagatgatagagcacaatgccaagacagcaaaccggccccttcctgggcggtgtgccgtccaggaagcaccaaagctcaacgacgcactcggccggggagaattcgcccgcggaggcactccgctgactgtggcggcactccgtttacatatggctgggagagcggtgccaatcccggaaaagcaggctgatgcaccacagggcggaaagccccaccagggtgtagacaatgcgggaacccacgctgccggccccgaagagggcggccaccaggtcgaacccgaaaatgccgatgctgccccagttgagcccgccgatgatggcgatagccagggcgatcttatcaaacatggaattttcctccaatcgtgttgttgcctgccatggctgctgccacggctctatgggaagtatgccccaaactggatttgatatgctgaaaaggttgcgttataatgtttttatccgatacccatacccattcccgtttttcctttgacggcagcgataccgccgcagctatggaaaaaagcgccaggagccacggtctttcggccctggccctgacagagcactgtgatttttatcattttggcccctgtcctcactatgtccgcaaagaagaggactgccagcaggagatgttccgactaaagcaggaagagaacgatttgctgcttttgtacggtgtggagctgggccagccccaccacaacccggagcaggcccgggctttgctccggcgccatccctatgacatggtcatcggttcggtgcacaccctggccgatggccgggatatttattataccccctatccggacaaggatgcctgccgtgaggtgctggacatctattttgaagatttggaaaatttgctgaaattcggggattttgacaccctgggccacctggattaccccctgcgggtgatggaaggcccctgggaagagcccactctgatggaatacaaagagcgggtggctcccattttgcagaagctggcccaaatgggcaaagctctggagatcaacgccaaaggctgccgggaatggttccatcgccccgggccggaagagtggattctccgccagttccgggagtacggcggcaccatgatcaccatgggctccgatgcccattcggtggagaatgtgggaaatggcatcccccaggcctgcgttctggcccagaaagcgggctttgagaaggtgacggtgttccagaaccggaaaccccggcagtttgatattgtgtaaaagagcaaaggagaaatctatggcagtccgtgacgaggtctatgtggccgcctgttctgattatgaggaaaagcgggtggaagaatgcatccgccggatgtttgaggatcagggcggagcggaagtttttctgaaaaaggggaagaatgtggtcatcaagcccaatctgctcatggcccgggccccggaagccgccaccaccacccatccggcggtggtcaaggcggtgtgccgtgtgtttcaggagcagggagccaaagtgaccatcgccgattcccccggcggggtctataacaaaaccgctttggggagagtctatcgctttaccggcatggagcgggtgtcccaggagaccggtgccttcctcaactgggatttttccagccggaaacgccggtttcaaggggtgaaacagcggaattttgacatcatcgcccccatcgcccaggccgatgtggtcatcagcgtggctaagatgaaaacccatatgatgacctatttttccggcggcgtgaagaatttatacggcgtcatccccgggctgaccaaggcggcctatcactcccagcaccccggacggcaggattttgcccggctgctggtggatctgtgccggtatgtgcagccggcctacaccattctggacggggtggagagcatggacggctacaccagagtgcttatgggggtgctgttggtgctg

SEQ ID NO: 2235 - DNA, 7290 bp, Unknown
  16S sequences of unknown bacteria
cgataaaaatgcgccgcaggctctttttaagcccatctgcgtgcagtacggatttagatttttcgtaaccgaaaaatctaaatccgtatccagcgcagcagggcgaccgggttttcagggcggagccctgaatgacttttggttacttttcttcacagaaaagtaaccccccgccggcaggcgtacagattagagctttttataaagctttccccgccgataggcgatatctcactattacctaacgggtcgcgggggttggggcgcggaactgcgatttgccgaggaagcatccccgccggccggcggaacttatttgcccacgcagaactgctcgaataccttgtcgatggcttccgcactggcacggcggccggtgagggtgagcagggcatcggccgcctgctccaggcagaccgaaacggcatcgagggtctcaccggcggcgagggcttcgatgccctcccccaggctgcggcgggcggcggtgacgcactccaactgccgggcattggcgataatggccgcagtgggatcgaagtgagaaaggccgaccacctgccggatggcttcggtgagctccgcgaggccggtaccggcggcggcactgatggaaaccgaaacgggcgccacggcggctatggccgctttttcctccgctgtgagagcgggggggagatcttgcttattatagatgacgacggcggcgcggcccgaaagctgcgggagccattcgcgttcttcgggggtgagggggcggctttcatcaaagaccgccaaaatgaggtcgcactgttccagggcgcggcggctgcgctccaccccgatttgttcgatgggatcatcgctttgccgcaggccggcggtatcggaaaggcggagggtgagatcccccaggcggacggtttcctcaataacatcccgggtggtgccggggatgtcggtgacaatgctgcgttcccgaccggagaggagattcatcagggtggatttaccgacattggcgctgccgatgatggcggtggcgataccctgccgcaccatttgcccctgctgccagctatgctccaggcggaaaagggtggcctctacccgatttaaccgcgccagcagaacggggggagaaacctcctccacatcctcctcggggtaatcgatccaggcggagatgtgggcgcagcaatcggtgagagtatcggcggcggccagtacctcccggtggagggcgccttccatggcgccgagggcggcccggagactctgggtattctgggcggccaagatatcaatgacgctttcggcttcggtcaaggtcatgcggccgttcatcagggcgcggcgggtatactctccggcttcggccgggcgggccccggcggcgataacggcggccagcacctgcgacagcacaaattctcccccgtggcagcagaattcggcgacatcctcgccggtatagctgtggggggcgtggtagacaaacagcacggcttcatccaggagctgctccccgtgacagacacggccgaacgcgccggtatagcccggcatggtttccggggatttggcgggattcatggggcggaacacccggccggccaccgcaagggcctgcgggccggaaaggcgcaccatgcccactcccccgccggtggcggtggcgatggcggcgatggtatcacgcatgggggtcatcctttctgggaagaaatggggtagaatgaggtttgtgggaaggttggtggtcgcctggcggcatcaaagcctccctttacacaagggagactctgggtgtgccggcaggcgaaatggagctaagtcatagaacgggtcgcggtggttggggtgcgggactgcgattggccgaggaatggctccgccggcaggcggaatgggtatagcgcatactataatagaatattataccacaaaaaggcggcgttgccaatgcgtgattttatgccgcgggatggttgtaattttgggacagaattgctatactggggtaaaaggataaagattctgcaaatgaggagccttgacgatatattatccgcaaagagaggtgctgcccctatgatgagggattactacaaaaaaatgcccggcgaccgcaaggacggctggaagctgcgcaatgtaccactgttttttaccgtggtgccctttatcatgcgcacacggctggatagccagaactactatgaggaaacgctggatgtggagccgatgatggacttcctgaaggcgcacaaggaggatatgcccaatatctcgatgatgacgatatttgtggcggccatggtgcggatgatcagccagcggccggcactgaaccgctttgtggtgcacaacaagctgtacgcccacaattccatcaccatttccattgccataaagcgcaccatgagcgatgacggcgaggaaacgatgatcaagccgagctttgacccgcgcgataccctgcaggatgtgcagcggcggctggacgaagccattgcggaggcaatcaaccacgaggagggcaccggcattgacggcgtagccggtctgctgggcaagctgccggcgtggctgttccggtttgccgtttcgatgatccacttcctggataaccgcggctggctgccccaaaagctggtgcaggccagcccctggcactgcagcgccatgtataccaatgtaggctcgctgggcatcgggcccatctaccaccacctgaccgagctgggcacctacagcacctttatcgccatgggtaagcgggagcggcacaccgtctatgatgaaaacggcgatgcggcggtgcgccggacggtaggcatgaagatcgtgaatgacgagcgcatctgcgatggatactactatgccaactcgatgcggatgctgcgccgcctgctgatgaacccagccatgctgctggagccgcccaaaaaggtgatgctggatccggcggtggccaatccgctgatcaatgacccgaacgcgggggtggatgctgccgaagaagagcacagcggggcggagaccgcgctggtggactaaaaccgaatatgaataggccaacggcccccggagaaattcgggggccttgcttttggccccctcccctgggggagggggttgggggtgggggcgggtcgcggaggctggggcgcgggactgcgatttgtcccgccgaaggcggaagctgagcggcagggattactgctgatgcggcggtcgaaaaaacgagcaagcgagcagcgcgatgattttttcgggcaccgcaaggcggcaaggagcgcgattgttcgatggcgggatggaaacccgggtcgcagggagcgagcgtgggagaccatttttccaaggaagcctcccaacggatggggtggaaaatgtggaaaaccgacgggaaggggcgggttttggggcatttatgcggggaaaagctaccattgactgtggaaaactgtgtgaaaagtggggaaaacctctaccgaatgggtggatttatcgaatgtaaaataatgagaagcgccgcaaggccgcaaaaaccgcccgctggcaaagccagcggacggtttgcttttcaggcggttttccgggcgggagcgtctttctttaggcgggcaaagagcagtgccagcaggccgcacagcaccaccccggccgcaaaggccgccagccagatattcgcattggggaggaaggaggtagtgccatcgccattgaccacaagctcggcattcttcagcaccgcggcgccgatggcagggccgatgacccccggcaccagcacctgtgccacaatgcgcaggccctggaacaggccgacctgctccggcggggtgtaggtacgcatcatggcgccaaagatggcattgctggaaaggtagcccatcatcatgcaaagggagccgaaaaagaccggcagggtatcgcgggtgaagtacagtgcaaggtagcctgccatcaacagagcaatgcccggcaggatggagcggcggaagccgtgggtatcgtaccggcggccataaaaggcggtaaacaccgccgccagcacaatggccggagccatgaccaggacataatttgtcatgccgagggatttttcgtagtagaggatgaggtagggcatgaaaacctggatggagataccaaagcccgcaaaggccagcagggtgagatacagcaccttatgccggcggatgaccgaggggcggaagccatacaggatgctgccccaatagctgccggccggcgaaggggtgactttgggctcccggatgagccagaagccgacaatgccgatgaggatgaccaccacaccgatgatggtgaaaatggtgacccagcttgcggccttttccagatcgaagaacataaagccgccgaacaccaccaaaatggccatcatgggcatcatggcattgatgccctccgcagcgccgcggttggtatcatcggtgctatcggtgagccaggcattaaagcaggcgtcattggcggtggagccgaagaaggtcatgacgcaatccatgaggatggtgagattgacgcagacggtggtgaccgccacgcccgccgagaccatggggctgatgacatccacccggatgagggcaaagctgagaatggaaataccccacagcaggtaccccacgcagatgaaaattttgcgcttgccgacccggtcgctgagggcgccgatgaggatggtggtgagggtggccacaacggccgaggcggcgaccatcaggctgatctgggcggcggtggcgtggaacatcttatagatgaacacattgaagtacatgttttccaccacccaggccacctgccccaccagcgagaacaccgtaagggccagccagaaccggccgccgagctttgttttttgcatcgtaatatctcctgcctttcccggtaagtttgatgggagtgcgcggttataggcccagggccagccggtacgcccggcggcgatttatcgattggcggtgccgggcggcgttatttgattttactccagctcctcccgccgcagcacatacttgcaggcgctttcggtcgggttttcgtagtagctttcttccgttttgttcagccggtagccgcagcgctcaaacacccgccgcatagcaaggttactctcccgtgtctcaccgcagcagcgcgtcagcatcgaagccttcagctcctccgccgccttttgcagcagccggcacgccagcccctgcccccgccgatcaggggcaacaccaaggttcataattttcaggaaatccctttccccctgccagtcgtaaagaaacatattccccacgatctgcccattctccagcagcgcgtagtaatgcgcccgctcgtcctccagcagctccgtccagtcctctccgctccagcggtcgccgggggagaagcaccgacggttgaatgctatgatctccggcaggtcgtttttattcagtctttgcagcagcattgcacttaaccctcccgcttcgccgtggcaaagaacagctcggtgccgtcggcggagctttgaattccgctcacgccctttgccatggcaaagtagctttcggtatagaaaagcggcatcacaataaactgatccaccagcagggcttcggcattggcaaagaggcgggccgcttcatttacattgcggctggtgctggccatatccagcagctggccgtagtggggatcggcgcactggaccggtgcaccgccgcccgtgccgtagtgacggaataccgtatgcagctcgtcaccggcggtgtagctgtacagggccagggtaaaatcccccttggccagacggctgcggtaggtatcggcatccactatggccaggttcaccaccaatcccaggtggtccagccactgcttttgcagccagccacagaagccctccagggcggagcccttcggcagcagcagcgtgagcccctgcgggagctcctttacctgctccagggcggccgcggcggcacgggcattataagtgatggttagttgatcgctgcggcggaagtcggaggtggagctgccatcggggtaggtgacggagcccagcgaaaagcccttcgcggttagatcggtatagctttcatcgtacaggcgggcggcgccgggaatgatgctgccggcgtattcgtaggaatcgggcagatcaccgccctgggcatactgcgccagcgggaagctgtaacacaaggcctgccgcatggcctcctgcgccagctggggggaggcctgattgagcagcagggagacggtgccattgcggaaggtgagcaggctggtcttgccgccggaaagctgccccagggtattgctatccacccggcagcaatcggtaagaccctccagaaagcgctccatggtgttatccctccccagggtgatgatgaccccggtattctgcgctggggtaaggccggtgtagcggctgttggggatcaggcgaagcccggtggattcccagctttttaccgtgtaggggccgttatagatcatattctcgagagtattgccgtagcgagcgtgggtgccggtgtagaagtcctcccggcaagggaaggcctccggctctgccagcttttccggcagcaggggatcggtgcgggaaagggtgataatgacggtgcggtcatccggcgcggcaacgcccaggctgccgcgctcccctgccgccatcccggcgatggcggcaaattgctcccgggcggcggcgctgccgctgccctgctgtattctttggaaagcgaacacaaaatcctttgccgtcagcggctcgccgtcactccactggagattttcccgcagggtgaaggtatagcgcaggccatcggcactgacgctgtaattttcagcgcagccctcggccatggtgccatccggcaggcggcgcagcagaccctccatgcagtttttcagcaggcagcgctccagcgcggtggagcagtactgggggtcgagggtatacacccggccggagagatcggcacgcagggcggtggcggtgttcttcttgccgcaggaggcgcaggagaacagcaaacagagggccagcgccagcgccgccccccgcaggaggattctgttttttgggatgctgtttttcatagggaatcctttgggtcagatatcgttggagagatggtgggcgcctatccggcgggggtctgcttttctgtgaagaaaagtaggcaaaaggcctatttagatcaagtttgtggtcgccttcggcgtcgcggagtcaccggagggtgacggccggtacgcctgcccggc

SEQ ID NO: 2236 - DNA, 3073 bp, Unknown
  16S sequences of unknown bacteria
caatcagcttgtgcacatccgcaaaatgaagtccggtcgtcggctcatccagaaaaagcacctgcggatcgctcatcaggctcatcgcgatgtccaggcggcgtttcatgccgccggaatatgtcttgaccctatgacagcccgcttcctccagacccatccgcgcaagcatcgcatcagccttttctgacgcgcggggaatgtggcagagcgaagcgatgaggaacatgttctccttgccgctcaaggcatcatccaaagcagaaaactgtccggtcaggccgatgatctgatggatatggtccgcgtcacgcaccacgtcatgccccatgatggccgcctggcccgcatccggaacgatctgtgtcgtaaggatgcgcaccatcgtcgtcttgccggcgccattggtgccaagcagcgcgcagatcgtgccaggattgaccgtcaggctgatgcctttcagcacttccttctggccatagcttttcttcaggtttgatgtaaagatcgctgcagtcatgtcattcctcctttaaatacataccgaatgtatgtaatcagcctttttaaaattgcctttcggcaattttaatccgtttcttgaaaataaggcagatggtccatcgtgtctgtcagcgcttcatcgatcagcggcaggcccaagctttccagcatccttgccatgcaggaaagacggcggcggatggccgcgctgtctcccgggaagatcgaagggatcatccacaggtcaagcagcacgagcagctgtgaaagctcctgcgcatgcgccgtatgaatggatccatccgcgataccttcctcgatcagccgctgccagcgcgggcaaagctccttgatgttggtctcgagcatctgtgagagcacacgcgggtttttgatcagagggatggcctgacggttcagttccacttgctgggcgtctgattgattcaagcgcacggccagccgcatcttctgcagcccattgagatctttgcgttcctgtacttccgcaaacgggtcatgacgggcaaacatccgctgggaaagcgccaccatgatctcttccttcgaacggaaatgatgataaagcgcgccctttgtcagtccgcccagatcatccacgatatcctggatggtcgtcgcgtcgtatcctttttccagaaacagccgctgtgacacatcgaggatcttttctaccgtaacttccggatatttgttcctagccatctatgcgcctccatacattctcatggtatgtttatcataacatgccttcgcgatgccgtcaacattttcatgccaatggtatgtatcattcatgcgtcgctgcgcgcgaaagcattcttcatgcaagagctgagtgcaaacaacaccttgtccagcgtatccactgcggcttcgcgagccatcgcgctgatctcttcattggcctgctcacgcagcttcagccgttcttcctcattgtcctgctttgccagcaaagcgtcatagcgggcgatgatctcatggctctttgccgcaacatgcgcctgataacgttcgatgacgctgcgggaatcgtgatagctcgcatcggccatggccgcgatcagccggctcgtccagtagaagctgtccgtggataccgcagcattcgtgtcggcgagatatgccggggtcttttccacatcggcataaaacggaagcagcacattgaacggattggacgcaaaagcgatccactccagcacatcattttgcgggcggatctggatcagccccaaaaagctcgttcggttgatgccgatggcgcgatatttcccggccagcgacctgtcgccatagctcagataaggatcatacggtgtgccctggaatgtcgatgagagcacatatttcacatcctcgaccgtgagcttgcgctctggcaccatgcaccaggggatatcatccgattccggggcatgatctgcgtcggcaccatcccatttcacggtgtgcggatcccatgtgcgttctatgaaccaggcgcgcggggtattgtatacatgatccgcgtcatcatgggatccaaatgccagtctgggacggaatgtgccatccagcgaaagatccagatgattggtttccacaaatgcgcgaagatccgcactgcacagataatgggcgggatcgtcaaagacaaaggtgtcgatgcccagctgattgggcatggcaacatagacatcatcagggacccggcgtgccatccagtgatgaccgccgatcgtttccatccaccagatctcatcgtgatcgcagaaagcgatgccgttcatctcataggtgccatatgtttccagcagatgaccaagacgcaagacgccttcccgtgcgctatgaatataaggaagcaccaggctgacaaagtcttcctccccaagcccgccaggcttgccgctttgtgcatcatagaccaccaggggatctgcgccgagcacccgcggattggaagtgatcgtctccgtggcgctcatgccgacatttgcggcattgacgccgcaggcgccccatatgccttctccttccaccgcattaggcacagccgtatagcgcatggggtcatccggaagatcgatcgtcagatgcgagatgaccgaagtatatgtccgcggctgttcatcgggatggacgaccacaaactttttcggggtaaagctgccggcgccggaatcatcattgcgtgcgatcatgcatgatccgtcatacgacgctttcttcccgatcaatatcgttgtacatgccatattcattacctcccatacaagatattaacactgaacgcgccagatgaacagcatggtcctctcatcctgctttcaccagcaagcgcttttctgtcagcttttgcgtccgggcatctgccatgactcatgatccgtatgcagcagtgcttctgctttcgctgacaacggctcgcccaggaagtcttcatatagcttgcggatggctgggttttcatgagagaagcgcagcggtgctttgcggtccagctgatacagcacgctagcgcgttcttcagccagttcctcgccttcgtggatcggctggg

SEQ ID NO: 2237 - DNA, 10923 bp, Unknown
  16S sequences of unknown bacteria
aaaactttgcagtctgagtatgacgaagtaaccgtgacccgccgttactacagaagcggagacagcgaatactacatcaatcgaaagaaatgccgccttaaggatatatatcagctgttcatgaataccggtatcggacgcgaaggctactccattatcggacagggaagaattgccgagattatctcaaaaaagagcgaagagcgtcgcggagtattcgaggaaagcgcgggtatcgcaaaatatcgcttcaagaagaacgaatccgaaaaaaagctcgccgaaaccgaagcaaatatggagcgtatcggggatatcgagcatgaactcggagcgcgcgtaggtcctctcgaaaaggaatcggaaaaggcgcgcagatatcttgagctctacggagaaaagaagaaaaccgacgtttcgctgtggatatacgactccgataagctgcgcaccgcgataaacaagaccgacaacgacacaaaaatgtccgctcacgagcttgagatggcggaggattcaatcaaaataacatccgcgaaaatcgaaaggctgtatgagcagtcgcacctcaacaaagaagcggcaagacggaactacgacgaaacctccgcggcgcaaaaggaaatgtcggacgcaagagccgaagcaaaggttctgctgaaagaaaaagcacacagcgaaagcctgctcgacacggaaaaaaagctcgcggaagtatcgaaaaacaacacagaaaccgaaaacaagcaccttctcgagatacagaaaaagctcgatttgataggtgaagaatataaaacggaaaaaacggcgtttgacaagctgacagaggagcaaaactccgcacggataaagataaagcagtacactgatgagctggaatcgcttctcaccgagcagaagagtgcggaaggagagcttaccgacctcagcataagactgaacgtgcttgaaaacaatatctccgcgcagaacaaacgaagcgaaagcattgattccgacataaagaaatacgaaaacgagatagaagccctcgacaaggaagcggcggcgtcggaagaacagatatccgtatacaaaaaaagctccgacgaaatcggtgaaaagatagcggagcttaacaaaaagctcactgcaatgcgcgaggaatacaattcagccgacagtgaagcgagaaaaaagcagggagactacgactcgctcgaatcgagaataacagcgctttcgaggatgcaggagcattttgacggctacaacaactccataaagcacatcatgaacgagaacaaagccggaagactgcgcggaattcgcggacctttgtcgtatttgattcgcgtagagaaagagtacatcgtagccattgaaacctcactcggagcggctctgcaaaacatcgtaacggatgacgaaaatgccgcgaaatcctccattgaatcgctcaagagaaacaacgccggacgcgctacgttctaccctctgactaccattcgtgcgcaggagagaagccgcgattactacggtcttgagtcctcacgcggatttgtcggatgggcggacgagcttgtttcatgcgacgatgagtaccgcacaattgtaaaatctcttctcgcgagagtggtggtatatgataacatcgacaacgcctcaaacgccgcaaggtcaaggggatggaagatacgcgccgtaactctcgacggtcagcagataaacgcgggcggttctttcacaggcggtcagacaaaacgtgacagcggtatgctctctcgctcttccatgatagattcactccgcgaagaacaagccgaagccgcacacgagcttgacgaaataaagaaaaagctccgtgaaatacgcgaaaaaggtgctgtcatatccgccgacgtaaaatcggaagaggacagacgcgggctgatagaagcgctgataggagcggaaagccgaaacttcagcgacgcggacggaaagagaaaagcactcgccgagcttgtttcaaatatggaaaaggataaaaaaagtatatccgagacaagcaaatcaaacgacgacaacctgctctctctccgtgaaatgatggaagcgcagaaaagccgcatcggtgaaatcacggaaaagcgcggtgagacagccgtacttcgcggagaattggagcttgaagccgacgagagagaagagaagataaacgacacaaggatacacctcgccgagctttcaagagataaggaagcggcggaaaactctcttgccgaaaccgaggagcgaatcaaaaactacgcaggagagtacgacagccacacaaaatccgctttggagtacgaaagcagcataaaagagcttgaagctgccgtcgaggaaaaaacagccgctgcggatgagcttgaaaaacagataacggctctgcgcgacaagcaaaagaaccttgacgaaagcggagacaagatagatacgcagctctcgtccctcagacagacggaaaaggagcagacctcgaagaaggagcttgtgttcatagcgcactcgaagaacgaagcgaagctcacatctctcaaggaaagcgaacagaagctcagcgcgaagatgtgggaagactacgagctgacatactccgccgcagtgaagttcgccgaggaaaacgactgccacgtgatagaggacggggagagaggaacattccagaatctccaaaacgagtacaggagtaagataaaagctctcggacacgtcaatgtagactcaatcgaggaatacacggacgtgaaaaaacgctacgagtacataaaaactcagctcgacgacctcagagcgtcaagggaggatttgcttaccattctcggcggcatagaggacgacatgaagcgcatattcgtggaagccttcgctaagataaacaagtatttcggcgaggttttccgtgagctgttcggcggcggtcacgcggaggtaatactcacagatcccgaaaacgcgcttgaatccggaatcgagataaacgcggctcctcccggaaaaacgataaagaatctgaatcttctgtccggcggagagcaggcgttcatagcgattgcattgctttttgcgctcatcaaggtgaatccgtcgccgttctgtatttttgacgaaatcgaagccgcactggacgaggtaaacgtcacaagagtaggcagatacgtgaagaaatactcggatgagatgcagataatcatgatatcccaccgccgcggaacgatggacatagccgataccctctacggcgtcacaatgcagcagagcggtatctcaaaggtgttcacgctcggagtcggtgaggataacgcggagctcttaacaacaaaataaaaaaataacataaacggggaatacaaatgggattttttgacaaacttaaagaaggactgatgaagaccaagaacgccgtgttcggtcaggtcaacgaagtcataaagaatttccgcaaggtagacgaaagccttctcgaagagcttgaagagataatgatctgcgcggacatgggaacgaataccaccgaaaaagtaatcgaagagctgcgcgacagaattaaaaccgaaaacataaagaacgcagacgacgttaaaaccgcgctttgcgacattcttgtaaagcagataggcgaaggagaagaattaaatctttcgacaacgccttccgttatccttgttatcggagtaaacggagtgggaaagaccacatcaatcggaaaaatcgcgaataacctgagaaaagaaggcaaaaaagtcatcgtagcggcggcggatacgttccgtgcggcagcgatagatcagcttgcggtgtggtgcgacagagcgggagttgagcttatcaggcagaacgaaggtgcggaccctgcatccgttgtgtatgacgccatcgcagccgcaaacaagcagagagccgacgttctcattatcgacactgccggacgtctccacaacaagagcaaccttatgaacgagcttgcgaaaatcaaccgcatcataacaagagaactgcccgacgccgcacgcgaaactcttcttgtcctcgactccacaacaggacagaacgccgttattcaggctaaaaagttcaaggagaccgccgacatcacgggacttatactgacaaagctcgacggaactgcaaaaggcggcgcggtattctcgataaaggatgagattgacattccagtgaagttcatcggagtaggcgaaaaaattgacgatatgcagccgtttgacgcgaaaatgttcgttgacgcgctgatgcaggaggacgaaaaggacaaagacgaatcagaaaacaacacatcggaggaagaaaacgatgactgagatagttcttgcatcgaataacaggaaaaaaatagctgagcttgaaactttactcgaaaaatgtgcgtctaaaacaatatcggtaaaaacactgcgcgatatcggatatactgacgagatagtagaggacggcacttcctttgaagaaaactcgctcatcaaagcaggaactcccgcaaagctcggatatatcggaattgccgacgactccggactctgcgttgacttcttaggcggtaagcccggcatttattccgcaagatactccggagagggagcaaacgacgagcgtaaccgcgaaaagctgcttcgtgagcttgacggtgtggcggaagaaaatcgcggcgcggagtttgtctgcacagtctccctcgtcctgccggaaaactcaccttacgttatcccaaaggagtggagaatatcgtcggagctggcagagaaatccggcattcccgcaaagagagcgatggtggttcgtggaatctgccgcggagttatcctcacggaagagcacggcgacggaggcttcggatacgacccgctgttctacttccccgagtttgagggaacattcgcggagatatcgcaggagaaaaagaattccgtatcacaccgcggacgcgcaatgagtgaatttatcgaaaaactcaccaaagtattagcctgacaaggagaaaaatcccgaaaatgcttaacagtaaacaaagagcaaaactgaaatccatagcttccgccgaaaacgcgatattccagataggaaaaggcggcgtaggcgaagctgcggtaaaatcaatatacgacgcgcttgaagcaagggagctggtgaagattagcgtgctcgacaattccgacacagacccgagagaagccgccgagcagatagcggagcttacttcatccgaggtagtgacggttatcggcagaaagataattctttttaaagtcgcgtcaaagcccgagaagagaagcgtctccgcactcatatgaaaaaagagagaatcggacttttcggcggaacctttgcgccccctcataaagggcatatacacgccgccgagacaatgcttgaatgcttatcccccgacaggcttatcataatgccgaccttcattccaccgcataagcagaaaatgagccttgatacacccgagcagagactgagtatgtgtaaagccgcattcggaactctcccgcgcactgaaatctcggactatgaaataacaaaaggcggagtcagctacactgcgataacgctcgaacacctgaaaacggacgggaacgagatatgcctgctctgcggtagcgatatgttcctctcacttgagaattggtatcattccgccgatatttttgctatggctgacattgcggtagttccgagatattcagacgacgtgagcgcgctggaagaaaaaaaggcttattataagtcgaaatattcgtccgagatattcataatcggcaaagatccgtttgaaatgtcgtcgaccgagatacgtgaatccgtgagggaaggcaaaaatctcgaaaaatatctcacggacggcgtcattgatattataaaaagagaaaaactctattcaaactgatatgaaagacaaaattatactgagcaaagaaaacatagaaactctcgcggagcttgtgaagccgtacctcaccgaaaaaagatacgagcatactctctccgtaaagcgggaagccgagcgccttggagagatattcctgccggatgaggtgaacaggcttgcggcgtcggctctgctccacgatataaccaaaaaaacagatgcaaaaaaacagttgcaatactgcgaagaatttggtataattatcggaaaagacgaattatattcacccgccgtatttcacgcgataacgggagctgaggttgcggggcgcgactttcccgactacacggacgacgaaattatctccggcgtgagatggcatacaactggcagagacggcatgacggtgtttgaatctataatattcctcgcggattacatagaggaaacaaggacttttgacgattgcgtagctgtgagaaagtatttttacgacaatatttcatcgtgcgcggataagtttaaggttttgcgtgaaacgatggtgtatgcgttcgaccttaccgtaagaagacttgtagacgacggcggaataatcgacggggatacggttgcggcaaggaatttctttatcatctccggaaagcaaaaacaagattaataccttctgaagaaacttatactcagagactccctaaaccaatcgaaaggctgaatattaatgcagaacaataaaaaagacgcagaagatgtctccgcatattatcccgacggcgacgcggaaaatatggaaaaagacgatcttcaggaagaattctacagcaaaaaccagaagaaaaagaacaaaatcaagaaaaagaacgccagactaacaaaatctcaggttgctcttatcgcggttatctttattgtttatacggcgataatctttacggcggcatggctgattttctataagcctgcacagaatacaacaaaagagcttccgtttgaaacagaccctgccgaaacgcacgatgaagaaaatcccccccttgacggaaacaaaacaactgacaaaaccaaagataataacgcggtcataaaagaagaatatactgaaaaaaagggcgtttacaatattctcgtggtaggtcatgacaacgaagcctctctcgcagacgttacgatgatagtaaacgtcaacgaaaatgacaagagcataacagtcatgcagtttccgagagacacgcttattaccggcgactacgctccaattacgaatcagataaacaacgcgttcaatacattcttcaatgatgcgtacagaagcggcgaatccgacccgtatatgacggctgtcaaaaaatacgaggaaatgcttgaaaagagcctttgcataaacattcagttctccgtgctcatgggtcttgacggtttccgcggaatagtagaagctatggacggagttgacgtgtatgttcccgcagatatgtactactccgacccggaacagaacctttatataagcattccggcgggatatcagcatctgaacggagcgaacgccgagggatttgtacgtttccgctcgggatatgtacaggctgacctcggtcgagtaaacgcgcagaagatattcctcaccgccatgttcaataaagtcaaggcgacggtaaaatccgctaacgtttcggcgctgacaaacatagcgaacgaagtgttcaagtgcgtcgatactgacatgagcgtgtctgatatcatttacttcgctaagctgtttttgaatatcgacctctcaaatattaatatgatgacggttcccggaaacatggcaggcagattctatgtggtgaaccgcgcgtcaacgctcaaagtgataaacgaatactacaatatctacaacaaggaaatcagcgactccatcttcgataagaattacctcttctgctacactgatttgcagtatatctccgacgtttactttgatacctccgactctatttttgacggagttcacaacgcggaagacattgacgatgagtcgatttacattcccagaacataacgaaaaggattggtgaatatatggatacagaaaccacaaagctgcctatagaagaaaaccttaccgcggaagcactgagagatcccgaaaagctcgcccagttcatcgtagcggttctcgactctaagagagcgaagggaataaagctcctgcacgttgaaaaacagaccgttatcgccgactattttgtagtctgcacaggtaactcaagaacacagatacgcgcgcttgcggatgaagtcgagttcaagctctcccagtacggcatctctcccagtcataccgagggcgcggattcgggagtatgggtgctacaggactttgactccgtcatcgtacacatcttcacacccgacggacgcgatttctataagctcgagaagctctatcaggataccaccgaaaaggatatcacagaactgataacagaagactgataataattaataaaacataaggaagtcaatcatgagatacgattttggcaaaattgaaaagaaatggcaggacagatgggacgaagccggaattttcaaagcaaccgacgactattccaagccgaagttctacggactggtagagttcccatatccgagcggagcgggaatgcacgtcggacacatcaaggcatattccggacttgaagtaatatcccgcaagagaagaatggaaggctacaatgtgcttttcccgataggatttgacgcgttcggacttcccaccgagaactacgctataaagacaaacactcacccgagaatcgttaccgataagaacatccataagttcacctctcagctcaagagagtaggcttctcctttgactggtcgagagtagtcgacaccaccgaagaggattactataagtggacgcagtggatattccttaaaatgttcgacgcaggtcttgtgttccgttcaaaggctcttgttaactactgcccgcattgcaaggttgttttgtcaaatgaggattctcagggcggcaaatgcgacgtgtgccacagtgatatcatccagaagtcaaaggatgtttggtacctcagaatcaccgaatacgccgataagctccttgaaggactcaaagacgtcgactacctcccgaatatcaagctccagcaggaaaactggataggtcgttccgagggtgcgttcgttaatttcgcgctcacaaactgcgacgaaaagctcagaatctacaccacaagatgcgatacaatgttcggcgcgacatttatggtaatagctcccgagcatccgataatcgaaaaataccgcgacagaatcaataacatcgccgagcttgacgcatacaaggacgagtgcgcaaagaaaaccgaattcgagagaactcagctcaccaaggataaaaccggcgtgagaattgacggtatcgccgccataaaccccgtaaacggcaaggaaattccgatatacatctcggactatgtcatgatgggctacggtacaggcgcgattatggcagttcctgctcacgacgacagagactacgaattcgcgaagaagttcggcattgacataatcgaagtcataaaaggcggagacatttcaaaggaagcatacaccggcgacggtcctatggttaactccggcttccttgacggtatcgcgacaaagaaagaagccatcgcgaagatgctcgaattcctcacagagaggggaatcggcgaaaagggaatccagtacaagatgaaggactgggcgttcaaccgtcagagatactggggcgagcctattccgatagttcattgtcctcactgcggcatggttggagttccgtatgaccagctcccgctgaagcttcccgatgtagaaaactttgaacccggtgaaggcggagaaagcccgctcgctaagatagattcgttcgtcaactgcaaatgcccgaagtgcggaggagacgcaaagcgtgaaaccgatactatgcctcagtgggcaggatcatcatggtacttcatccgttattgcgacccgcacaacgacaaagctctcgcgtccgatgaagctatgaagtattggcttcccgtagactggtacaacggaggcatggagcatgttacccgccacctcatctattccagattctggtatcgcttcctctatgatataggcgtagttcccacaaaagagccttacgcaaaacgtaccgcacagggccttatcctcggtcccgacggcgaaaagatgagtaaatccaaaggaaatgtcgttgacccgaacgatgttgtcgacgaatacggcgcggatgttttgagagtatacatcctcttcatgggagattactcatcctccgctccgtggaatgaaaacagtgtaaagggatgcaagagattcctcgacagagtggctgctcttacagatatgatatcaggtgagaagtccgataagcttgaggtttcgttccataagacgataaagaaagtcacctccgatatcgaggacatgaagttcaataccgcaatcgccgcaatgatgtcgctcctgaacgatatctacgacaacggttcgctcacaaaggaacagctcgtagacttcatttcgatcctctgtccgttcgctccccatatctgcgaggaaatgtgggaaaccatcggcggaaaaggcttcctttcaactcacgagtggcctaagttcgacgaagaaaagacaaaggacaacgaaatcgaaatagccgttcagatctgcggtaagctcaagggaacgataaccattactcccgataccacaaaggaagaagccctcgctctcgcacttgcggatgaaaagataaagtcgctccttgacggcaagacagttgtaaaagaaatctatatccccggaaaaatagtcaacatcgtggcgaagtaatatattcagaatatcctcagaaaattttgtcgtaataaaaataatttgtgattttgttatggtacaatagataagtaacaacgacagaatggaaaagacaactcaaaaa

SEQ ID NO: 2238 - DNA, 3187 bp, Unknown
  16S sequences of unknown bacteria
cttcgcgctgaataactttgccctctgcatcggcctcactctcgcctttcttttttgcggacgtgccgcccgcctttgtggaagtactgccaccggatttcgaagctgccgtgccgccgcgctttccggaagagaggttgatggatttcgtggaaccggatggttttttcaccggattgcccgtcccggatccagagcccgaaccactgccggatgcgcctgctttcagcttctgcagctcctttagcgccttttccagcacactgtaattgccaaccttcgctttcaattcctcacttaaggaattgtaggccgtgttcgcctcggtgatctttttatctttatccaacgtcacctgcccgatcgcagaaatgagctcctttacatgcgacacctcaagctcatcagcttttgccgatgcctgctgcaaggccgccttttcctctgatgtaaccagggctttctgtgtctcatttaatgaattgtaaagggccactgctgtgcgcacggaggaaacattttcatatgtcagcttcgataccgccggaagtgccttgatcagcctttgcacctctgctgtcttgtcatagtccgattttcccgccacatccgtcatatcatagagccggttctgcccgtttttgtaccgctcataagccgtcagtgcatagtagccctgttccgttgccatctgatttatcgtaccggaggataaatgcctgaatccaccgcctgcgacagaaaatgaaagcaggccatccatagcggatttgccgtttttgataaaccggctgtccgtattcggatcgatcccaagggaggagagtgccacgatgacctgcgaacagctctccgccgtactctctccggcagatgcatacgtgccgtcggagagctgaaggtcggaaaggcgctgcagcgccgtatcgaccgctgtctttacctgtgcattgctgtcataatacggagccagtgcctgaatccccatgccggtcagatccgggtctgccaccgagccggacatcgcccagccgccatcctgtgtgcggtgatccagaatgtactggatcaggttttgccgcgtcgtctgtgtcttccccgctgccgccgtcgggatctcataattatgggaatcaaacgcggtcaacgcaaacatcgcaccgtttaccccctgccatactgtctggtcgaagtctgataatggttccagcaggttatacccgccgacgttcgtgacatcctcgccaagtgccgtcagggccaggatgacgcgggagtattccgtatactttttctcatggaggatgccctttctctcttttacctcctgaatgacatttgccttatactggctgtatactgaagcgtcgacctcctgcccgctccgtgcaagacctaaaatctgccactccccattgatcgagccgatcgacggaatcgactgcttcgccgatccggcgagctcctgtccggtcgaggtgtagacatccgaaatctgtgcaggagctgcatagagggcgataccggagatgacttccgaagaagcttctgtagaaagctccgtttccgtctctattgcggatgcagccccgctttctgtctcagattctgattcgcttttgttcgtagattcttctacatgatcttttgctgtttttttctcatcggaattgttttcagatgattctggtttttcttcgcttgaatccgtttctgatcggtcgctatcctcagcaaacttcacaagcagcactgcgcgtaccaccatcgtcccgtccgcgccgagtacaccaagtgcgatctccgccgcatacgtcccgtcctcatcggtgataccgtagaccgtgcgctgctcaacgctcatctcggatcctttgaaggtaaatttttcaagtgggagcgtgcaggtaccatcctgcagctgcagcggatatacgaccacgccggataactgcgccgcactgtagagtgccgtatcactatccaaaaggtacgggcagaactgccacttgtttttggattctgtaaaatacccaccccaacgtgcaaagaataaaagatccgtcagacccgtcccgcagtcatttcccgtcttctgcacggaaagctgaaggccatccgtcccctttggtactgtcacctgaaaaataccgtccgcatagtccaccggatgcgtcgcaccctgacaggtgatctgcgccggtgtccggatcgcagaaaccggaagcgctgtgccatcctttgtgcccacggtaaaggaaagtgtttgcgtcagcgccgggtctgtctcaccggcctgatccttctttgtattttcatccttctttttgtcatccgcttctgcgcctttttctgaatcagactccgtttcggtagtcccggcttctgtatcgttcttatccgtcacatcctgaccggaagactctgccccggtctcagaggccgcttcggagcttttttctgtacctgttccgacatgatccgcaggctcacctgacgtcgtttcttcggtcgcatgttccgtacctgcagtcgctccatcctttccggaatcagccacagaggaatcctgcgcgccttccccggccgatgcgctgccagcttccatgccggacgtctgtttttcttcttccgccctcacagccgcttctgtctctgtcgcctttgcttctgtctgcaccggagcctgtgtctcctttggtacgctctgtgctgccgtctcgacttcttttgctgccgcctctttctgtacctgtgtcgctgcttcttctgcctgcaccggatatagtgacaggctgaccgccagcgagcatgccatcgtcacatttaagagccgatatagtcctttatattgcttcatttctttcacctgccctccatcagcccataccgccaccgacgtctgcaccgagaccgttgcacgtatatgtccagacgatcgtatcaccatcctccagatagtaagcggaacagccatagttcgggaaccaaccgtttaccttgtacacccagccggactggttgccacagtcaaattcatataagttgttgatgccctcgacatagtagctgttgtaaagcggagtccacgatgcttccatctggatgcccgcgtaagagcagacgcgggataagacgtcatagaccgtctctcccttttcaaattctacggtactcgtgctcagga

SEQ ID NO: 2239 - DNA, 32759 bp, Unknown
  16S sequences of unknown bacteria
agtatatctctatcagatggatgatgacagcgaagttgtagacttcattatcatcgtagaataataatgcattaaaaaacataaaaagaaggcggattaccgccttcttttattttgctatgttatatcgcagcttactctgccggatatgccattacaacgtcaaatcctgttgtatcatcatctgtatcgtagagtgatacggagcagtttctgattgatgaaagcgaagtctttactgtccattcttcatcatcagtatcccatacatagatgtaagcgttgtcagcaattctgtaagaatcactaccactatcatttgaaacagtgataactcttccgctgatctttgttactgtagcagttgttgcagcaacatattcattatcaccagcattaagtccgtgagcttcgagcttagtgattacgccgtccgcatcaatcgagatctttaagagttctacagctgctccagaagtaacggcattatttgctaaagctctttctgcagctgtaaggtcagtgattacatctgtcagaacacggccgtctacgataacatcgaagagtgttgcatcgtctccgtcagcatcctcgcctgcgatatcgcttaccttaacgataccgtatgattcatcgctgttgccaaggtcatcagcatctactacgataacagcaatttcaccgtccttcgtaactgcgcctacagtgatagcatcatcagtattgatatcagcaatatcgcctaatgagtaatcgccgtcgtcatcaacgaatactacaacgctgttcttaactacagtctttccgaaaactgaaccgtcatcagcaagcttaccatttgttggattaaccgcctgttcttcaaggtcatcgatctctccactcttgttgagtgagaatgtaacaatgctgcctacagttatagaagctgttgttgttacatcatctgtatcaacaacgtaatcagtttcgtttccttctttgtcaagaagcttgagcatagtgtttctgccggatgttgcccacgcgcctgttactacagcgtagttgtctgctttaccgtcagttgtatcccagtcatagatatctccgttgtaatcgagacgagctgttccttcatctcctactgcaagagttgcaacatcgttattagcaagatagagcttgttgccattgattgtgtaaacacgaccgtcaacaccatctgaatccgagcctattcttgttactctgcctgttactgtctctgttccaacttcaatctttacgatcttagcgctcgaatcactctcgtttccgagtgtatatacatatacaacatcgtcttccgctatatcgctgaggtcatctacaccaagcagtgaatatgcgttattgtcgatttcatcgtcatcgtctaattcaaagtcgattccgaggagcttctggtcttcattgatttcatcctgtacatcactgtctgctaaagcgtctgctgtgattgtccaagttgctattgaatagatttccttgattgtctttccagagagttctactgcgatcgttacttcttcagccccatcatcctcatcaatagtatcttctaaggctctaactgcatcatcaacatcagcatttgtgaagcttgcaacagtagttgctactacatccgatgctctgtaatctacatcgtcagctgtgaatgttgttccgtcaagctcacctgttaagaatgttgagataggatctaccgcaacgatttcatcgtctgaattgcgataaatgtttgcatatgctccaacatactctgtaagtgaaattacagaatcatcatcgtaataaacgacatccttttcctgtgtgcagttaagacctgctgtgaggagcgttctgtagatttcttcatcgtcaatcttttctgcaacgattcttgtagttgttccgtcagatgctacctgtacaagtgctacaggaagtgcattgtagattacctgtgctgctgaacctctgttgattgttaccgctgttgctacatcctcataaagtccgagtgtctgtcccagcgatacatagtttgacggccatgaacctacaagtactgatgagttgttagtataaccgatagctctcagtatcattgtcattgcttcatttactgttactgttctgcctggcattgcattgccgttgccgtctccgatcattatacctcttgattcacagaatccaaggtactttactgcccagccgtatcctgatacgtcgttaaagcttgttgatgtgtaaccagcaagtgcgctttcaggaatagcgagggctcttgtgatcatagcagcgaactcggctcttgttacgttattgtccggcttgaatgttccgtctgtataaccttcaacaattccgaggtcgtttactactgtgatagcctgttcgttggctgttcccgctacatccgacagcgctgtatgcgcaggagcagcgaataccattgagaagctaccgagtaccagtgttaacaccagtacaaatgaaagtacttttttcatttcgagtatcctcctaaatttttctttggaaggggccttcttgttcctgcaaactaccttccccttccgaagataatttgacattattttatgatagcgaaatagcgaaagaaggaggtgacaaggcaaaaaacgggaaatgcgtgcagaagcaaaaacagcaaatttgtaacaaaagctgtaaaaacaaatggataaaagggaataggcagagaagattagctgagaattaaaagaattttggtaaaaataaagaatactgaaagctttgagatttaattgaagctttcagtatttttatcagagttaggcaattatagaaaagtcgccgaattcgtagcgctgcggattttgaactgctttgtctgagctgtttgaatcgctgacattgagctttgccttttcagccatagcttttctttcgatgactatatcaaaggctttggcaatttcgcttagagcgagaccctcccatatcggattgttgtgtgagcatagcagagtataatcggagaatttttttgataattcatataccgtatttctgtatgtcaagagatttgattgagataggtgtgcgtaaagcggggcaggatagacggtgtcgccggtaaaaagcagtttgttttcatcatctgcaagcataaggccgtcatcggaatgcccgggagtggcaattactctgaggcttctgccgccgaggtcaaaaatatgttctgaagaaacgggaattacattacagggtctaactttgatatcagcagcatcaaaccaaaggtcaccgggataggtgtatgcttctgcggtaaggttttcgtcatcagcgggaagcgaatagccgcgggttaaaagttctgcgaattcagatacatcgagcaggtatacgctgtcaaatagataattgccgccggtgtggtcaaaatgactgtgggtatttacgacagtaataggcagcttggtaagctgttcaacaagaagcctgatgtttccgccgagacccattccggtgtcgaggagcagtgctttttcgcagccgagaatgagataagatatgacctcttgaaaatgataaggttcaaaaatagcgaaaatatcgcaagggagcttgtataccttaaaccatttatcttccggggaaagcaattctccactttctgtcaaaatgggggaaagcggagtaagctcggaaaaacgagtgagctttgccataaaaacctccttttactaaaaaacacttaatgcaatttttaggattacatcttatctatcagcatacgctatgtgcaatgcttctgtcaatcgggttttaataataaaagcaatgatttttttagcacataatgatataataaaatggcagtgatatacaaaggaaaaaattatgggcgaaaatccaattataagagataaattaaatatgagcagtacgattataaggacagcggcgctgatggcggtgtttacttttgtgtctaagcttcttggatttgtgcgcgaaatggttattgcgggtgtattcggcaccagctatatagtggacgcctatgttatggcgcagagcatccccgatatgcttttcggcggaatttttgcatctgtaggcacggcttatatgccgacattctcggaaataacagaaaaaaacggtaataaagcaggtgacttgtttacgagccggcttataaatacagcagtagtagctgcggcgctgctgtccgcagtcggaattgccttatcggcaaatataacgagacttatagcgcctaatttcagtgcggagacgatggagctcacaagcttttatcttaaaattacatttggatatatggtttttacctgtgcgagcagtatttttgattcatatctgaggtataacggaagttttttgcatccaataattgcaggttatatgcagaatgcgggtgtaattattatggcagttgtgagcgcttatacaaatcattatttatttgcattcggaatccttttaggatatgcattgagatttttgtaccagacagcagctgtcagaaaaatcggctatcgccacagtatgtcttttcccctgaaaggtgaagtcaagcagatactgatactggcggtgcctgtgtttatcggctcgtatgtatcacagataaattcatatgtggataaaacacttgcttcggggctcagtgaaggcagtgttgcggctctgaattacgggcatattctcgttgcgtttataacgggcttgacaactacgataatagctacgataatatatcccaaaataacaaaggcggcgataaatggcgaatgggattttttcaatgctgcggcggatgtgggtataaacttgataatgattatcgcggtgccgttcagtatgggtgcgatggtgtttgcaggtgaagtggtacaaatagtgtatgagcgcggagcctttgacgaaagcgcgacggcgcttacgggaacggcgtttttcttttatgcctgcggtctggcgtttatggctttaaacgaattcctcgtgcagatatattattcgcttaaggatatgaaaacgccgataaattgtgcgtctgtaggcgttgcggtaaacatagtcctgaatttatctttggtgggcaaaatggctcacggagggctggcactggcgacgagcatatcggcgcttgtaaattttgcgctgctccttgtatttctcgccagaaagcacagagaggtggcaatattgaaatcaaaaagcaaggtgttaaagatatgtgctgcggcggcggcagctgttgcggcagcgtatggtacacattgctttatcagcgcggcggtgtttatgccgagaattttgtatctcggaattgctgtgcttgcagcatgcgttatatatatattactgcttgtagtatttaaaattgatgaattgaagctgctaaagggtcttataagcagaaaataagggaggagctcatatgcagaaagggcagaaggaaattccactcagtgtgcctaacctcgatatggagatagtggacaatttaaaggaatgtatagcgaccggctgggtatcgacaggcggcagatttattacggagtttgaacaaaaaatcgcaaaatacgcaggaacggacgacgcggtatcgtgtcaaagcggaacggcgggacttcatacggcattgcgcattctcggtgtgcaggcgggcgatgaagtcatagtgcctacgcttacatttatagcggcagtcaatccggtagtttatcaaggggcttatccggtgtttatggactgcgatgaatatttttgcatagatacagacaaactcgcaaaattctgcgatgaagaatgcgagtttaaaaatataaaggacgcagcaggcaatgtggaaaggaagcttataaataaaaaaagcggcagacgcatacgtgcaataatagctgtgcatgtgttcggcaatatggcaaatatggaagctgttatgggcattgcagaaaaatacggactggctgtacttgaagacgcgacggaagcgctcggaagctatgtaacagagggcagatatagaggggcaaaggccggaacgataggcgatattggcgtttattcgtttaacgccaacaaaataataacgacgggcggcggcggcatgatagtgtcgcgcagccaaaaatatctcgatcaggcgcggtatctcacaataacggcaaaagaagcttcgccggaagaagcgctccattttgtccataatgatattggatataattatcgcatgactaatttgcaggcggcgcttggcgtgagccaaatagataagctcgaagaatttataagtataaaggagcgtaattttagcagatacgcgaaatgccttgcgggtatagagggtcttaaattactggcgtttacacctaccataagaagcaacaaatggttttacgcactttatgtagatgaagaaaaattcggtgaaaaaagagatgcgcttatgcacagatttattgacagcggcgtgcagtgcagaccggtgtggaagctgacgcatacgcagaaagtctacgcggagatgcaaaattatgagattgaaaaggcatacgattacgaaaaaaatgtgctgaacataccttgctcaacaaaccttatggaagaagatgtagaatatgtatgcgaaattataaaaggcaggtaacaggatgaaagtacttgtaaccggaggcgctggatatatcggaagccatacaagcgtcaggcttttggaaaatggatacgaggttataattgcggataatttttataacagcagtcctgaagtgattgataaaatagaaataattacagggaaacgcccaaagctctatgaatgcgatataagaagcaaggatgagttaagagcagtttttaaaaaagaagcgcagacgagtgagattgattttgtaatacattttgcgggctacaaggctgtaggcgagtcggtagaaaagccgcttatgtattatgataataacattttgcaaacggttgcccttttggaagtaatggctgagcgcagcgttaagaatctcgtatttagctcatcagcagcggtgtattcgacgagcgcgctcgaagatttgctcaagaaacatccgtcaggcatcagcgaagattttccgctgggagcggcaaacccatacgggaggacaaagcttattattgaaaacattctgcgcgatgtgttttatgcggacaagtcttggaacataggaattctcagatattttaatccgataggcgcacatccgtcgggtctcataggtgaaaatccaagaggcgtgcccaataatcttttaccgtatattgcaagggtagcaagcggcgagcttgcacggcttaatgtttacggcggtgattatgacactccggacggaacgtgcatacgcgattatatacatattatggatcttgcggaggggcatatcgcaatgctttcacatctcgacggactttcggtatataatctcggtacggggcgcggctacagcgtgctcgacatagtaaaaatatttgaaaaagcaaatgggataaaggttccgtataaaatatcggaaagacgcgagggtgatatacctatatcgtttgcaaattcaaaaaaggccgaaaggcaattaaattggctggcgcaaaaagatattgcagcaatgtgcagggatgcttggaactttataaaaaacaagactgattaagaggaatgggaatgaagacagatgaaaatcaaatagagatagattatatttataaaactaacggcggaaagcatacggctctaaattacgcgtttgaaaatattgattaggtattcttgtatatctcaaagaatatccgagcgggcaggtaataggcgaggcgtttaatgatgatgctttagttgctgacggaataaaatatatcatcaacgctcaggttaagtgtgataaagcggaagtatttttgacagacgcgttaaagaaatacagatttcctgtatttgctgaagagaaatttatgggagaaactgttgtctttatacctgtttacagggaatataaatgctttataagaaatgacagcatttgtgtctgtgagtatttaaacggcggacttacgaagcagggacgcaaattgcgcatagataaccctttaggaggcatacagagttcactgcaatatataaacaatgatataaagctgaagctgcagataaaaaatatacttttgtttgttgtatacaggagttttgccaagaagcagggaaaaagagatgactttatatttcccaatagatggctttatgctctctgccgcgttcccggcaagctgttgtattttttatggagctataagtatgatttgaaaggaaagaaatatgatacctaaaaaaattcattatatatggctggggaacaaaccgctcgataaagtatcttggcagtgtatagaatcgtggagaaaaatacttcccgattatgagattatttgctggagcgatgaggaatgtctggaaatgatcgagaaaaatgcatatgcaaaagaagcatatgaaagaagaaaatacgcttttgtaagcgactatctgcgtctatatatacttttttccgggggggtatatatggacacagatgtaaaagtattaaaaaaattggatcgatttttaaaccacggcgcatttacatgctttgaaaacaaggagatgattattaccggatttttgggtgcgcagaaaggcaataagtggataggaaagcttttggatgattatgaggacgctcattttatcaaagaaaacggagaatgtgattttaagacgagtgtaatcagaagcacagaaatttcattgaaggatggatttatacccggcggtgagtatcaggtatttggtgatgatgtgcatatttatccaaaagaatatttctgtccaatagatacgcttaatgccgcaaataattgttttacggaaaatacgtatgcggtgcatttatataacgcttcctgggtgccgaagtggcgaagggttttaagcaaaattaagagaaaatacgggatgaatcccgaaaagcttcttggcaaaaagctgtataactaccttaaagtaaagtactgatagtagataataaaggatttgtgagatgaaaaaggttttatttgctgcgactgtaatgatacatattcaatcatttcatattccgtatttgaaatggtttaaagacaggggatttgaagttcatgtagcgtgtaatatgagtatgtccaaaggggatggggaagaaattccctattgtgactttattcatgatataccatttgcaagaagtccgttggctgccgaaaatatcaaagcgtaccgcagcttaaaagcaataataaataaagagggcttttcggtaatacacgcgcatacgcctgtgggcggagcacttgccaggcttgcagccagaaaagcaagaaaaagagggacgaaagttatttatactgctcacggatttcatttttataaaggagcgccgctcagcggcaaagtgatattttatccgatagaaaagtctttagcgagatacactgactgcctaattacgataaacgatgaagattataatactgcgctttccaggcattttaaagcaagaaatattgtcaaagtaaacggagtaggtatagatctaaataaattcacggcaagtaaggataagcgcgcagaaaaaagagcagaattagggatagggcaagatgatataatgcttttatcggtcggagaattaaataataataaaaatcatatgactgtagtaaaagcagtagcagcaatgaaaaatacgcaaataaagtatgtgatttgtggcagcggagcgcttaagaagcaaatagaagcacaggcgcggagccttggtatagaaagtcaggtaatgcttgcaggatatcgcaatgatacaagggagatatatcaagcagcagatatatttgtctttccgtcgctgcgcgagggactgccggtgtctgtaatggaagcgatggcttcgggtataccgattgtggcagcggatatccgcggaaacagagaccttattatagacggaaagggcggatatttgatagaaaacgccttagatgacagagaatatgcgagcaagattacagatttaataaataatcctgagaaaataaagggaatgacagcttttaatctggacagagttttaatattttcaatagataatgtaaaaaagcaaatgacagatatttatgaagaatatatataataagaagcatcggagtgaaaacaaagaatgataagcaatcacaaaccttatgggatatacgaacgaatatttaaaagaccgcttgatataatatgtgcgttgctgattatagtatttttttggtggctgcttttggctgtggcggcggcggtgcgcgtaaagctgggaaagcctgtgctttttaagcaggaaagaccgggcaaagacggcaaaatttttaatctgtacaagtttagaactatgacggataaacgcgatgaagacggcaatctgcttgcggatgaaatgagactgaccaaattcgggaagatactcagggcaacaagctttgacgaactgccggaaatttttaacatactcaaaggagatatgagctttatcggaccgagacctctgcttgtcgagtatttgccgttatataatgacaaacaaagacgccgccacgaagtgaggccgggattgtccggatatgctcagataaacgggcgcaatgcgatatcatgggaagagcgctttgatttagatgtggaatatgtcgataatatatcttttgcgttagactgcaaaattatttttaagacgattaaggcggtacttgcaagagagggcataagttcagaaacagcggttacaatggaaaaatttaagggcagcgatgattaaggaagggggcggctatggacagagaagttgtaataataggtgccggcggacacgcaaaggttgtcgcggatatcatactgaaatcaggagataaactaattggttttttggatgatagagcttgcggaagtgatttctgcggctttccggttatgggaaaggttgaagcctacacggattttcgtgataaaatgtttgtaattgcgataggaagtgcgcaggtgagggaaaaaattgcggaggaactgaaagctgtgcattggtatacggctattcatccgagcgcagtaatttcggagctggacgtaactatagatgagggcacagtgataatggccaatgctgtagtcaatccgggcgcgcgtataggcagacactgcatcataaataccggagcaattatagagcatgacaatcaaatcagggattacgcacatatttcggtaggcgcaaaattggcgggaacggtgattataggcagtcatacctggataggagcaggagctgcggtcaataataatatttctgtatgcagcaattgtataattggcaccggcagtgtggtaatcaggaatatagaagaagaaggcacatatgcaggtgtaccggcaaaaaagataaagtaaagaaaaatattaaaaaaattaaagggccggctctaactattttgttttgagacagtcccttagttttatggatttatattttaacaagttattttaatgagacttgcttttcatctgcactgcggcgctttatcatcatatttgctgcgatgcccgtaccgagaagtgtgtaaaacatcggcatcacggatacggtgctgtcgtctacgagcgccgagaacaggaagccaaatacaccaaagaaaataccagcgccaacaaaacttacaaaatcgtccgggttaaatttgctgcggaagtaaagccggaagctctgcacaatatatataccaaacattgcaaaaagcgcaagaacagaaatgccgcctgtgcctatccaagcacccatatacatattgtgaggcttatctacgatgatatttatgttgttggcaaatgatgcggaattgtatttgccgacataatccttatgcgggaagtatatgcagtaggtgtccgccccgtgtccgataaaagctgtgtccttcatcataggaatggtgcgggagaagatatagccgcgtccgtttccccagcttgaattgttttcccagcctaccgaaggcactttatccaagtccacaaggttgcctaaattgttgaaataaaatacgccatcgtcagttattctgaaagtccatttggtttcctgatcgtcgcttgtaaagatgaaatagtcgtttccaagctcatcgcttgcagcctggaaatagcagtgtgcaaacctttcatcgtcgaatgcaagcacacggtttgtatctgttggcacgagacctatcgactgaccattttgatcgagaattctgactgcgtttgtgtcctctggatatgtcgtgatggtaagtgtgttgtcgtctatgccgatgattatgtcattgccgtcggtatcaatgtactgaagcttgtgcgcgtcagaagctatagcgtgcgcattaccgctttccgtatcgccggcattgcctgcactttctgcgctctgccctcccgcatctgttttaccgagcgtactgtttatcgcacccgtaagctcgccgatccatctgttgtaggtgacaccgccgatggcaatagtgagcacaagcaaaattacaacaggtttccaccatttaatgacctttttattgaggacgataagtgctgcgagtactacaaatcccataccgagccagccgccggacgatgctgagccgatgaggttgaatacaagcagtgcgaacagagcgccccaaataaactttttccaaacgggttcttctttgcctcttagtacggagcggataaagagcattccgaacagcggcagaagcagcgtcaggtagaacgagacataatttatgttgtaaaccgtctgataaatttcattattgttaaatgtaaaaccgagaaaatctatatctatgctcttgcacatatctatgagctcatttgtcgtgtacgaatcctgcgtaatgagaccagcttcgtttaaggcggagcctaccctgccgtttaaaaaggtttccgtcatctgtacggaggtattcggcgtaacgagtttttgacctattgagcttctgaaaaagtcgtggcccgttgcctgcgatatgcctaagatgccaagaagcgcgctcgatacggctatcgggtacactgcccatttgatgccgctttcggtgtttatcgtatttatgatgaaaaacagcattaccatgtaggcgagaagggtcaaagtgccttcaaatctgtcgttatatccaagcagggaaaattccttatagtcggaaagcagataagatacgagcaccatcaccgaataaattatcatcgggatgtaggcaaagcatcgcttgatgctcaatgactgggtacacagcctgtaaagcaggagcactaaagtgagcaccgcgcatattaaaatggcgaccattttatagtagctgaaaaaatcggtaagattgctgtttcccgaagaccagtaaaactgctccatattgcggctgtacgaatacatttttacaattattattacaaatgcgccgaaaaaagcgataggcaaaagctgaagccagtgtaccgattcgtctattttcggggcgtatgacatactgaaaagatagtcggatttagtctgcatttttgcattcccatttttaccttgttttttagacattttatcctccgaaataaattgagtagagttaaactaagttattataccgcaaattcccgtttatttcaagaacaataggcgcttctattgacttgacaaggaaaaattaggtataatgtatacgattgtaaatttatcagcggcaataattcaggtcagcatttatgaaaggataacaacggcgatgtgcagcggagcaaatgaaaatataaatgaagtaaagctcgataaaaagctgtcacctataaatgtttgggcgatagctttcggctgtatcatcggcagcggcgcttttttgctgccaggcacatcttttctgcctaaggcaggaccgctgggtgcagccgcagctatgcttacgggagccttcgtgatggtaataattgcgataaattacaattttatgataaataaatatcctgttgcaggaggggaactaacatatgccaaagaagctttcggaaatattcattcatttatatgcgcgtggtttctcagtctgtcgtacctgatgattgtgccatttaatgcgacggcgctttcaatggtagcgagaagctttttcggctctgtatttcaggtagggtttcactataatgcagcgggatatgatatatattgcggggaaataattctcggaattttcgcgcttgtgttctttgcgcttctcaacatacgaggagtaaagtttacaggtatgtttcagacggtgctttcgtgccttcttgtgagtgcagttatcataatctttacagcggctgttttaaaaggcgtgctcaatgtagaaaatctatcgccgctgttggcagagaacgatgttttagctgatgctgcgtccaagacgacaggagctttggcacgccatggcagaagcgggctttcaggcgtgctcaaagtgctcgcggtagcgcctttttgttttctcggctttgatacgacctcacaggcggctgaggaacttaagttttctgtgaagaaatcaaagataataatggtactttcaattttcttcggtgcctttatatacatcgcgctcaatcttgcggcggcttcgtgcaggcccgatggatatgcagactggacagagtatatcgctgatgttaatgcgggcgcgctttcgggcatagaaaatatcccgacctttaacgcggcaagaacgctgcttggtacgccggggctgatttttatcggtatagcggtgctggcagctatatgttctggtattacaggtttttatctggcaacgagccgcattatgtacagaatgtcgaaggcgaaaataattccgccgtggtttggaatgcttcatcctaagtataaaacgccggctaaaacactgctgtttattctcgcgatatcggttatagcaccgttctttggcagaaccgcacttggctggatagtcgatatgacgtcgcttggagcggcaataggatttggatatacctcggcagcggcctttaagtttgcaagaaaggatggaaacaggagtattgcggtaacgggatttttgggaacggcgatgtcatgtgtgtttgcgctgctgctgctcgtgccggtcccgatgcttgactgcgcgctcggacgcgagtcgctcatatgccttgcgctgtggattgttatggggatagttttttatgtttatgaaaacttttgccatagaggaaaatttatgataaaataatttgaagggtataatttgagagtaaagaataaatcaggggaaggaaaatgaaaaagagattaaatttaaaaaatttcacagtaataactttaacagcatcctttttattatcaccatccttagcatgcgctttgcccgcaaatgagactataagcggggacacacgccgcgcggcgtatctcagacaagatgtgacggtagagctcaatcgcgagaaactttcttttaccgatgaacagggtgctgttgtttatcctattacatataacggcagtacatatctgcctattcgtgcgatatcggggcttatgggagagccgatagagtggaacaacgctgcaaagactgtctatatcggcaagaccctttcgatgccggtaaaatacctgctggatccggcagagtcaccgtatgtaaagacagttgaggacggtgcgtccggcaatatgtcaaatatcgtcgtgagagaacagcgcggtatatatgtaatgtatgattttgaaagtctggaatttaaaaatgaatccggcacggtgatttatcctataaattacaacggcagcaattacttgccgctgcgtgctgctgcggagcttatgggagaggaaatcgtatgggataataagacgaaaacagtttatataggctctatgactccggttgaagagacggatgagccagaaatgagagacgagaccttttctattatagagctttacgacagggaagcggagctttacaatcttgctacggcaaagattgtggaaataagcaaatggacggatgatcaggcaccggtgatggcgtcatctataagtgaagatttgcgcactgcgactttaaataattacgaagcaaagaagcttctcaaaacggaaacatttacggatgaggaaaaagaggcctgtcaaaagctgtgcgattttatagaaattacggagtattatatactcgtgatggagaatatagcgtatatggctgctgataagcaggattattcaataatggcggaaactttcctgaattttgcgcttgaatctgaaaaggcgatggacagtgcaagggaggcgatagaatgtttgtaaatgcagtagagcaggcgagtaaatatactcgcccaatttttacgatagcgcgtcgttacggaagagcggaagtaattccgggttcggcgactatattttttgtaaatgaagaaggctgggcggtgactaccaagcaggtggcaaggatgattgtcgatgctggaaacatagaaaagaagtatgcggaattcagaaaaaagagaaacgaaattcccgcaggatataattttgaagagcagctcaaggcgctggaaacgctgaacaagtacagcgatgataaaatctgccagctcaaggttaattttgtagattgtgtagatcgtataagcggtgtggaatgtaaggtgcacccgaaatacgatgtggcgcttgttcatttcagcggctacgaaagaatcggatatagcggatatgcgacttttgctgcttcatcggaagctgtaaagccggggaaatttctttgcaggctcggctatccgtttcctgaattccgcaactttaaatacgatgctgaaaaagatgatatagtatggacggcggagaagctcagaagcccgcgctttccggctgaaggtatggtgactcgccttatcggcgagcaggacggtgaaataataggcatagagctgagcacacccggttataaaggcgcgtcgggcggaccgctttttgatcagcgcggtcttgtctacggtatgcagacaggcgtgagcccaataaatcttggccagtgtgtgcatatggacataataaagggcatgctcaataaagaaggcgtaaaatactacgaagatcaatacggagcaaagaacttcggagatcagagctttatcagcatgggagcaccttcaggtacgggaaacggcggcaaaatgagttagagttagaaaggcgaaaagcagatgataaaatattcgagaatagcaggacttatgctcgtggacctgctgatcgtaaatttttcatatatatttgcactacttctgagatttgaattcgaggttaacagcaatcagtttaatcagtattttaccgtttacgcggataatattgtaccgcttacagctgcggcgcttatcgcttttgctatggtcggcatatatacgagcatatggcgctacgcgggctcggatgagcttgtaaaaataggaataggctcgattttggcttcggttttcggactggcctttatttcgatagcaagaccgatgacgatacttccgagaagcgtgtatattatttcagcgatgatgatgttcgtactcgttgcgtgcacgcgctatgcgtacagatttatcagaaacctgagacatccgggtacttttaacactatattcctgaacgtcggaaaaaaagagctgataggcagcaatatgacgaaagttatgattgttggtgcaggtgacgccggggcttcgataataaaggaaataaagcagcatcctgagtataataaaaaggttgctgttgcgattgacgatgactcgagaaagattggcaagcggatatcaggagtaaaaatcgcggcagaccgctcaaaaataaagactatggcgcggaaaaaaggcattgacgagataattgtggcgattccgtcagcaaaccataaggaaatacagaatatactgaatgaatgcaacaagactaagtgcaaaataaaggtactgccgtcgctcggcgagctcatcaatggcgatgtcagcgtgagtcacctgcgagatgtcgagattgaggatctgctcggccgtgaccctgtaaaagtgaatctgcgcgagatttcgggatatcttgaagaaaaaattgttctcgttacaggcggaggcggctcgataggctctgagctttgcagacagatagcgaggtttcgtcctcgcaggattatcgcgatggacatatacgaaaacactgtgtttgagcttgcaaatgaaatgaagtccaaatatccgcagcttgaatttgaagtggtgataggctcggtgcggagcagggaacgcgtacacgaggtatttgaaaaatacaagccgcatgttgtgtttcatgccgctgcgcataagcatgtgccgctgatggaaaaaaacccgaaagaggcgataaaaaataatattattggcaccaaaaatcttatagatatggcggatgaatattcggtatcgaagtttgtactgatttccactgataaggcggtgaatccgacgaatgtgatgggcgcgactaagcgcgccggggaaatgatgctgcaggaaaagagcacgcattcgcggacaagctatacggccgtacgttttggcaatgtgctcggcagcaatggctctgtaataccaattttcagaaaacagattgaaaacggcggtccggtcacagttactcatcctgatattacgaggtattttatgacgatacctgaggccgtgcagctcgtaatacaggcgggagctatggcggacggcggcgagatattcgtgctcgacatgggagagccggttagaataatggatcttgcggaaaatatcataaggctttcgggctatattccgagggttgatatagatatagaaattaccggccttcgtccgggagaaaagctctatgaagagctgctcctcgatgaagagaatatgaagaaaacggcgcaccagaaaatatatgttgaacgtccgctgccgatagacccggagctaaataggctgctttcgggagaagacggcataacgcttgaggaaagaatagaagaagtggtaaaaggaagcgacagcgaagcaaaagaatggctgcatacgcttgttaagagttatacgccgcagaattagtaaatcccccgaatcaaaacgggggatttttgtatcttttatttccagtcaccttccgatacagtgtacgaagtaccgccgacttctatcttgtaaatttcgttattgagctcggcatttacatacagcacggagggccttcccatttcgctgccttgactcacgcggtaatttaacttatctttgccgaagaagttgtatttaaggagataggctgcaaggtcgccattggcgctgcctgtagcaggatcctcgaggaatcccgtatcctccataaatgtgcggactctgatatctccgttttcatcttcgcagaatacgagcagattgcaagctgcataatcatctatgaacttttggcgcatagggtggttgacactgcatctttctatggcgtcgatgctttttagaggtacgataaagctttcgagtcccgtagaaacccattgagaaggaaaatcggttcttatgtcatctgcgtttatcgaaagggcatcggctgttgcttttgggttatcaacaagcattccgaattcaggctgattctggctcatagtcattatgccgcctgctgatgtttcgacagggattggacctgcaccgagatttaagatgatttttttggctttcccgccttcaaacacttcgtttataatgtgcgctgttccgagcgtaggatggcccgcaaaaggcacctctatgtcaggtgtaaatattcttacattataaccgccgtttggctgcttatcagaaagaataaaagaagtttcggagaaatgcatttctttagcaatcttaagcatctcttccttgcttatttcgcggtcggggatgaatacagcaagctggtttccctgatattttgcttcagcaaatacatcgacaatgtagaatttcataattttctcctttcatttaaaaaaataacttccgataccataatgatatatcggaagtcatattcaagcaagcatagtattgtttgccaaacaattttgtacggcttttaagttttgaattatgaatatattagtcatcacagccgtggtcgctgttgtttacagtatatctgagccagagcgtacttccgtcgagtatatctgcacttttgagagtaaagctgacaggcgtatcgtttccgagctttccggtctcaaatgatgaaggctgttctgacgaaccgtcggcaacaggagcaactacaagacttacttcatcacacaggccttcctgaatgaaagtccagttgagcacaccgccaccgccgagcataatgcttttgaatccaaaaagagtgtgcagcttttcgagggcaagtttggcgtcgagcgcctcttttccggcgataatatacggtatgttcaggcgacgcagcaaatccttataggagttggacgctttttcggtaattacttcgattacatatgcgatgccttcgtactcaatataattcttttcccagccgagtttgccagacgggtctatggaaatataatatctgtcttttccggtctggggcacaaaatcgccggcaggaactaaaggggcgttttcatccagctttggctctttaaaaaacgtgaagttcttgtcagtggtgactctgccggaaagccagccttccatattgtaaccacctttgtttctcatagaaatatcatcaaaaatagtgccggatacgccgaattccggagtatccataaaattgccccaaattttcccgtctacggatgttgccatatggcagaatataaacggtcttttcattttgtctacctcctaacatatgcgataaaaactatactatattttttatagtatagcactgcaaagagggcaagtcaatgaaaaagggcaaagcattgttaatctgaagcttcaaggatttcgcgcagagcgacacaggcgcgcgcaagctcttcgttagtttttggagtacataccgaaagacgcgcgcctgagaccggaacacttttgcccacggcgaaatgctcgctgccatatatgagaacgcctttttcgagagcgcgcttttcaaattcggcgctgcttttacctttaggcaggataagccatttgcatagcgcctgactgtctccgagaagctgatagtttccgagcacggattcggcaatacgatttctttcccgcagcattgcttttcgccttgtgaggagtgattcatacttgcctgaaagtatgagccgtgcggaaagctcagataaaaatgcagaagattcgagattgatattataaaaggccctttcgacagcgtcgcggtatttatcacaggcagtcatataagcttggcggagagaagaactcaggcattttgacaggctgagaaagaaaattgattgctcaggcacgcggctgtaaatgctgtctttgggttcatccgtaagaagtgcgctgtagccgtcttcgataactatgagatcatattctgccgccatttttgcaatcatgtcgcggcaagcttccgacatactgtgcatagtaggattctgataatctggaattatgtaaagcgctttaatgccttcgttttttacagcgtaacgtataccctctgcagacatttcgccgttttcctgttttatgggaatgagtctgattccgagcatgctggcaaggcttattatacccggatatacgagcgggtcaacgccgagacggtcaccgggtttaaaaatgctgaaaagcgccccggcaattgcattttgcccaccgtttgcaaatatgattttatcaggagttacgctgcattttgcttgttttaagagatgggcgccggcctcgttctgccagtattcggcgcctgaacggtattgcagcaggctgccaaagtcactttcatttgtcatttctcttatgagcaggcgcatttcgtcgttgttttcgtcggcgggcattataccgccaaggtcgatgatgttttcgtcggcaggcgtcattttatttaccatatgataagagacaaaggtgccggagccgacactgcttttaagaaaacctttatcggaacaaattttaaacgcgcgggcgactgtactcagattgacatcgaggaagtccgcaagctccctctgcggcggcagctttgttccgggtttgatttggccgctggcaatgtcagattccagtttatttgcgagagctatgtagagcggtgtattgccttttgtaagagtcggcttccatgacataggataatcgtcaaaggaattatacggcatagcaaatctcctttccgttttatattttcgcagtttttctgcatacaaagcgtcaattgttttgatataattgtatattatatctgcggcaaaagcaattgcgcgtctggaaataggcggttatattttttttaagaaattttttaaaaaggggcttgcataatggtgcaagatggtgtatagttatgtctatgcaataaatatacgtgcaaatttataattatccaaaggaggttcgcaaaatggcgaagcaaaaagaaataagcaaaattattgctctgatgcttgtgctctcaatgctcgttacgcttatcacatttgttccgacggcaaatgtctacgcggatgagcagacagcatcggagcaggctacttttgagaatacgagcggtgacggagggcttgatgttataaatctctgtgaagagagaacatttaaggcgatgataccgatttcatcagcaagcagtattgataaatcaaacatagtgtggtctcttgacagaaatacagcaaagccgtatgtggatgcggcgctgtaccctaatcagactgatggcggagagctcagcgaatggactctttccgaggggacaggaaatcttttcagcgatgtgactacggaaatcgaaacagtgggcgggcaggattaccttacagtagaattcaaggccagcgcatacttccaaaacagcagaggtgaaagcttagataccgcgccgcacagcagcggaggaaaatatcttgatgtgtgcggtacgttcgaccttactgcaaaacaggatggtgaagaggtaggcaaagttgaagttaatatagttccttatgatactttccgcacaatggagcagatatatgaagagcttgatgatatggtaacatatgcggaagaaaatacggatatttatgtagaaaagtattcgatgggtaaatcatccggcgttatatacgaagcgctagatatgccttatatcattattgcaaaagacagcgaggctgtggaaagctggcttgaatttacgaatgaagctgaagaaaatccggaggaagtgctcgcaggtatagagagcggagcatacaacgatattaaggttccggtgatgttttccaatattcactccaatgaggtagcggcggtggacggcattatggaattcgcctggaccatcataaaggcggcagacgatgaaaatgacggaaatattccgtatgatacgctgacagcttttacggaagcaggagaaactcagcttgcagccgaaatgggacctgtgggagctgccggcagcactgctgtgcctgatctcgtaaaagaaacggccacatatcttggatttttaaaagcaggaaatagagtttccggcgagattgatctcgaaacatactataatgtagaagagcagataatgaatgtggatgagcttctcgatgatgtattcttcattctcgttccggaagaaaacgtagaaggcagaacatatataacgcgtgcggcgtcaaacggctatgatcttaaccgtgacaattcgttccagacgacgccggagacgcagagtatgcaaaagctcataggaacgtacaatccggtgagccttacagaataccacggcatggtaaagacttttcaggtagaaccttgcgatccgccgcatgagccgaattttgaatacgatctgcttgcggagcatctgatgacaggcggcgaggcgctgggtattgcggcagttgcgaacaacgatcaatacaacagctatacgacgccgcagagagattatctgaaatatacaggaaacacgactggagacggcgaatacgaaactcattgggacagcccgtgggatgatatgtcaacatcgtacacgcctcagtttgcaatgcttcacggtactgtggcatataccgtagagctgccgggctataatgatgccggagctgagcttgtaaagtacggatgtatcggccagtctgattatatagcggaagaaaagcttgaatatcttgaggcgcagatcggtatttttaagcggggagtaaacaacgaaaactcagatgctaaggaactggtaggacagtggttctgcgatcagtacgatgtggaaggtgccgaaatggaacttttcagaccggaatacaagggagagggcgaaaatggaaacttctatcctgagttttacattattccgctcgacgcagcaaatcagaaaaatttaaaggctgcttacgatatgatggaatggctttcgagaaatgatgtgaagataaatatcacagatgcgccttacacttatgacggagtaacttatccggcgggaacgatgattgtttccatgcaccaggctaagcgttctgtcgctaacagcgcgctctatgatggtacgcttataacatcatggacagatctttattctgagggcatcacatcgttcgcacagacgcgcggctttgatatggtaacagtagcaaaggaagcggagtttgatgaagtaatgaaggtgtgcggcggcgatatggattacgatgcatgcgtaagctatatcaattccaaaacctcacagtttacgggcactacgggaagagacgtcataatcaagaacacctcttcagatacagctgcggcaataaaccaattgcttgcgagcggcgataaagtaggaatggtaactgatgaagacagcatatattacggcgatttcatctgctcatacaaatcatggcagaaggtaaaagacaaatacatgctgacgggaataggaattgcgggccaaaatgcaagcttcccgacggcaattgtgatagaaaaagctccgagcgtatatattacgggcgcatcgggtgagaacaaaagcggctttatctacgcaggaagagtagcaaatgccaactggaattatgaccgtgtggcaatggaagcgatgaattttaaaacggtgagcgatccggacagtgcggatgtcatcataggggcttcgagccttaacagcagtgcgcttgcagctgttaaaagcggtacgccttacattggatacggaagcagagctaaccaggcaagcggagcgataggattgtttgagtcgggagaggtatcatacagcagctgcgcaagcggcagtatggatacgctgggctttgtgatctatcctgaaacgactcttgtaaacgcaaatcatgtacagtccggagatgaaatgctttacggctacggagctcaatattattcagcatatcctggcggagcaaaagtgctcgtgaaatttgacggaacaaaagaagcaactgaaggctttatagttgcaataagtgaaggacagcaagaagccgccgataaatatttcgattcagtacagggtttttcgtatgagggcgctgataaggacggaaatgaaataaatattgtactgtttgccaacagcctgacgcacaaggcgcatcagacagacgagtattcgtatataagcaactttattttcagcaatatgcttggagatgaggaatatacggctacgccgaagagcagctcatcgagcagcagttcctcgggaaataacgccggcacgcagacagacgatgaaacaggaaatactacaggaagcggagtgacaacagcggaattcgttgatgtaaagacaggaagctggtattacagcgcagtgcagtatgcttctgccaatggtcttatgacaggcataagcgcaaacagcttcggcccgaatatggatacgacaagaggtatgatagttactattctttaccgtcttgaaaatgagcctgctgtaagccaagctgcaacatttgatgatgtaaaggcaaaccagtactatgaaaaagctgttgtatgggcgaatgcaaacggcattgtaaccggctacggcaacggattgttcggaccaaacgatacgatcactcgtgaacagatggcagccatactttacagatacgcatcatataagggttatgacgtatcggcaaaaaatgatcttgctgcattcagcgacgcaggagacataagtaaatatgcggtagacgctatgaagtgggctaatgctgaaggcattattacaggcgttacaagcagcactattgtgcctgcgggcagcgcagtgcgcgcacaggcggcttcaatacttatgagattttgtgaaagtgttgaaaattaagcaaaagtaaaaaggctgcaagatgccgaagaaagcaaatgctaacgcagcataaggaagtaatttgaaaatatcaaagaaatacagccatatgggcgttgcaaagacagaaagacagcgtagagggcagatatgctttttacgctgtcttcttttattgctgattttataaatattatgcaaattggctgttatagagttcttcgtaaactccttttgcggcaagcagttctttatgagtgccttgttcaatgatgtttccgttctgcatcacgagtattttatctgcatccacgatggtggacaaacgatgtgcaatgacgaaacttgttctgccgtgcataagtgctttcatagccttgccaatctcaatttccgtacgagtgtccacagaagaagtggcttcatctaaaatgagaatagcaggatcgcacataaatactctggcaatagtcaggagctgccgctgaccaatggaaatattttctgcatcattagtcagcacggtatcataaccctgcggcagagttcggataaagaaatcagctcttgctgcctttgctgccgcacgaatctcgtccattgcggcgtctggcctgccataggctatgttttcggcaattgtcccctcaaacagccatgtatcctgcagcaccattccgaaaaagtgtcttaaattgctgcgggacatagctgtggtcggaacaccatccagaaggatgttgccgctgtttacctcgtaaaaacgcataagtaaattaactaaggtcgttttgccggctccggtactccccacaatggcgattttctgtccaggctcagcgctgaaatttacatcgttcatcagaagcttttcaggtgtgtagccaaagctgacatgtgaaaactccacattgcctatggcttgctcgacagcatcagcagctataggttcaggttccatttccggttcatccaaaagctcgtatacgcgcttcatagaagcgagagctgaatgtaaggaactagtcatataagaaagttctgtgatcggctctcccgcttgattcatatactgaaagaatgcttgaaaaacaccaggagtcatcttgccgctcagcagcatcccaccgctgagtatagcaattgttaccataccgcagcgatttataagacgggtggcaggagtaacggcgttcattaaaaagtctgttttttccgctgcgcgggccaactcttctgctgctgtatgcatcttttcggaacttgtattttcgtaattgaatgctttaataaccattctgccgctgtaggattcctcaaccagtccattcatcttgcctacagcttgctgacgctgcacggcataacggagtgttcgtttggaaataatattggtaattacagtagaaacagctacaaaaccaacgaaaaccatcgtcaaaactacgctgaagcgcagcatcataatgacagaacctattaccgttccgatggaaacaaacagacgaattaaacctgtttgcagtgcctccgaaaccttatccaggtcgttggtagcgcggctcataacttctccaacctgatgccggtcataaaaagcaagcggcatacggctgagcttttccgcaatttttccacgaagacggtagtttagtctttctgcaaagcttgccatcagaaaattttgcagaacatagaatacggcagcaaagagataaatgcttaagaggatgataatctgctgcccgccgtaatcccatgtgatgtgaaagggttcaccgcttgcccgcagtgccttgatccgattccaaataacatctacaacagttgcgctgtacagcggcgccataatgttcattgcactgtatatgacaacggaaaacagcacgacaatcaggcgtatcttttgtttacctatagaacgaagaaaacgcattgcaatttttttcgtatcctttgacgcttcaaatttattttctttgtgaagtgtaagctctgttttatccattctgttcaccgcctttcatttgagaatttacaatatcccgatacacggaacaggtctttagcagttcttcatgccgaccatggccaacaattttaccgtcatccagcacaaggatttggtctgcatgaagaatagtgctgatgcgttgggcgataatgaggacagcagattctttaacctcttctgtcaatgcatggcgcagtgctgcatcggttttgaagtctaaagccgaaaagctgtcatcaaaaacgtaaaggtccgctttttttgccaatgcccgtgcaatggaaagccgctgtctctgaccgcccgaaaaattagtgccgccttgagccaccggggagtttagtccttcaggtaaatctaagacaaaattcgattgggcgacataaagtgcgtgatacaaatcgtcttcggtggcatcaggattgccgtaacgcaggttttcggcaatggtaccggagaaaagccatgctttttgaggtacataagaaacagcgctgcgaacttcttgctgaggaacattgcgaatatcctgaccgtgcaaagtgatttttccgtctgtgacatcgtgataacgaagcagcagtttggtgatggtggattttccactgcccgtaccgcctataattgctgtgatttgacctttacgacaggtgaaggtcagattggaaagtgtttcttcgtctgcatctgcaaaacggaaggatacagagttaaaggcgagaatggcatccgagcttgcagataccagtttttctgtaccgtctgtaatttcaggtttatggttaagcacggctgctatacggcgcatacaagtcagcgcgcgcggcagcattaagattgtcatctgcgccatcatcacatagagcagtatccaaatagcgtactcggaaactgccgtaatgtcgccgatttccatattgcctgcacctactgcattgccgcctaaatacattaccgcaactattacgatattgataacgacattagctaaacagtcaagtccggcaaacagataatttgctttaatagatgaattggcataggaagcaaaggcttccttcattcgttcggtttcgtatttttctttattgaaggcgcggattacacgcacaccggtaagattttcccgaagaacaacattcatgcggtcgagaaatttttgcagtttgtcaaaaataggcgcagatttacgcatgataaacaaagccgccaataatacaaagccagtccctgtaagaataagaatccccatccttgcattgatactgaaagacagtgcgacgcccaacacgcagataagcggtacgggcagaatcatctgaatgaagttaacaaattcctgctgaatgatgttcacgtcgttcagggtgcgggtaatcatagaagcagttccgaaagtttcaaaatccgatgcggaaaattgcaaggacttatcgtaaacagcatctcgcagatcacgaccgatatttgctgaaagtcttgcacaaagccagcttcccagcaaagtcaaaacacctgaaaaaagggcaatacataacataatcattccttgacaaatgataccggcaagctcgccgccgctaatggcggaattaatcatgtctgcagtgatggtgggtaccaaaagagaaccgccaacatctgctaatactatgagcaggataaaagcacattgtttgcggtaaggtttaagaaattgcaatatgattttcataactttttctcgcttttctctcctgtaagtttttcgatctcttcttcaaaataagtgaattgctttttggtcagctgtaaaagaagctcttgctccgatttagtcattcgtttcagcgaattctcctctgccgtcatcagcgggagaattttttcctcgcaaatatgcctgccttcttctgtaagaagaattgttttgctgtttcgtgccgcaggcatttgttccaatgtgatccaaccttttttcaccaggccgctgaccgtataattaacagtttgtttaggataaaaccacatggaaacaaagtcattttgggtatatgttttttcttcatcttcatatagactgtaaagaacccaaagtgccgggtcggacagtccgcagaacacgctgtagcgatggtacaagtcgtcctcccatttatacatctgtgtcagttccatattaagtgattttatttttgtatccataaccgttcctccttttaaaattaaaatcccaaattggactaatgacagcataagtccaatttgggattttgtcaagagcaaataataattattttttgcaaactaattcaaagaaggcgccaaggaaaaacatttaaaaagtgttaataggcgtatgctttattgaggataccgagatgttttcataaaaggaattaaaattaaatgcagaaatttatttatcacgatttgagatgatgataaaacggataagcatataatgcaatgctgactgctttgtttatttatccatatacgcgctgcggacaaaaacaaattcgttggtgcggcaagcaatttattgttttgtccgcccgcatagaggataatgtaggaagcgttttgataggcttatccaaatcacctaaaaattttatagattcgctttttatcaagaagattagagctttgatatgtcgagttcatcgaaatgcgcgagaaattcgcggagtatttccgctatttggcggcagccgccttctttatctgcttcgatgttgagaggcattatgggatcgtgcagcgacatacgaagcaggcaccagccgtatgggcgcatgctgcttgatgatgcgctgctgttttctaaaaagctgatgcgcacgccttcgtaattgggcgctgcaagctgcataacggttttgccgtcggtattttccgtaacctgtgactgcacccaggcctcaagctcctttataacctggctgccgtaagcggtaaagttgcttgctgtaaccggaagccgcacttcgatagcttcctgcggttctttaaggtcggaaatgacatttgaaagagacttgccttcacgcaggagacgagcggcctttattactatttttgccgcgagatatgcgccgtcatcgagaaagtagttttctttaaaggcggcatgaccggatgtctcgatggcaagctgacagtctgttccgccggcattcagttctatcgctttatttattacatttttgtagccgcgcttgtatcttaaatggctgagcccgagacgctgcgtcagaaactcgcttagatgatcgctcgtgacactgtccgtgactatcgtagtgccgggcgagatttctttggcaagtacagcggcaagagcgacaatgccgtttcttgcgatttcacagccattttcatcaacggctgcggaacggtctacatcggtatcgaagatgagaccaaaatctgcgcccgtttcgagcacgcgccggcttattatcgccagagcttttttgtcctcgggattaggtgcgtggtttgggaaatttccgtcaggctcaagaaaacagcttcccgaaacgtcggctccgagcggggcaagcaccttttccgcgtaaaatccacctgatccgttgcccgcatcgactgctattttaaggccggcgaggggtctttcgtatgtcggtatattgtccgggacagaagccatgcaggcagccggattttcggcattgacgccgcgctttatgatgctgcggagatgcgtgcagtatgtatccataagattgcattcacttatgagaagcgaggttatgccgcatatcgggtcttccgagataggagcgcagtcctcacaatcgcagtcgcagtcaggcggacattcagctatgctttcggcacgctcaatgatgtctgcgatatcgcttttattgagcccgccgtttttatcgaaatatttaaagccgtttctgttaaatggcaggtggcttgccgtaatcattaccgctccgtcgcaggaatattcagggaataccgtggacataaacattgcgggggttgaagcaagcccgcagtcgaggacgcgtacgccgagcgct

SEQ ID NO: 2240 - DNA, 21562 bp, Unknown
  16S sequences of unknown bacteria
actgacgcacggcaaagatttctgacgcagtatttcacgctctgacagatcggagaggatgcattattttgcagaattgctataatttgccgccgctctgtgacaggattcttatctcataccaaggcggtcactacagtgctcacttgtacaggatgatcgccatcctttcttccatattgtcataaatcgtcttcgctgccgcaggcggaaggttgacacagccgtgagaaccattcgtctgatagatcgtaccaccaaactcatttctccaccatgcatcatgcagtccctgcccgtcgtggaacggcatccagtactggacatccgtattccatgcaccgttgccctgaccgccgcttaaaacagaaggactctgtttatatggaatactgaatacacctgtcgctgtctcacgaccatctttcggaagtccggtaaccacatccgtctcaaccacaagctcaccgtctttataaaaccacagatgctgcgctgtcagatcgacttccacataattgccacaaaggtcatcctttccctctcgtttgtaacccttcactgcatagaccggctcacgctcgacttcggtattggaacggatatctgcaagaagctgttctgcttccccatccttatcaatctggtagccgtaatcactgctgtcaaagtcgatcgtcctgccgtcatgtgtcgtaaactctctcgcataatacagcgtatcatacttcgctgcgaggtcatagacgtaattgtataccgcttcctcgtcaatcacaccttctccatcctcaatggtcagccagtctttaatcgttgaccagtcgatctcttcctgctcatccccaaatgtcagcctgatatctgccttgcagaacgaattgtaaatgttcatcgtcgtattcatctcactgtcattctgtgtcacagccggaacgtaataaagtccggacggaaattcgaccgttacatctttctgcggcctgtctgctgccacaagcttgtcggctgtatcctttatcatgacctgaagatctgcatcatcaaactcagtaccgtacgtctccggtttgatataatactcttttccatcatactccattgtcgcatccgtacttgccacgcgcggttttgcaaatttggctgcacagacacttgccttaaacgccgcctcatcataatcgaacgggatctccacctcaaaggtattgccatccatcaaactgaacagcaggctgacattctgatcacgcatacagctctcaatcgaagagagaagctttttttcattaatcgtatatcccatatctgcaagtgtaagtacttctgctgtctcaccgccctcagtcaccgtgatcttcggtgcactgtaatcctgctccagcatcagcagcacttccttgcaggtcttatcagagacgtcatacccgttgatcctcgtctccttaaaaaacaatccgctgtttacctgccggtacaggtagtatgctgcgccggcacccacagcaagaattaccagcaaaatcacgctgattgcaattttcagtccttttttcttttttttctccactttttatcccttgcccttctacgccgccgtctgccgcctgactccccacagcacctgcgtctctttcatttattcttcccatatattgcactattatccagcaatagtcaagaaagggaatcttaagtttttatttttaacaaaaaaaggagctgcgctcccacagaagatttctctcctatttcgccgcagcttctttttcatttgaaaatgtaactgatacttctgtaccgacgcctacctcactgcgcagccgcagctttgcatgatgctgtgccacgatatgcttaacgattgccagtccgaggcccgttccgcctgtctgcttggaacggctcttgtctacacgataaaatcgctcaaagacgcgctcctgactttctttcggaataccgattccggtgtcttttacgatcagtaccggaaaaccgttttcttttccgatgatcacctgcacctttccgcccagacgattatagcgtattgcattgtcacttaaattgtacagcagctcttccagcatttctttatttccatgtacgatacacggcatcccgctgcactcaatatgaatgccatggctttctgcattcagacgcagtgactcaacacacgtctcggcaagaccatacaggtccacatccgaaaacgccacttccatatcatcggcatccagttctgaaagccggataatatcgttgatcagcgtcagcagccgttttgcattccggtgaatctctgccgcaaaccgctggatattatcttcacctgcaagtcccgtctcgatcagctctgcgtagccggaaatcgaggtcagcggtgttttcagctcatgtgaaacatttgcggtaaattcctgacgcatctttgcgctttttaaaatgtcctcatgctgtttctggatcgtcgtgatgaacggcaccagctcctcatacgtctggattccatccacattatcaatatcactggcaagcttttcaatcgggcggaccagactgttcgtgatatagcgtgaaagcagcatacacagcagaaacattccgattccgatcgcgataatcggccgaagcgtactttcaaacacactccagatgtttttttcctctttgctcaggcgcaggacatctccgttttccagttgaactgcataataatacatatcgcggttcagtgtatcggaatggcgcactgcgtatccttcccctgcttcttctgcttcctttacttccggccggtctgcatgattgccgagcgtctcatttcctgcctggctgtcatacaccacatcacctccggcactgattgccgtgatgcggatatccgaatcagggctgcggtaatgatccctcagttcctccccggatgatatcatgccgcttaagacctctccgtatgttttcatatcttcgataatctgctcccggtacatatgatgaaaaacggcgatcgccatcaaaagtgttgtgctcagtgacagaaacaccgtcagcagcagatatctgtttattttctttttcatcgtctcttttgctcacttttctcgtttttcttttacgcttttctaaagcgctgttctgctgcgctgttttgttttcttttcacagacatcggtttgctgcatttccctgctttttcagctccgctcccctgtcagcatgtaacccacgttgcgcaccgtacgaatcatcgttccggcacttccaagtttctggcgcagagtcttgatatgcatgtcaagtgtgcgggactctccctcgaaatcagtcccccagacacgatccagtatcatatcacgtgatgccacaatccctgcatttaaaagcagaagctttaacagctcatactctttatatgtcagttcacacggctcatcatttacaaagacggtgcgtttttcatcgtccataaaaatcggcccaagccggatcatccgctcttcttccattccgcggctgcggcgcatcaatgcctttaccctggaaatcagttccatgacgccaaatggtttcgtgatataatcatctgccccgatatccagaccttttaccttgtcaatctctgtcgtttttgctgttgccatgatgatcggaagttttcgtgtctctgcggtgtggcggagctttttgacgatcgtcagcccatcctcgtccgggagcatgatgtcaagcaatacaagcgcaggcactttttccttcagccgtgcataaaatgcagccgcacattcaaacccctgcacctcatagcccgcatttttaagcgcaaacatctcaatttcgcggatgttctcatcatcttccactatgtaaatcattgccattgtttctcgttctccttttctgacaaactcgtgacatattcacaaatcaaagcggatattcgcaatccgtttcgctgcttataggatccgtgccatgctttctcccacttacagcctcattttactgcaatatgcactcccatgcaaggcgtgtcactcacgatttacgctcatctgcagactctgtgcataccgcgcaaaccgcccggcaccttcattttcgcttttatctgtcagacaattttactgctgcgccgtctgcatcctctttttcatatctaccttcggtgtgccctttatacggaccggaagcgcataaattttcgaatattcttcaaatttctcccggaaagatttattttcttcatccttcaaagaattaaggtaagcgtgtctgccgtactcgtcattatccgcctgtatcaggcagactgcaatgtttgaacagtggtcagcgattcgcttataactcgtcgtcagatcagaaagaatgaagccaagctcaatcgtacagcgtccctcacgcagacggtcgatatggcgcttcttcatctcgtcactgagatcatcgatcacttcttccagcggctctacctttcccgccatggcaagatcttcttcctgcattgcttccattgcaatctgtacgaccttgcgcactgcggaagaatatacctcaagttcggccgctgccgcttcagaaaacgccagattcttgtcatagatctcttttgctgcatttgcaataatgacggcatgatcggaaattcgctcaatatcgccgatgctgtgcagcagaacggaaagcgtatggctgtccttcgtctgcatctcgtttttcgtcacctgcacaagataagtaccaagccgatcctcataccggtctacgatactttcatcctcatgcaccacttccactttttctgcatcatacacattcagaagcgacattgccgtatccagcgcttcgatcgtgatctttgccatatgtgcacatgccacgcggcactgatccatcgcaagtgccgaattgtcaaggaagcgatcatccagcgcagacagaccctccagcgccccctcggtccgctcttcttcctttccgtcgcgcacggtaaggatcgcaagtttttccagcagccggtggaacggcatccagagaatcgttgcaaatacgttaaatgttgtatgcacaaccgcgatcccagctgcattcgctgcatcacctaaaaatccaaaatgtacaaagaaatttgcagagtaaaacagaatcataaacacaatcgttccgatcaggttgaaataaagatggacaaacgcggtccgttttgcattctttttcgctccaatcgccgaaatcagggcggttacacaagtaccgatattctgtcccatgatgatcgggatcgcagccccataagacaccgcaccagtcacacacagcgcctgcagaataccgacagaagccgaagagctctgaatgatcgcagtcagaaccgcaccggccagcataccaagcaccggatttttgaacatcagaaggatgtttgtgaattccggcacgtctgccagcggcttcactgctccgctcattgtctccataccaaacatcagaactgcaaatccgatcatgatcgaaccggcatcttttttcttgtctttcttggaaaaaagaagaagacagacaccaatgatcgcaagaatcggagaaaacgacgtcggcttgagcattttaatcacaaagctgtcaccctgtaacccggaaagacttaaaatccaggaagtgaccgtcgtaccgatattcgctcccatgataatgccgactgcacgctgcagcgtcatgatgccggagtttacaaaaccgaccaccataaccgtcgtagccgacgatgactgaatgactgcagttactgctgctccaagcagtacccctttccatgtgctcgatgtcagcttttccaggatcttttcgaggcggccgcccgatgctcttgtcaggccgtcccccatgacattcattccataaagaaacagggcaagccctccgatcattgtcaaaatactgaaaatatccatacactttctcctctgcgcattctgcgcttttacatgatttttactttagtgccatttttgaaagcgattatatccttttaaggtaaaattaaatggtatctaatgtaaaatctgtgtaaaatattggactatatcattttttcagcactttacccaattttcgtcttactacctgcccttaaatctggtaaatccgtatgattttattttttctgctgccgcttaatttccggcattcagctccgcaaatacatcattgaccacttttccgctcctgtgctttccggtcagagaaaactccacccactctgccacattcgtcgcatggtcgccgatccgctcatagtactttgaaatcatcagcatatccattgcctgatcatttgtatactgtccctcgatcgaacagcgattaatttcctgacgcacttccgtaaaaaggttgtcgagtgtatcatcactgtcgattacctctttggccatggaaagatccttctgtacataggattccacacttttgtttaccatgttcattgtgtactctgccatttccgtcaggcggacatctttgatcggtaccgtcacgctgccggtctgcatgatctccgcgatatcagttgcctgatctccgatccgttccagatccgtgatcagcttcagcgctgccgtaatccggcgaagatctgaggctaccggctgctgctgcagaaacagctgcatacagatactctcgatcatccgttctttcgcatcgatctcccgctctaacgcatcgatccgtgtcacaagtccctgtcgttcttcttctgagagcagaagccgataggtcttcataattgccttttcgcataaaagtcccatttccagtaattctttgtggagctgctccagtttttcaagataccgctctctcattcttctattcctccccgtgttccttacttttcagagccagacagtattgcttcctctgccctggtacacactgtccagacggatatccgcagtcagccatgtcaaacagccgctttgcagtttctcagaggctcttgtactccgtccggcagatcagccgaatcgtcctgtgatataatcttctgtctttttatttttcggcatggagaacagcgtcatggtatctccatactcaatcacttctccaagcaggaaaaatgcggtcttatcggaaatacgtgctgcctgctgcatattatgtgtaaccatgacgatcgtataatttttcttcagttccaccgccagatcctcgatcctggaagtcgaaattggatcaagtgcagaggtcggttcatccatcagaagcacttccggctgtactgcaagcgcacgtgcaatgcacaatctctgctgctgtccgccggacataccgagtgcactttttttcaggcggtcctttacttcatcccagattgcagcatcccgcagcgctttttctacaatatcatccagtttcgctttggatcggatgccgtgcgtccgcggtccgtacgcgatattatcgtaaatgctcattggaaacgggttgggtttctgaaacaccatgcccacacgcctgcgaagcagattgacgtccatcggaccgtaaatatcctccccgtcaagcagaagttctccggtgatccggcatccttctacaagatcattcattctgtttaaggatttcagcagcgttgatttgccgcagccgctcggtccgataaatgcggtgatctggtttgctggaatatccagattgatatctttcagcgcatgaaaatcaccataatataaatccgtatttttaatctcgatctttcccattttttacctcttccatccgttttcttctgctttctatctgtttcctctgctggtcagcccttttgcaagcaatccggaaagtccgttcagcacaagtaccagcacaagaagtactacagccgttgcatatgattcatccatatgaaggccctcactggaaagtacatacatatgcactgccagtgtacgccccgatcccatcaggctcggaatctttgcaaccgttccggcggtgtaaagaagcgccgctgtctcgccgacgatacgccccgttgccagcactacgccggaaaggattcccggcacagcagacggaaggacgattttaaaaatcgtgcgcagttttccggcgccaagtccaaaagacgcctcccggtaagaatccggcacagaaagaagcgcctcctctgaagttcggatgatcagcgggagaatcataatgacaagagtcatgcagccggataacaggctcaggccccaatgcagcgccgtgctgaaaaacagaagtccgaacaaaccgtaaataatcgaaggaatgccagaaagggtctctgccgtaacacggatcagatgaacaagacggcttcctttttttgcatattccacaaggtaaatcgccgcaaataccccaaacggaattgcgatcaccagggaaagtgccgttatgatcagtgtatttacaagtgcaggcatcaatgaaacattgtctgagttataagtaagtgaaaacaaagacggtttcagatgcggaacaccgtggatcacgataaacgctaccaggtaaatcatgatcgccatcgtcatgattcccgaaagccacaccagtgcttctgcaagcccggaaaatggatgatttttacatttttgcaaccatcttccgaacctgttgtctgtattttttttcgttttctccatttcgtgctcctccctactcgctctctgccttgcgtttcagagcagatacacaaaggttgatgatcaaaataaatacaaacagcactacgccggttgcgatcagcgcttccctgtgcagatccgccgcatagcccatttccatgacaatgttcgtcgtcatcgtgcggactcctttcaacagtccctgcggcatccaggtctgatttccggctaccatgatgaccgccatcgtctctccgatcgaacgtccgattccaagtaccacacctgccatgattccagattttgctgccggaaatatagtgcagaacacactgcgttcatgtgttgccccaagtgccagtgctccttcgtaataactcatgggtacactgcgaagcgccgattctgtgactcctgtcacagtcggaaggatcatgattccaagcagaatcgaagccgtcagcatcgtgcttccatcttttccggtaatctgacgcatcagcgggacgatcatgaccagtccaaaaaatccatatacgacagacgggataccggccatcagattcaccatcgttttcagtaccggatacagccgcttcgggcagtaaaatgccagaaagacggaaagcagaagcgcaagcggtacgccgatcacgattgatccggccgtcacataaatactgcccaggatgaacggaagaatgccgtacagattattcgacggtttccatttctggccaagcaggaaatccggaataccgatctttgcaattgccgggattccatttgcaaacaaaaagatgcagatcagtgcaactgcaagcacagacgtacatgccgcaacgaaaaaaactatctgcatcaatcgttcggatgtctttcctttcatatattaaatgactccttttcataaagcagatactccagattttctttgttacctgcctttaacatattttgcgttcaaatggtatttcttctgattttctgaaaaatgccctgtgccttctgatgcagacacagagcagctttcttttttcggaaatgtttgcctgttactgaagctcttcccaggtagtgatattgcctgtgtagatgtcctttacctgctcacttgtcagctctgtgattccggaatcattgtttacaataattgcaataccatcctgagcgattacggttgcggtcaggcctgtctccagctcgctgtctttgagctcacgggatgccattccgatgtcgcacaggccgtcgattgtggactggatacctgtggtagaatcgctctgctgtacctcgatggttactttatcgttgactgtctgataagattctgccagtttttccataaccggtgttacagaagaggaacctgcaacgactaccttgccctctgcatccgttgctgcatacgcttctacatcttttaccgggatatatccgttatctgcgacaactgcctgtccctcggtgctcatgatataggaaatgaaatctgctgccgcatcacttacttctgcggttgttgcgatgttgaacggacgaactaccttgtagctgccatcctcaattgcctctgcagatgcctctgcgccgtcgatctttacagcggttacggtgtcatttaatgatccaagggaaatgtaaccgatcgcattgacatcctctgctaccgtgctgagcataactgcggtactgtttgtaatctttgctgcctctgtcgtattatctactttatttccatccgcgtctttttcctcaacgcccatcagctcaatgaaggcgcctcttgtcccggagccatcctctctggatactacggtgatatctccggatgctgctgccatcgcggtcatccctgcgcttgctgccataagtactgccatcactgctgctgctgattttctcataaatattctccttttctgtgagacgctctctgattttttgcgccgcacccgggcttttgccggtgtttttcttttttgttccgtgttcatgttacgagcagtattgtaagggagcgatgtaaaatgtaaaacgtgggatatgtaaaatgagggtaaattcaaagtaaggcagcatccagtctttcaaacacatccgggggcaaaaaacggaggaattttttgaagcgccaaaagatttcctctttctgccggctgttttgtacaaaaaaacacagatggaataaaatgatacatttccatctgcgttcttttcgttaaatttttatgtgctctgtccgttaccgcccgatcacttttgcaagcgcccgaatatattccggtgtcgtgccgcagcacccaccgaccactccggctcccgcctcgatcagctttttcatggccgccgcaaactgttccggtgtcatatcgtagtgggcaaaacccatcttatccatgaccggcattccggcatttggcttggcaagaaccggaatttccgccacttccttcatagagcagatcactgcttccagctgattcgggccaaccgagcagttcagtccgactgatactgctcccattgcctgaagtgtctcaactgcttctaccgcatctccgccgtaaagcgccctgccgtccgcctcaagcgtcagcgaacacattaccggcagatcacagaccgcctgaaccgcatccagcagtaccgttgtctcatccacgctcaacatcgtctccgcgacgatcaggtctgcccctgcatttgccagaacagctgcctgctctttgtatacatccagcagttcttcgtaggaaatatctccggccggttccagcattcttcccgtggtcgtcatgtctccggcaacataagctctgccccctgcgatctcctttgaaagttttacgatcttcgtgttgatctcctcaagccggtcgggcagtccgtgcatctccagtccaagtcggtttgcagaaaatgtcggagcgtaaataatctggcttcccgcctccacatacccgttctgcagcgcccgcactacatccgggtgttccatcgcccataattctgtgctcacaccgaccggcattccagcttttcgaaaattcgatccggttgctccgtccagcaaaacgatatccgatgctgcaagttcctgaaattctttttttgtcatatccttttcctcgtctttctgatccgcgtgcgccgcaatcgctgtgctgtaatcattttattctcttcattttgtgtattgaaaccgtctctgatttgtgcaatccccgcatgatatccctcctgtttttcccgcatggatatcatgcgcagcctgcctttttatttttcgatccccattgctccccggattgcgccaagcagctcctcatatgtctcgtacgccggaatctccggatactcagatttaattttatcattgctgcggaacagaaatcctgccttgcttgcctggatcatgccgatgtcattgtaggaatctccactcgcgatcgtctcaaatccgatcgtctgcagcgcctttaccgtcgtcagcttagacggaaccacgcgcattttataaccagtgatcgccccgttttctgctatctcaagagagttgcagaacagagtcggcctgccgagtttttccatcagcggcattgcaaattctataaacgtatcactgagcaggattacctgggaaaaggtgcgcagctcatccagaaattcttttgcgcccggaagcggatcgattctggaaatcgtctcctggatctccttcaatccaaggccatgctcctttaagatattaagtctccacttcatcagtttgtcgtaatccggctcttcctgcgttgttcttgtcaattccgggattccgctctcttttgcaaatgcgacccagatttccggtaccagaactccctctacatcaagacatgtaataaacattttttcattctccttttctgaaccaccctgtgtggtatgatcctgctttttcctgcaggtgatttcctgtaaagcggaaattccagatccgccgctgctttcatcttaacacacggtccctgctcccgcaatcgctatttctgccatccactgacggtcatttatgtccttccacgcagacccacgttgtcccttctttttcatggacgtggatctccgcaaaacccgcacgttcaaacaggtttcgaaactcttccagtgtcggattgaacagatgaaaacggttgatattttctacaactgcttccggcaggtcgtctcttccgtagacatccgccacaagaagaaaagttccgcctctttttaacacacggaacacctcttttaaattttcctgcggatccggccagaaataaaaactttccacggtgatgatcttatcaaatgtctctgccggaaatggaagatccgcaacggaaccttccagaacttccatttttcccgccgcaactgccgtatcgttgacctcttttgatgtcttgactgaaacagacgaataatccacaccggtcagatgtcccgtcgtcaccttctcgctcatccgcttcagcgttgccccgcctccgcatccgatatcaagaatctgttcgtttcctctgatctgccagtgctccagcccccagccggtcacagcataatggctgtcattcatccgcagcaacattgcattcccgtcctcaccctgcggtttgccaggattccctgagcgtgtaatctccgcctgggtgcgccctgtctccactgaggtatccgtatgtacaagattttctgctgtttcgctctgcttatgcatttcgttccgctccgtcagatccactcaaaatcacctccggtcaccgcaaggctcagaagtgcatccatcttttctacttcttcttcgccctcaattttctgtttcagatctgcggtctcaagcagatcctctaaagattcatccggaccgatctcataatcgatttccgcctcacactccgggcaggaaacccgttcttttatttccagagacagaaaacggttgccgcattttctgcactcataatatccgcactgttttgtgccatccggtacgtagtacatgctctctcctcctgcttttctctgtcatcaacgtcccatttactgctgccgccctgcactctctccaagtacaatcctgatcagctgctgatccagcatcagcgtccgattccatggattgaagatgacgccatggattccttctgccttgcctgcctcctgaaacagctgtcccatatccgtcagaaatgtcgacatgacgcttccgcctccttttacctcttcctcaaagctggtaaataccatccaccagtttttcccgtccggcgtctggattgcccggatctgaagcggtccatcacctgcctgcggttccactgccacgatcacctgaccgttttcccgtatgcgtcgacgcactactgtcaatgcatgtgccagcagctcctgtgtcggttcccgctgcagcgctgcaattgcctcctcgatcttttcgtttccgatgaggccttcttcttttattttcattttttctttcatggtttccttttccggcgcactctgtggtgcacaccatttttgatttgtaaagcggatatccgcaattcgctttgctcccgattccgatcattttacaggcaaaatgcttctgtatctgccgcatcgcgacacgactcgtctattataccatttttttacagacatgcaaatacggctgctataaaataaatccgttgacagttataagagaaggctattgaagtcagcatcgttataatatgaatttttttcattatacgcaatcagagcagcgatacaaaatgcggtactctttcattttgcagctgccctgatttttctgtcatcctgattttttaggacatcccgtttgccatcttatatttgtacagcatctccgcatgattctgctcttccacctgaatgtccgcgagcagcttccgcacaccgctctccccaaatacaaacacgtccgtattgtactcacccgatacaagtttctctgtcgcaatgcagtctgtcgccagaaatgcatcgttctgcttttcctccgaccagttcatcgcatcataggatgccctcggcatataattttttccgtcggtgtcgttgcagtcacactgcggaactgctccggaaagtacctgtccaagtgaatcgtaatgcttctgctcttttccctgcagtgtttcaaacagacttttcagctccgggtcctttgcctgctgtgcatattttccatacttttccacacagcttttctcctgtgtctgcagatccatgattgctgcccgttctttttcgtttaaaatcattgctgttgctcctttcctgtactgcgccattttataatcatgcaaaataatccgcttcgctgctttccattttcggttttgcacgatatctatcatttgcatagaagtagtatggacagccgtgctgagttttattcttttcatgctgatttttcgtcaagaccgcctgcaaacatctgctttcacccaatagccgcaaagctgtttattttcggatattccccttcacgatattctcccggatcagctgatcggtcacctcatacagtttctcggagccttctgctgtgcggcgctgccttccatagacctgcgcttccgtcacctgatgctcccgccagtcaccgccgtcattgctgttgttgagaagtaacggctgcagattgtcaagcgcccgcgcaaacttcgcttccggtgtcttccgctcctcaaattcatcaaaaagtgcctgaagatcctgtttctgatcatctggcaagagtgagtagatcctctcttttgccgcttcctcccgcgctttctgtgtcttcagcccttccgcgtcgtaagcatacgtatcccctgcatcaatctccactacatcatggatcaggcacatgatcatcacctttgccacatcaatcggttcgttggagtattctttgagcagatacgccatgatcgccatgtgccacgcatgctccgcatcattttcccgcctgccatgatcagacagatgagtctgccgcagaatatttttttctttgtcaatctcaaggataaaatcgagctgcttttttaatcgttcgtccatttacgttcctccatgtattccccgtaaatccaacatttttatcgtttccatccatgccccatcttcctgaagccggatgtgccaaatattccggattgcagaaaataaaaagcccgccaaacattcagtggtatggaactgctcttttcccggaaacagaaaacccatcaggaaacgaggtttcccgcatctcctgatggatcattatttacacctgaaatgtgtaggctttagagcgtgtctgaaaaatacctttttgcaatctgacaatctctaataccggatcacagaaaagctttttgccggaagtatcacacttccatcaattcggactgcattctccgtcactttcgacggctccggcatattctccggtttctcacccgcgcactccagcgtccagatttttccgtccgcctctgtcttcgctccctgttcatcagcgagggcaagtgtatacggctgagcgtttgtattgactgcttttacgatcacctctccggcccaggttcttgtcacagatacgtaaatgctgtccgcacgaagcgctttttcctgtccttccatctctacggtataatcaccgaggtggtttgcaaacagcttctgtacatagtaattcggggtcagatatacgttttctgcgtcaaaccagatcatatccggcttccactggctgtgtccgatccggttgaacagcggcgcataggaagcaagcttcacaacgcctgcgttcttctcaataccggtcagaagcgccgcctctgccagtgcactctccaatgtattttctttatcctccgtatgggccgcatattctcctgcaaataccgcaacctctcttggatagctatcgtacagatccacatgatcatacatccactgcggcgatacgtaataatgctcatccactgcatagcaaaaatccggattcgtcttctggccattccggtagaagtcccatgcaaggccggtcagcggtgcatcaaggatcggccctgccgttccgagcagccgcatatccgggtagacttcatgaattgtcttttcaaacagctcgtgacgtttaaacagatcgagatattctgtctcccactgctcatttccaactgcgatcatatcaagaccaaacggctgcggatgccccatctgcgcacggagactgccccacttacccctgacatctccatttgcaaactcgatcagatccagtgcatcctgaatatactcctggaatgccggatcatctgtgcctaccatctgcgttgtacggaactgacatgccgcgccaaggttcagtaccggaagcggctttgctccaagcagctcacacagcaggaaatactcataaaaaccaatgccgtaggactgtccatagtgtgcatcagggcgctgtacatccagcccctctttgctcctgtcatcatcaaacgcccagagattcggaatataagcacgatctttccattcaccgactgtccgtttccagcgataacgatttgcaaggctgattccttccacaatacagccgcccggaaaacggataaagcccggagttgtcgctttcagtgcttcaaacagatctttgcggaacacgcctgccactgcgtcgcccgggatcatcgaaatcagatcaaattcgaccacgccagcctcctcaagtgcgatcacaaactgtgcatgctttgcatctttgcgggcatgcagcactgtctcatacgctacccagtcgttgcagcgggttctgcctgccttgtccatctcatggatcgcctgaatcttctcatctgctacgccggtcttcatctcgatcgtaagatctgaaaacggaagatacgggatcggttttaccgcctttacctctgcactggcgcaaatgtcatctgcactgcgcacttcaacgcggaaattttctccctcatactgcacacatctcgcatagaaagtcactttgtaatccatgccttttttcagaaaaattccgtcataggccttatttgcgaatccctgtcctgcacctgccgccgtaaaacgcaggtagtgcggattcacctcagaaaccggatcaccggtcacaaactgcaggcgcggctccctgccgtccgctccttttactgccgaccagccatatccgcagtcgtccaccacataaaaattgcccggtgtaccgaatgcttcctttgcctcaaacgagcggttttcgatcatctccgcataaagacccccgtctgccgcaaaattaatatcctcaaaaaataatccgatcatatccggtgaaacagtttctttctttctgtctgttattttcatctcttcctccacatatttttagtcaaagcgaaatttgcataccgttcttctttcaaaacataccagttttatccctgataatatcaaaaatagtaccatacgcgacgtaaaaatgcaagcagcacaggacttttggcacgtttcctttattcattccaattaatggtatttcccatttcaccgagaagatttgtgctcatgaccctgcgcaccttctttggatcttcatactgtccgagcgtccacatcagcttcgtgacggcagcttccgatgtcatatttcccgtctcgatcacgccgtatgcaagtacctgacggccaacctcgtataccgaaaaatcactgccctcatacaggcactgacttccaaccgcaatcaccataccatccgccacagcccgtccgatcgcctccgacagatttctgccctcaaatggcagaccgccaatgccgaatgcctccacataaacgccgcggatccccatctctttcagccgctgaaaaatatccggagacatgcccggaaaaatcttcagaagaaaaacatctgtacaaaagtgattttgcagcacacactttccggctctccgtcgaagcatcggattgatcatcaatcctccgctgttgatacgcgccgcatacggataatcaatactctcaaacgcatcaaagctgcgcgtacgcaccttgctggcccgtgttccctgaatgatcttgcggttgaacgccacataaacgcccgggcagtggcttgctgccatgtgaagcgccgcgcggcagttctccgtcgcatccgcgatcggattctcgattgacacctggctgcccgtgagcaccaccggaatctcgattccctgcagcgcaaacgaaagtgcacttgccgtgtaggccagggtatcagtcccgtggatcacgacaattccgtcatactcttttctccgttcgtaaatgtgcgccgcaatcacgctccagttttccggctgcatattcgagctgtcaagcatgaacagttcttcctccaccaccgtaaagcctgctgtcagaccggaaatacggtccaggatctcccctccatgcagtccgggtgcaagtccgttcgcactgtgagaggaagcaagcgtaccgccggtgctcagcatcagtattcggttcatataaaattatttcctttcgagttcttttctttttataaaacaggaagcatccgctccaaagcggatgcttcgctacttgcctggctcgggtcaaattgtaaatccggcatgttttctgttgtatcaggcacgactcttttataaaaaagtatagaggaagtaacggaaaaagtcaaccgatcgccgccagattttccatatcaatcttgtaaaacctgctattttgtgctattcttttaatcagcatatctacagaaaaagatgggacgtaaatatgaatcatacactaccagaatttataggaaccacggtgcttgacacgatcggtcttgtcattgccaatgtggctcctgctcttcgcaaaaaaatgaaaatggaagctccttaccgcagtatcggaatcatcagttccaggattggcgccacaggacagatcatcgctgtggatgacgcagtgaaggaaacaaatacaaaggtactttccatcatgctgccacgcgatactaagggtggcggcggccatggaaactatattgtgatcggtgctgagaccgtcgcggatgcccgaaaagcagtggaacttacccttgagaaaacgaaaaaaaatgccggcgaaatctacgtcagcagcgccgggcatctggaaatggcattttccccgagagccgatcaggcgcttgaattagcttttggaattccacatgggaaagcattcggatttgtgtgcggctgtccggccgcaattggcatggtgatggcggatcttgccgtaaaatcagccgacgtggaaattgcaaaatacatgaccccaaacgaaggcaccagccacacgaatgaagtgatcgtcgccttatccggtgaaaccagtgctgtaaagacggctgttctcaccgcacgggaagcaggtcttgcacttcttggttcgatggaaggagaagtaaagagtctgggagagccttatattctctcttgattttcaggaaaaacggcaccttttgcgtactgccatactcttttagcgtattttcacaggcatctgcatattcatgaagataacaaaatattcagtgaacctcacatgactacgattcccatctggctgaatatattggcaattccttggtttcggatcttggagtgaccattcatgacttcctcataagtcaatccgttatataatccacccggagatgtcacctccagtctgtcatcacattcgttgccaaaagctgtccctcactctgctttaagatcttccagtttatcagctgttctttctaatctatgctcactggtacgagtaattctatttccagaataagaactctctggatgtttaataattattatacggtccattcatcactttccacaaacaagaaaaagaaataatcaatatataaggtttgtcacaacatccacaaactttaactattgtccttaaaatacaagctatctttctggaaaatagcacaaaaaggatgcactacggtaacttctccattaccttggcacatcctttcgtattattattttttgctattcttcttaatgacagctatgacttccacatccatgctcgccacatgtatgtccttccccgtggctgtgctcatgatgagaacacttcacatttggattatactcaagtgtttcatcgataaaagcttctaccgcttcatccgcatctccggaaactcctccgaaaagcttaataccggctgccgctaacgctgtctgtgcaccgcctccgattccgccacagatcaaaacatctgcgttcaatgcattaagaactcctgccaatgcgccatgtccgcttccattcgtatctactacttctgaatgtactacttttccttcctctacatcgtaaatcttaaatgtctctgtgtgtccaaagtgctggaaaatctgtccattttcatatgttactgctattctcatgataccttctcctttttctgatgcatattttttataaatttcctgtttgtaacatcctccaaagctgcagttgctgctctgaccgtcacagattctgaaatcaccaccctcgattctgagtggatgtccatcaatgagtgcatctgctattttcttcctggcaatctcgtaaatccgttgaaccgttgttcttgcgacttgcatagatgctgcacactgctcctgactataacctttcttgtccaaaagacggattgtctcgtactcatctaccgtcagaacaatgggcatttttttctcagtatcatctgccggaagaaattctaaaacatttgggaaatggcagacttttctgcattttactggtctcggcat

SEQ ID NO: 2241 - DNA, 3219 bp, Unknown
  16S sequences of unknown bacteria
gattgtctgcacctcaacccggatcctgccgccgccgctgccgctctacaccggcgcagatgaagcggccttggcggcgctgctgcaggcccacggcgttgtctgcgccgggacggcggcggagcggggcaagctggctgcgcccgcgctgccctttgccgcgctgtgccggttggcggactatgtgctggtggaggcggacggctccaagcatctgccactcaaggcgcatttggcccacgagccggtgatcccggcggagacggggcaacgcattttagttgtcggggtgatgggttttgaccggcccatcggcgagaccgcccaccgggcggcgcagttttgcgccctgacggggcggcagccggagaacctggcccggccctgcgatattgcggcggtgcttcggcaggaggacctggcgcggactgtcgttgtcaaccaggtcgagacgccagagcagcttgcccaggcaaaggcactggcgtcttgcctaccggggcgggccgtctatgccgccgcggtgcagcgcggtgcgtgccagcggctgaactcgccgcagggcggcatgatgtgacagaagaaagggggcgacgtcttggcaagaggaagctggaggcagaatgccatctatatctccgcccggctgcaggcgtgcctgcagcccattgcctactgcgccctgacggcggtcgtcgccccgatgggctatgggaagacgacggccattgcttggtatttgcaggagcaggccaaaaaagcaggggcgatcgtcctccgcgtcaatatttattcggagaatttggcgatattctggagcagcgtgcgccgggcatttgcccacgcaggcttttcttttctggaagactacgcttgcccggaggatgcggcgggggctgggctcctggcggagaccctcagctatgagctgggcggcgacaggccgtgctatcttttcattgacgatctgcatttgctgcgggacacgcgagtggctgaatttgcctgccagctggccagccgcctgccggaaaatgtccatctgatcctggccagccggaatgatttcctgcccggggcggcaatcttgcgcctgggcagccgggtttgtcgcattggcgtggcgcagctgcggctgacggagacggagttggcggcctatgcccgccgatgcggcgccgtcctgacaaacgaggagatggtgcggctgctccgtgtcagcgagggctggttttccgccgtctatctgcatctgcgggcgctggcggagcacggcgcgctgcctgtggggcagggggatatgacggcgctgttttttgacgcgatgatcgacccactaccgccgcagcagcaggagtttttagccgtcatggcccaggcggatgaatttaccatgccgatggcccaggctatcaccggggcagcggagacacaggccctgctggcggcgctgacggcagaaaacgccttcgtgacccagctgcccgatggcgagacctatcggttccaccatatgctgcgcgattgcgccagccaggcgttttcccgcctgccgcaggcccgacagcggacctatctggaccgctacggcgcgtggtacgaagcgcggggccagtatctgcacgccctggcggcataccgccgcagcggaaattttgatcggatgctctgcgtcgtggaagcggatgcggggattttgctggcgtctgtccggccggaggaggttttgatctgcctggatgcctgcccgtctgcagcgctgcacgcgcatcccatggccatcctggttttgatgcgctgcatgttcaactggcggcgcatctcggagatgctggcgctgcaggggcagtttgaagcggccctggcggcgcagccgtcgatgccgtctgcagagcgggatcatctgctgggggagtgcgacctcatccgaagctttctctgctacaacgatatttccgccatgagccgcctgcatgccagcgccagcgcccggatgacgcgcccggccatcagcatccgcaacagtggaggctggtcgttcggctctccgtcggtgctgatgatgttccatcggacccccggcggcctggcacgggagcaggcggagatggatgcgtgtatgccgcattattataagatcacagatggtcacggccgcggcgcggagcaggtgatgcgggccgaggcggcatttttgcaggggcggttctgcgatgcgcagattgcgctggagcaggcctatgcccaggtcggcggcaatgagaatatggcgctgtgctgcgattttttggcctggcggctctccctgtgcgccaaggctgcggcgcgccgagattttgccagccagaatgcgctgctgcggcggcagcacaatgcggcgtgggtaaacctcttttctgcgacctgcgcgtattattatgcgctgctgggtctgccggaaaagatcccggccctcttccggctgcacgagctggagacggtccatttcctagccccgggcaagccgatgatggtgctgatcgagaaccaggtctatcttgcccagggggcgtatgccaaggtcctgggcgggagggatgcgctgttgggccagtgccaggggctgcactattgccttgtggcgctgcatgtacagatccaggccgccgcggcgctgacgcagctgggaaagctggacgatgcccgggcggcgctgaccagcgcgttagatctggcgctgccggacgaactgctgctgccctttgcggaaaaccacggctatcttgcgccgctgctggcggccccctggccgaacccataccgggaatttttgcggcgtgttgcgcagctgggcgcggtccacgcggcccggtgcgctgcgctgcgggctgccgacgaacgcccagcggccctggcggcgctgacggagcgggaggcagccatcgctgcgctgatcgccgcccgctgcacgaaccgggagatcgctgcccagctgtgcctttccgagggcagcgtcaagcagtatgtgaaccagatctacgcgaagctgcagatcggcggcgacactcggaccaaacgccagcgcctggccgcgctgcaaaaaacctaaccattggttaataccctgcaagcttctgctctggtatgatagaatcataccagagcatcgttttcgtagaaagacaaccacccgctatgcgggtgagacggaaaaagttcaacttatgcgtagaaaagaag

SEQ ID NO: 2242 - DNA, 3260 bp, Unknown
  16S sequences of unknown bacteria
ccgagctgaagcggcagattgctttaggcgatatggccaaaaccgcgcggaaaatgctggctgatgagcagatttctattccagacgaaatggtgatgcatctggtaacagacgatgcggaaaagacaaaagagatcgtggagagtttcgctaaatcctataaggcggcattgcaagcgggcatcaaagaagcgttccgaggcaatccgcccaaagccaaccagggcgaaaccacagtaaccagagagcagatcctcgctgtaaaagacaccaatgaaagacgccgcttaatcgcggaaaatccacaattatttgttaggaggtaactatgaacaaactacagttattcgccgctgagcccaatgttattacgactcagcaattttctgtcaacccgagagaggttgattttgtcaccagctttggccgcgaaattaccgcgctgaccgaagtcatggggatcagccgcccgatcagaaaggccaatggcaccaccctgaccgccaagaaggccaccggtgagcttcagagcgggatcgtagcagaaggcgatgtaatccctctgtcccagttcgaggtggagcctgtggactttgcgcccatccagctgcagaaataccgcaaggcggtgaccattgagtccattgagaaatacgggctggaaaccgctgtgggtatgaccgatgaggaattcaaggtccagctgcaggatgaggtgctggccaccttctataacttcctgctcaccggccagctgaccagcgaggaaagcaccttccagatggcggtggctatggcgatcggccgggtaaaggacgcgttcaaaaagatgcatcgttccgcaacaggcgtggctgtgttcgccaataccctggatatttacgagtatctgggtggcgcgcaggttacagtccagactgcttttggcatggactatgtggaaaatttcctgggcgcggatatcctgttcttctcttctgaaatcccccagggccgggtcattgcaacgccggtcaataacatcaacgtttattacgtggacccgggcgattctgaattctccgaggccggcctttcttataccactgattcccaggttccttatatcggattccataccgagggcaactacaagcgggcacagtctgagtctttcgccctcatgggtttaaccctgtttgcggaatatctcaacgctatcgctgtaatcactattacagatgcaccagaactcaaaaccatcactgtaactcctgctgaaggcacagcagtaggaaccacaaaagcatctgtatccgggaacaccacaacgaatctgaaatataggctggcggatgcggctgcagacgtggagtatggccaaaatgtgagaaactggacgaattttacagcgaatgccgacatctcggctacagcggggcagaccattacggtggttgagtatgacgattattacaaggctgttggacaaggcagtgctgcggttgttgtaaacgacggccagtaaggagccgctatggatgaactgcttactcgattgaaaacacggctcccagacaccgaattgacggatgagcagctatccgagtatctgcagaccatgagcgaccggctttgtttgcggctgggggctgatacgctcccgccgcttttcggttcgatatgcgtagatgctaccgtaaagatggtgcgccggacgtactacgaggggatttcttccgagggagtggcaaatatctctacttcatttgtggatgatattctggcagaatacgccggtgaaattgaagactggaagagtggacaggcggcaagcggaaacagtaagaaggtggtgacgttcctgtgatatggaaaccatgtcagctacagatcattaccggacagacagaggacgcactagggaatatggtcggggggacttggcagacggaaaaagaaacagtttgccgcttcacaccttggacagatgaacagatcgctctggaaggccgggaagtgaccaggaatgagcagcagtttgtgatcccgatcccatatgatcagtttccggattgtactcacgccgttatcgatggccaccggcaggagatcagacaaaagattgacctgtccccaagatatactgtgatccaggtgcaagtatacagggagtgatgatatggcgtttggaataagattagacggaatggaaaggctggaaaataagctgaatgagatgaatagcattaaatgggaagctattgtgaaaaagaatgtcacccagatgtttaaccgtgcaaagggcacaaatccgcaggaaggcgggacgccagttgatagtggggaattaaggcagtctgtccggagattagaagacggtatttcatggaataaagagtatgccgcgcatgttaattttgggcatagggttgtcgtaaatggtgaacaaaaaggctatgtccagggacagcactttgctgagaataatcttataatccagcgtcctatttatacggctgacattataaaagcaataaaggaggctacggagtaatggcttatcaaaagttatcgccggtagctcttatagcggctatgcagaccaaaattgaaaaagaaacgggcctgaaatgttacgatcatgttgaattgaacactaaaagcccattttattatgcggaaatcatccgcattctaccggcgaatacaaagaccatgttccgggataattatacgattcagatccattgcattgcagaagtatcaccgtcatctataggcgtatacaacatgattcaggcgctacaggaagcgatgagtaccgatattactttgccggatccctttgagttggttttgcagacagatggcggagtacagacgatcaaggaagatgaaacgggcgaaaagcatgcagttgtcaattatgactttatgatctgctatggttttcgctgtaaatgacaaggaggttatgatatatgtcttttgacagcaataaatattgtgattttaccagctccgctgcaaaagctgtggctggtaaggatatcctgttggctatatggagcgcagatggttctaagcttcttgcgatcagcggccagcagggactgacgatcaaccggtccgcagatacgatcgagatcacatcaaaagatacccagggcggatggaaatccaatattgcgggtatgaaagagtggtctatagataacgatggtctttatgtgccgaacgatgaaagccattcgatcctgtcacaggctttcgaggat

SEQ ID NO: 2243 - DNA, 6621 bp, Unknown
  16S sequences of unknown bacteria
gtgaactgaaacggacagcacgccagctgctgctcggaaactacacaatactcgcgctggtgaccttcctgctggcctgcagcaatttctttcttagctcggtaagcctcctggctgtcccgccgatcggtggctggattggtcgtgtacttgactttgctgcgctgcttatcacaaacatggtctacacactgctgcttgccggaatgtactatatttactaccggatcacggagcaggagccggtccggttctctgatttgctcttcgcctttcggaaccatccggaaccggtcgccgcattttctgtgctctccctggtcgtggaatatggtgtcctgaacctgctcccgcttagctatatgcagttcggaagaagccttccgttcgttgctgtctccatcgtgctgctcctcgtcctgctctggtatatcctgacgttctccgccgtcttctttttctacgcggcagatccatggcattccctgcaggactatctgcggcagagtatggcacttatgaaaggctgccgtgtaaaatttttctttttgcttctaagcttcatcggcgtcttttttctcggtctgctctcgtttggcatcggactcgtactcgtgatgccatatatggtaatgacacagcttctgttctttcgtacacgctggggagataccgatttataatgtacaggtatccggctcgtaagtcctctccaacagcacatccatcattttatatccttccatgcgccggatgccgttctcctttgcggtacgctcacaataaatcgtactgctgccaaggtgcttccggctgtcgtacagcaaatacggtaccggctcagcactgtgggtgcgaatgcgaagaggagtcggatgatccggaagcaccagcatgcggtaatcctctccggatgcatccagtccgtcctttacgagccggatgatcctgtgatccagattttcgatcgcctgcagctttcgctccagacttccctgatgccccatctcatctggtgcttccagatgtacataggcaaaatccattccatcctgcaaaagtgcctttaaggccgcttctgcctttccttcataatttgtatgcagtccgccattggcgcccggcacctcgataacttgcatctttgcaccgactgcaatccccttcagcaaatctactgcagagatcattgcgccgtttttcccatatttttctgaaaatgcggaaagcatcggctttgtcccggccccccaaaaccagaggctgttcgccggattgagcccctttgccctgcgctcctgattgatcggatgattcgcaagaatctcatagctgcgcttttgcatctcgcgcagcatcgcatcctgcggcagatatggatgaatcacctcggtcagatgatcgtgcggcggtgtcagctccacgacggttccattcttccagatcatacaatgacggtagctcgtcccggtataaaactgatagttctcactctgcagctcctttttcaccgcatccagcaagacatccgcatcctccgtactgatctcggaagagctgtgatccagaatccgtttctcttcatacggctcctcctccgtcagcgtgacaagattgcagcgaagcgccacatctgtatcttccatcggcacgccgatactcagtgcttccagcggagagcgcccggtataatattccttcggatcgtagccgagcactgcaaggttcgccgtatcgctgcccggcttcatgccatccggaatggttttcaaaagcccaatctccgcatcctttgccagctgatccattgtcggcgtcttggccgcctccagcggcgtcctgccatccagcgcttcgatcggctcatctgccataccgtctcccagaatcacgacatatttcataatgtattctccctctttcgcaatctcactcttattctgtagttacttctctctcacccgcagcattgacagaatcccatccgtcttatccgcgcacgcctgatattccttctccgtcatcctgcctgtgaggaatccgaattctccatccagtccggcatcaaccgtctctgttgctccaaaagctgctgtgatcgctgttgcttctgaaacggctccctttacacggacaaaataacgcttctttgtatcagaaagctccgccagtacaagcttttccttgctccactccgactgtaccgtccgtccaagtgtctgcgcctcctcaatgacgtcccctacgactgcgctagccgtcgcttcttttcctgctccctgtccatagaacatcgcatcgccaagcatatttccatgtacaaaaatcgcattaaacacgccattgaccgcaaacagcggatcgtttgcgctcacaaggtgcggcgctaccattgccagcacctgatcctcttctttccggctgagtgccagcagcttaatcgtctttcccatcgttttcgcatagcgaatctccgcagaagtaatcttcgtaattccctccgtatagacatctctgaaatccacacgctgcccatacgcgagcgaggagagaattgcgatcttgcggcaggcatcgtgtccctctacatctgcctccggattgcgctccgcataccccttctgctgtgcatcctttaatacctcgtcaaattcgagcccctcgtctatcatctttgtgagaatgtaattcgtcgtaccatttaaaatgcctgcgacctcatcgatgacatccgcacacagactcgtacgcagcggacgaatgatcggaatgccgcctccgcagcttgcctcaaacagataagatacctgatgctccctcgccagagccagaagctctgtgccatgcgtcgccacaagctccttatttgatgtgcagacactctttcccgccatcagcgcccgctttgtaaaggtaaaggccggttccacgccccccatcgtctccaccacaatgcgaacctccggatcctgcaggatcacttccacatcatgaacgactttctgagcattcggatcacccggaaactctctcagatccagaatatattttacctgcaggtccacgcctgcctttgcaaggatgctgtcatgattcgtatcaatgaccttcaccacaccgcttccgactgtaccatagcctaacactgctgtctgtaccattttttctcccctttatctttactctcttgccagtattttcagatactgaatgccttccctggactcaatcgtctctatcatcttcgatatatctccggtctcggcaagcacctccacactgatcgtcagggtcgccaccccattgatcggaatactttggtgcagtgtctgaatattcgccccatactctgccactaccttcaggacatccgacagaagtcccggctcgtcgtgcagctgaatcacgaacgtcagaatctttcccttgatattatcgcgaaacgggaaaatatcctctttatatttataaaaagagctccggctgatccccactgcatctgccgcctcctgtaccgtaccgacccgtttcgtatccagaagccgttttgcttcaacaaccttcagtaatacctccggtacggccttttcccgtaccacaaagtactttttcttctctaacatgattacgctcccaattataatgcttcttgtgtttgtctgcgatgaacgtttgtctaccaatgaaagatgttaccatattttccccagtgacgcaaccgttttctgtatgcttccgaacaggaatgggtagaatctgatatatgaaaaacagacggcacctgaaaccgtctgtttttctgttttctatatttctttttctcaggcttcctcttcagatggctgtgcgcctaaggaaacccacttcagataggcattaataaacaaatcaatattaccatccatgacgctgtccacgtttcctgtctctgcattcgtccgatggtccttgaccattgtgtacggctgcatgacgtaagagcggatctgattaccccagccgatctccttgacctcaccacggatgccggatgccttctccgcattctcctgctgcttcagaagatacagctttgctttgagcatctgcatcgctttatccttgttctgatgctgagaacgctcgttctggcactgtacgacaatccccgtcgggatatgcgtgatacggatcgcggaagacgtcttgttgatgtgctgtccgcctgccccgctcgaacggtacgtatcgatacgcagatcgtccatattgatctcgacatcgacatcctcctcgatatcaggcatgacatcacagctcacgaaagatgtctgacgcttgcccgccgcattgaacggggaaatccgaacaagacggtgtacacccttttcggacttcagatagccataggcgttcgtaccgtttacctggaaggtcacagacttaatacccgcttcatctccgtccagatagtcaagtacttcgatcgagaagccctttttatccgcccatctcgtgtacatccggtatagcatcgacgcccagtcacaggactccgtaccgcctgcgcctgcatgaagcgtcacgatcgcgtcatacgtgtcgtactcgccggagagcagtgtcttgatccggatattttcaaaagtctcctggaatgtatccagcatctcctggatctccggaacaatctccggatcattttcttcgtagcccatctcaatcatcagctcgatctcctcatactgatcggtcagctgcttgtaggtcgctacgtcttcttttaaatcactgagcgtcttcatgtgctgctgcgaacgttccggattgtcccagaagtccggctcttccattttacgctccatctcctggattttctgctctttatttaccaggtcaaagtgaatccctcacttccactaatggttttgtatagctgtttaaaatactcttgaactgatccagttctaccaatagtttcaccctctttctttttcgtggtactccatggaccattcagccatggagtaaatcaaccggtgctatgaaatatgcctcaggcctttctgccgcagcactgcttgtactttttaccgcttccgcacggacacggatcgttcggataaatcttctgctcggcacgcttcttcggcgctctcgggccggactcatccttattcgtgccggtcacctttgcgacctcctcgcgttccaccttctgctctacctttacgtggaacagcagacgaaccgtatcctcctgaatacctgcgctcattgcatcgaacatctcatacgcgctcatcttgtactcgacaagcggatctctctggccgtaagcctgcagtccgataccctgacgcagctgatccatatcgtcgatgtgatccatccacttccggtcgatgactttcagaagaatgacacgctccagctcacggatctgctcctgctccgggaactccgcctccttaagctcataaagcttgactgcctgctccttcaatgtctgcttcagctcattcttgctgcctgcctgcttgagcatctcctgcgtcaccggctgcagcggaatcgtcggaagtaatacagaattcagctcgttggcatcccagttctccttgtcagtgttctcaccaaagcacagatccactgcattgtccacgatatctgtaatcatcttaaagatggaatcacgcatgctctcaccatttaatacacggcgtctttcggagtagataatctcacgctgttcgttgtttacctggtcgtactcgagcaggttcttacggatggcaaagttgttcgactcgatcttcatctgtgctttctcaatcgcattcgagagcatcttgtgctcaatctgctcattttcctgcacgccgagcgatttgaataccttcatcatcttctcagaaccgaacagacgcatcaggtcgtcctccagagaaatatagaaacgggattcacccggatctccctgacgtccggaacgtccacgcagctgattgtcgatacggcgggactcatgacgctccgtaccgataatcctaaggccaccggctgcctttgcctcatcatccagcttgatatcggtaccacggcctgccatgttcgttgcaatcgtaactgctccatggatacccgcatctgccacgatctccgcctcaagctcatggaactttgcgttcagcaccttatgctggatgccttcccgacgaagcatattgctgatgtgctcggatacatcgatcgtgattgtacctaccagtaccggctgattcttcgcatgcgcctctttgaccgcctctacgactgcacggtacttctccttttttgtcatatagacggcatcatcatagtcaacacgctgtaccggacggtttgtcgggatctctacgacgtccatgccgtaaatatcgcggaactccttctcctccgtcagcgccgtacctgtcataccggatttctttttgtatttattaaagaagttctggaaggtgatcgttgcgagcgtcttgctctcacgttttacctttacatgctcctttgcctcgatcgcctgatgcagtccgtcagaataacgacgtcccggcataatacgtccggtaaactcatcaacaatcagaatctcatcgtcct

SEQ ID NO: 2244 - DNA, 2774 bp, Unknown
  16S sequences of unknown bacteria
gatcaaggccgatgctccagccgcaatcaagctgctgaaatctgccggtatccgcaaaacggtcatgctgaccggcgacgcagacgccgttggaaagaaagtcgctggacagcttcatctggatcaggtttataccgaactactcccggctgataaggttgaccgtgtggaaagcctgctgaagcagaaaagcgaaaaaagtatgttggcctttgttggggacggtatcaatgacgctcccgtactggcgcgggccgatgtcggtattgctatgggcggattgggttccgatgctgccattgaagctgctgacgttgttcttatgacggatgaaccgtccaaaattgccgctgttatgaagatcgcccgtaagacgattcgcatcgcaaatcagaacattgtgtttgctctgggcgttaaattcctggttctgattttaggtgcgctgggctatgcgaatatgtgggcggcggtgttcgcggatgtaggcgtttccattattgcgattctcaatgccatccgcgccatgcgggtcaagctgccggatatgcctgcgggcagcacaaatcagggttaagcgcaatagaaatgcgccgcaactttcacacgctgcggcgcatttccttattgttcagtcgggcatgatatttcaaacaacgcatctatggcatgatgcaggagctttgcctgcggcgtgtccgacagcgaataataaacttcttttccgtccctgcggcttgaaatgatcccgcttttttttaatatccgcagatgatgtgacacagcaggggcgctcatatccacagccgccgcgagattacatacacattcttcacaatggcacagcagccatagaatccgcagccgggtcggatcgccaagctgctgaaataaaaatgatatatctttaaacccttctgcagagggcatcttatttaatactttttcaatattctgtccgtggttgtggggtagattgtaatgcggcataaaaatcagctccttcctatgactatgatactgacataattcttgtctgtcaaacagcttcattatagattggagaaaaatacatgaacgaaacagagaaaacaactttttccgttccaagccccggcgaattggaacagttaaccgagcttcacaaagcgatgggcgattacacacggatgcggatactttggtatctgatgcagaaagattcttgcgtcagcgaattggcacaaaagatggaggtcacagaatcggccatatcccaccagcttcgtgcgcttcggattgtccggttagtgcaatcacgcaaggctgggaaaagcgtgatctattccttgcaggatgaacatatccggtggattcttgaagaaacctatgctcatatttcagaaagataaaaacgcagcccctgtgctgttttgcaggggctgcgcgggtattcaattacagcgtttcgtaggaaaccaactggctcatcgggatgcgctgcttattgaagcgattgggatcgccggttccttcgttggagtagccgataaccaggatgttgaccggctccaagttggccgggaggtcaaattccttacgcagaacagcgggatcgaagtagcatacccacaccgttccaaggcccagctctgtggcctggagcatcatgtggtcggtcaggatggaggcgtcaatgtcgccggtctgcttctggtcaaaaggccgcacccatgccttattgtggtcggcgcagacgataatggccaggggcgcttcgtagatgctggccgctttgccgatcttcgcaagaccttcctcgctctgaacagcaatcaggtgaaccggctggaggttggcagcggtgggggctacatgagcagcctccagaatcttctccagcttctcaggctccaccttcgttttcttataattgcgtaccgacatacgctgctttgcaatcgtaataaaatccatagtacaagatcctttctgtatttttattatgaacctatcaaatcaaccattgacctaattgtagcacttgaacacaaaaccgcaagaatgcactttttcggaagatacttcccaaaaagatagcaccatgcgggaaaggagaaccattctatgaaatgtcaaaccaatcagtttaactgccccgtggaggcaaccctttctttgatcggcggcaagtataagccgttgatcctctggcatctgattgaccatccattacactatatggagttacagcggctgattccaaacgccacgccgaagatgctttcgcagcagcttcacgatctggaaaacaacggcatgattcatcgtgaagtaattccagaaaagccgcctaagacggtatattctcttaccccatttggacagagcatcgtccccattctggacgcgatgtgccaatggggaaacagctatctggacggcctggatgtgcagccgccatgctgtcaaagccgcaaataaaatgctgggcatagctgacgaaaagcggctatgcccagcgtatattttctgctctaaatttgtgactgccggacgtaattgcacagcgcggcaaagtccacatggggattcttacttaaaatctgttgcagactttcctcggccttctgatgcagcttcggatttttcagatcgtccaagcggaagaagatattgagccgcctgccgacagcaaacaaaagcctttcatccggtggcagggtcagaaagcggtcaatcgtagagagcatttcctgtttctctgttcgcagatttcccctgacctccagaag

SEQ ID NO: 2245 - DNA, 4279 bp, Unknown
  16S sequences of unknown bacteria
gtgctatcccgggtacaggcggcggcattgcagcctttatcagctacgatcaggcgaaaaagacctccaaataccgtgatcatttcggtcacggcgagatcgaaggcgtttccgcaaccgagtctgccaataatgcaacgaccggttctacattgattccgcttacaacactgggcgtgcccggtgacggttgtacggcaattcttctgggtgcatttatgctgcaaggcatggtgcccggtccctccatgttcaaggagcacagcgatattctgtacggcattatgattggtcttgtcgttatcaatatcctgatgctgattatcggtcgtgtgtttaccccgctgtatgccaatatcacacgcattccttatgagctgatgagcgcaatcatcattgtttactgcattaccggcgtctattcgagcgaagccagcacattccaggtacttctggcggtcatcatcggcgcattttcgttcctgctgcgcaagcttggattcggtgttgtaccgatcatcctcggcgtagttcttggtgatctggtggaaacgaatttccgcaactcgatggtaatgtccggcaattctctgtccatcttcgtaacacggccattcagcctgttgttccttgcactggctgtgctttcgattggaatgttcttctacaaggcagcaaaggacagaaaaaagcaaaaaacagagttagattaaaaaggagtttcagatgaagtattatactgagccgagccgggagatcccggttgcggcagaaacggaagtccttgttgtaggtggcggccccgcaggtttcggcgccgccctgcacgcagcacgcatgggacgaaaaacgatgctgatcgagcaatacggcgcggtcggcggtgtggcaaccacgggcattatgagtcattggaccggcagacaggacggcggctgctttgaagagctgcgcgcaaaggcacgcgactgtgaagcggagcaggtcatcaatccggaaaaactgcgtattttgatgctggatatgctgatggaggccggcgttaatgtacagctgtacacaggcttcagcgatgtcattatggatggaaaccgcgttgcgggtgtaatcacagagagcaaatccggccgggaagcgatcctgagcaaaatggtgatcgattcgaccggcgacggcgacgtggccgcacgtgcgggcgttccgtttgaaaagggacgttcgacggacggcggtatgcagccgatgacgatcatgttcaaggttgccggcgtagatatggatcgcgccatgttcttctggggctttgaggatacggtccagctgccggaaggcgatctgcaaacactcggtcgtcaggaattaccctctccggcaggtcatatcctgctgtatccttcgtcgctccccggcgttgtcacagtcaacatgagcaatatgaccgatgtggacggcacaaatgcaagagatctgaatcgtgctgaatacgtatgcagaaagcagcttcccgagattattgcatttctgcgccgccatgtgccgggatatgaaggctgttatctgatcgacagtgccgatgtgatcggtgtgcgtgaaacccgccggtttgaggcgaattatcagctgaatgagcaggatattgcgcaggctcgtacctttgaagactgggtagttaccaagtcgaatttcttctttgatctgcacaatgtagaaggcgccggactggatgccaatggtgaatacaaggcgttcaagcagccgaagccgtatacgatcccgctgcgctgctttgtaccaaagacggtggagggtattctgctgaacggacgcaatatttcgggtacgcataaggcgcactccagctatcgtgttatgccgattgtaatgaatatggggcatgctatgggtattgttgccgcgatgtgtgttgcacagaacaaaaagccgttggaattagacattcacgaagtgcaggatgagctgcgcagaacgaatgtagaaccgtaaactcagggaaggagatacagttaatattatgctgaaacgaatgccccgcacgattgcagcagagcagtcgctgaaaagcggactgttcaagctgagagatattgccgcctgtgcttatggcaatggaaagtggattcaataccgggatgccgcaggcacctgtaagcttacgatgtccatgggagagatcgtaaaaaacgccagtgtggaagatgttgaagtgtcaaaggcgcttgcagtgctgtcgacaggtactctgccggagaacggcgtaaaaaccatggtgattctgctggtatctctgttggaaaaagcggagaacctcggctgcacggaagcggatgtgaacgcagtttatgcgcttctggaatatgcggcagaatatctgccagctatcgcgaaagagaataacggtgagctgctcggcagcgtgctgccgtacatgacactgattaagccattgaacaaacgggcgcgtgaactgggcaatgaacgtgcagcagcaacgatggaatatgccctgacaacgctgctcctgacgtttaccgaagccaacggtgcaaatggatacggtgtatatgaacgcatgaaagcactggcgcccaatcagtttttcagcctgaatcaggttggcattgagaggtcaatttccgtggatagtccttatactgacatctggacgatgggatttgatcccatcgacggaacgattaaggattgtcgcgacatggcatatcgcgataaagaggaggacgtacgaaacgtattactcgcggtgaagaattccctgcaggttatttggaatattgccgcaagtctgtgatacgtgaatacactgtctgagacagcaggtatgaaaccgctccagcgatcagcgtgtatttacccaatcttcatgaccggataaacaaatatccgtctcctcctgtttgtttttcagatctcagttgttgaaaatcatatcaccctactttacccaaaaggagcttccacgcacggcgatggaggctcctttatttttccggcgccccgaactgacgccgccgctttctctcccggatgagcgtagacttgctgatgccggtcagcttaacaacctgcgcgtaagaatggtcctcaagcagagccattgcatggttaagctgcaagatcggcagcggtatcttttccgccatcatcatcgccatgctcggcgcagctattgtgctgccgctctatcgtctggataggatgtatccgccgctcacagcagatttgcaggagcaggagaaacaccgccctctttcggattgaatccatccggttgccgcagcgcaaaaccgctgacagccctgcttatgattggagaacaacctaaaacaatgaaacgccatccggcagcggataacaaatccgagccggatggcgttatttgctactttacaaaatcgatggagccgtcatcgttattccatccacgggtcgatgacgaccttcatgctttcgcgggtcatgctggccttcacggcctgctctgcctgcgggaagtgatggctgaacagacgctcccacgggaaggtatccttgtggcgcagcatcctttccatcacggttttgtatttattgtgcgtgtgattcgtcatgccgacaatacgcagcttgcacggattgagataaacggccacggtatactctcacttttatcgcctgcattgtcggtaaatcatctgtatatcctgtatttcataacagaatccaagtgtaaagtcacaaagttacaaattcgtaactttgtgactttttaactttagtatttccggcagttacgcaaaaaactgatcgagtgcctgccgtaccagctcggacatatcgcagtcgcggtggaaggctgccgccttgagctgcttatgctgctccgggcgcagacgcacggtcacctgcacggtggaggctttcttcttctccgcagtcggtgcggcagctgtttcctgtgccggctgcggttcctcgtccttgcggccgatcatattcttgaacatttcctctgcactgagtcttgccattactgttccctctccttctccacaaactctttgacgaaattcagacagtcattcacaaaattccggctggcctcggaaacgcgctcgcccttggtctgtgccttgctctcaatgtagtcaaacacgttctcctgtacagcctgcgcttccttgatgatcacgttgctgcggatggtcgttcggtaaacgtccgcgcccatgtagtccgcgattttttcggtcagctcctgaat

SEQ ID NO: 2246 - DNA, 16128 bp, Unknown
  16S sequences of unknown bacteria
catcgcgctgggcatcagcctgctgctgcggcatgagccgctgatcagcggaagcggcattccgcagatcgaggcggaagtgagcggccatctggatgaacgctggttccgggtgctgtggagcaagatggcagccggcgtgctggcggcgctgggcggactttcgctgggcagggaaggaccgagcatccagctgggcggcatgtgcggaaaagggttcggcaagatcttccgcagggtgagcatcgagcagcgctatctgatcacctgcggcgcggccgccgggctttcggctgcgttcaacgcgcctttggccggcgtcatgttcgcgctggaggaggtgcaccgcagcttttcgatgtcggtcatcgtttcggtcatgaccgcttctgtcacgggtgatttcttatctcagtatgtgttcgggctcgcgccggcatttcacttcgatgtggtgcggacgctgccgcttgatctttatgcagtcgtcatcgggctggggatcctgtgcggggccatggcagcgtgttacaatttccttacgctgaaggcgcaggactggtatgcccgcatcccgtttctgaagcctgcacagcgagtgatcatcccgctgatggtcagcgggatcctcatgctcgtgctgccgcaggtgctgggcagcggacacagcatgagcgaggcgctggcagacggcccgcgggtgccgcatgtgctgctgttgctgctgctggccaagttcgcgttttccacgctgagctttggcagcggcgccgccggcggcatctttttccccatgctcgtattgggcagctatcttggcggtgcgtttggcagcgcgctgagcgaggccggcatcgtcgacgctttttatgtcaacaacttcatcatcatggggatggccgggctgttttctggtatcgtccgggcgccggtgacagggatcatcctgatcgcggagatgaccggcaccttgtctcatctgcttccgctctgcctggtgtcggtcacggcctatatcaccgcgcacttgctgcacagccgtcccatttatgagagcctgctggagcggctgctggccggccgcggctctgcgccggaaaggggaagcgcaggaaagctgctgtttgaagtggtcgtcgaggcgggctcgcagctggagcagcgccgcatcagcgaggtcagctggcctcagcactgcctgctggtcgccgtgcgccgcggagaagaagagatcctgccgcgcggagatacgatgatccaggcgcaggacacgctggtcgcgctgctggatgagccttcagccgccttttcgcaggaaatgctgcagcgcagcgcgcagggcaggctgtaaatagagatgtggatgccgcatctcttttttttgtgcgcggaaaacggtggaagaatgcgcagatcctgtcagaacgataggaaatgtggaaaaatatgtaagcgaaaaaatccgatcccgaatctatacaaaacgggggaaagagtttataatgttgttaaatagtagcactttgtggtggaaagtggtgattgagttgttcatgggcgaatacgatcacagcattgataagaaaggccgcatcatcatcccggtgaaataccgtgaggagctcggtgcgtctgtgatcgtatgccgcggttttgacggctgtctcaatgtctacagcgaggaacgctgggccgtcgtctgcgaaaagctcgccaccttgccgaccacccgcgccaatgcccgcaagttcgtccgatcgatcttagcgaaggcgcagcgctgcgaattcgacgcccagggccgcatcctcgttccggcccctctggtcaagctggcagaactgcagaaggcctgcaaagtggtcggggtcggccagcacgtggagatctggtcaaaagagcgatatgaagcgatggaagatgaacaggacgagcactttgaagaaggtgccgagaccctgatggagttgacgttatgatggaacattacagtgtattgctgcaggaatgtctgggaggactgcacattcgtgaagatgggatctatgtggatgctaccctcggcaggggcggacacagcgcagagatcctgaagcgctgtccgaaagggcatctgtatgcgtttgaccgggatgcgcaggccatcgcgcagagccttccgcggcttcgcgcggcagggacgcagtttacctgcatccattcctgtttctccgctatgcaggaaaagctggcggaacatggggtgagcgcggtcgacggcatcctgatggacctgggcgtgtccagcccgcagttcgatgaaggagagcgcgggttctcctaccgcttcgatgcgccgctggatatgcggatggatcagggacagcggctgagcgcctggcatgtcatcaacgaatacccctttgaagacctctgccgcatcctcaagcgatatggcgaagagccgtttgccaagcagatcgcaagagcggtggaaagacggcgcgcacagcgtcccatcgatacgacgttcgagctcgtcgaggtgatccgcaacgcgctgccggccaaggtgctcagcaagaagggacatccggccaaacggacatttcaggcggtgcgcatggaagtgaacagcgagctgcaggagctggaggccgcgcttcagcaagggctccagctgctgcgcgtaggcggacgcatgtgtgtcatcagctttcactcgctggaagaccgtatggtgaaagaggcgttcgtccgtgtcagccgtcccgcgaaggtggacaagcggctgcctcttctcgacgaagaggaaccgtgcttcaatatgataagcagaaagccgatcacagcggcggaagcagagctgcgggagaacaaccgctcgcattccgccaagctgaggatcatcgagaaagtgagggagcaacatggctaaagcaagactgatcaaagtacgcagaaaagtgaggatcgagggcgtcctgttcctggtcttcctggtctgtctgggcatctttacgctggccaagaccgggctggcatcttacaatatcgtgctgtccaacgaacagcagcgtgttgctgcagataaggaggaacagcgggatgcggtgcgcctgctgcagacggaagtgaacgagctgcaggaacgcagccgtgtgctcgcggcagtcaaggaagacgggatcgaatccaatcaggaaaacgtctatgtcgtaggtggcagtgaggaagaagagtgagtggtgatgcttgatgcggcgcaggaagacgaatcagagacagacaaaccgaaagctgctctacatgatgggcatgatcgtactggccgggacattggttgtaggcaatgtcctttttaccatgttcacgcatcagcacatctggagcggggccgatatgtatacgcgcatgtccggcagcggtttttacaatggcagcatcagcgcggagcgcggcagcatctatgacagcaagggcgaagtgctcgcgcagaatgtggctgcttacacgatcactgcctgtctggatgaagagatgaaaggcgccaaaggagagcagctgtatgtgagcgactatccgggaacggcggaaaagctggcttccgtgatcggcgatgccgtcgatgtcgatacgctcgtgcagaccatgcagaatgctaaggcggccggccgcgatcagaccgagctgggcgcggggaccaagcgcatcagcaaggagcagaaagaggccatcgaggagctgaatctgccaggcatcgattttatcgagacgagcactcgcaattaccccaacgggatcttcgcctcacatctgctcggatttgcgacctatgatgaagaggagcagcgcatcgtgggaaagatggggctggaacagtcgctggaagaatatctgcgcggcgaggacggcgccatccagtatcagtttgcctctgacggcaccgagctgccgggcacccgccgcgtggagaaacaggcggtcaacggcaatgatgtctatctcacgctggattccaacgtgcaggcgacgctggagagcagtctggcctatacgatggaaaatgaagatgcgcagtcggcatgggccatcgtcatggaggtggagaccggaaagatcctgggctggggcagctatccgacctttgacaagaacaagcatgacatcgagtcgtatctcaacatccccagcgattccccttatgaaccgggttcggtcatgaagggcatcacctatgcggccgcgctggattcgggcaattatccatacaatgaggaattccgcgccggcacgttcagctatacatatgataagagcacggggaagatcagccgcaccagcggatccaccgcgtatcccagcatcagcgacgcgctgggcaacgacttcggtacgatctcctatgatgagggcttcatccgttccagcaacgtcggcatctgctgtctgctggccgatcatctgccggcaaagacgtttgaggaatatctgaaccggttcgggttcttcacgaaggtggacatcccgttcgtggcgaatgccgcgggcgtgaagaacttttcgcaccccagcgacatcctgtctaccgggttcgggcagtcttcttcagtgaccgcgctgcagatggtgcaggcgtattccgccatcttcaacgacggcgtaatgatgcgcccctatgtggtggagaagatcgtcgacagctacagcaatgagacgatcaagtcatggtcgagcgaagaggtcggacagccgatcagcgcgcagagcgccgaatatgtcagagagctgatggggcgtgtcgtgtctgaggagtatggaagcggaaaccgctatgccatggaggatgtcgatgtcgtcgccaagaccggaacagggcagatcgccggggagaacggttatgacgatgaagtctacaccagctcggtcatgatggccgcgccagcagacgatccgaaagtgatggtctattactgcttcgtgtcggaaaacatcatcgactttgacgaagagccgatcaagaacgtctttaaggaagcgctcatcgctgccaatgtcacctcgtcgcagagcagcacgcaggaggaaagcagcacgcaggatacagaagagggcaatgagcagtggagctcttatgagatgccggtgctggtcaatcactcgctggattatgtcagccggcgtctggaagatatggatgtggagtgcgtgatcatcggtgacggcgatgagatcgtcgctcagtatccgcaggcgcaggagacgatcacctccaatgagcgcatcatcctgctcagcgacgcgtcgacgctgacgatgccggacatgaaggggtggacccgaaaggatgtgaccgcgttctggaagctgaccggcataccgatatcgatcagcggcagcggaaaggtcgtcagtcagagcatcgaggcggggcaggcggtcagcacggacagcgagatcagcgtgaaactggagtaagcggtgtcagacgtgcggtgaaatgcacgaaaaatgcttttaaaacaaataatttgctgttcagcaaaagtaagatttatgatatgctaataaagcaagtatgaagagtgagggaaacctatggccagaaaggaaatctatgcggccctggagatcgccgatcacgaggtcaggcttgtcgtcggcgagatgttcgactcaagactgaatatcctgcgggtggagcgtgcagccggcggcggcgtggaaaaaagagagataaatgatgaaaaggcagtcgtcgcagcgatccgcaaggcggctgcggacgcatcggcagcgctgggctgccgcatcgagcgggtgctgctcgctattccgtccaaacgggtgacgcgggtgaatcagaaggtcaatgtcaccatcgatgacggcacgcggaccgttcgcctgtttcatatccagagcggatacaacaaggcgatcacttaccgcgccgcagatgacctggtgctcgtgaatgccggatgcatcaaatataaagtcaacgggatcacttcgcgaaagcttccgctgggggagaactgcgagagcttcgtgatggacatggatctgctttatgcagacaaaaagacggtctacgactatgcgcgctgcgtagagctggccaacctggagatcatggatatctgcctggattcctatgcgatggcgcaggaggcagccgtgttcgaacaggcgatcgaccgctatatcgtgcaggtcgacctcagccgcagcgataccgtgctgacgttgttcgcgcatggaaggctggtgcgctgcatccgggtcgatgaaggctacgcgcactggtacgaagagctgcagcgtcgttttcatctgaaggattcggcatgtttccggctgctgcagaatctgttcagcgcagatccgcagcaaaacggcgacaatgtcatctacatcgagtctatagacggccagcaggtgcaggtcaccgcggccgatgtgttcagctgctgtatggaacggatgcacgcatgggtgcggaccatcagtgagacgtgcgagctgatcgtgcgcggcgggacgacccgctacgtggtcagcggcgagggcatggatatccaggtgctgggcgagctcatgaaggagttcaacgcgccggcctctgcctatgtgccgcagctgatcggggccagacaggcagcgtttacgacgacggtcggaatgatctacaactggaaagagatccagcagatccgcaaggacggccggatcagcgtcaaccacaacgaaatggaagaaagcgtggaatccatcaataaggtggcgcatgacggtgaaggcggattcaccagaaaactgagaagcattctgctgagtgacagataaagagaggggcgcaagacatgaacgaattcaatcaggtagcgaatatcaaggttttcggcatcggcggaggcggcagcaatgccgtgaaccgcatggtcgcagacggcgtaaagggcgtgacattttacattgccaacacagatgtacaggtaatgaagaactctgactgtgagaacaagatcgtcttaggccgtgagacgacgaagggactgggtgccggcggcaatccggaagtgggccgcaaggcagccgaggaaacggagaatgagatccgtgaggccatcaagggaagcgacatggtcttcctgacggccggtctgggcggaggaaccgggaccggcgcggcgccgctgtttgcaaaagtggccaaggaagagggcgcgctgaccatcggcatcgtgaccaagccttttacctttgagggaagaaagcgtgagcgcaatgccatgtccggcctgagcgagctgcagaaatacaccgattccctgatcatcgtatccaacaataacctgctggatgtcatcggacgccgtccgatcgaggaggcgttccaggcggctgacaatgtgctgagacagggcgtgcagaccatttccgatctgatcgccgtgcctgcgctggtcaacctggatttcgccgatgtgcgcagcgtcatgcagaaccagggcgcggccctcatcggtatcggtatggcagacggcgaggacaaggcggtcaacgcggccgagaaggccattcagtctccgctgctggaagcgcagatcaacggagcgaagagcgccatcatcaacatcaccggcggcgacaaggtatcgctgtatgacgcgcagagcgctgtagctgtcattcaggatgcggccggcggagagatcgacaccatcttcggtatcgccatcaacgagcagctgggagacgccatcatcgtgacggtcatcgctaccggctttgagcaggacaacgagccggatgaacctaagcaggtcaagccgcagccccgcgtcggcaatccgggcgtgagaactgagccgcagcagagcggacgccgtcctcaggtccgcgaggacgatgaggacgacaaggagatcccggatttcttctttaaccgctgatcatgctcctctattatatcgatgattcgtttttccgccccatggcattcgccaggctgatgcgtgcgcggctggagtcgtggatggagcgggatcgcccgcagctggtggtggtctctgtttccgtccgctgcgacagcgccttgcgcgagtttgcccagcgctggcagatcccggtgctggcttcttcaggcgtcttcgattacggcggcgtgcgggggatcctgcgctgcgacagcctgctgctggagccgcttccgctcatgcgctgctattccggcagcttcatccgcgccgaagtgcgcagagggcgggctgagcgcgtttatctggacttttttcccgatgagcagaccgaagcattcctgcggctgagcgaacagctggaaaagatgctcagcgaacagctggcagagaaaaaacggaccatgcattaggaaaccatttcgtgagcggtttccttttttttctggaaaaaccggccatttcctggaaaaaaagagagcaggaagggaggtttcctttatcgagggattgcaaaacgcgaataattttactatgatataacacagtgaggagagagtatatgaaaaatgtagaattggaaagacacgcattgaatatcagaaagtacatcctgacgcaggtccatgccgcacagagcggccatcccggcggcagcctgagctccactgacatcgtgacggcgctgtactttgatgagatggacatcaacgcggataacctcggttccattgaccgtgaccgctttgtcctcagcaagggacacgcttcgccgctgctttatgccgttctttgtgaaaaaggctttcttcccgaggaagagctgacgactttccgtcatctgaactcgagactgcaggggcacccgagcatgcgtctggttgccggtgcggacatgtctaccggttctctgggtcagggcgtttccgcggcagtgggcatggcgatcgccaaccgcctggatggaaacgaccaccggatctatacccttttgggagacggggaatgccaggaaggacaggtctgggaagcggcgatggccgcggcgcatttccacctggacaacctgtgcatcatcgtggatcataatggtctgcagatcgatggagaagtggcaaaggtcatgaatgtggattcgctggaagagaagttccgcgcgttcaacctccatgtcatctcgatcgacggtcatgactttgaggcgatccgctctgcatttgcgcaggcgcgcgccactaagggcagaccgaccgccatcatcgctcacaccgtaaagggcaaggggatctcctttatggaaaatgtggccggatggcacggcgtagcgccgaatgatgaagattacgaacgtgcgatcagcgagctgggaggtaaatgagaatgagcaaatgtgcaacgagagtcgcttatggtaaggcactggcccagctggtgcaggagaatccgaacatcgtcgtgctggatgccgatctggccggcagcaccaaatccggagaggcagcgaaggtctgtcctgagcgccatttcgatatgggcatcgccgaggcgaacatgatgtgcgtggcagccggactggctgccagcggcaagatcgcctttgcctccagctttgccatgttcgcatccggaagagcatttgagcagatccgcaattcgatcggttatccgcatctcaatgtcaagatctgcgcttctcatgccggactgacggtcggtgaggacggcgcaagccatcagtgcatcgaagatatcgggttgatgcgtctcattccaggcatgatggtcgtccagccttgcgactgcatcgaggctgaacaggtgatcaaggagatcgtcaagatcgacggtccgtgttacgtgcgcctgggccgcaatgcggtcgacgccgtcaatgatgaaagctatcagctcgatctgttcaagggggtcacgctgcgcaagggcagcaaggtggcggtcatcgcgaccggccagctggtgcaggaggcgctgaaggcgtatgacatggtcgaggagaagccgacggtcatcaacatccatacgatcaagccgatcgatgaggagctgatcactgaaacggcacgcacgcatgatgtgatcatcacggctgaggatcacagcgtgatcggcggcctgggcagcgcggtgctcgatgtgctcgcagacaagggcctgggatgccgtgtgcaccgcatcggcgtacaggatgtgttcggcgagagcggaaagccggccgaactgctgcataaatatcagatggatgcggacgccatcgccgccaagatccgcgaagtatcgaaataagatcaggagcatctgcatgcgcaggtgcttttttgtcttcttttgccggatgccgcataatccttttctcaggacataagttctggtgaaaggatggtgcatatgccatatcgaatgcctacatacaaagtgctggagctgcttcaggtcgatccggaatgcggcgtgcgcagccaggagatcgacgcgcgcagggcacagtatggagccaacgaatttgaagaagagaagaaagaatccgtattttccatgttcttggatcagctccgcgatccgatgatcatcatcctgctggccggggcgttcatttctgcatttctgcgtgagctcgtggatgccgggatcatcgtggccgtcatcgccctcaacgcgctgatcggcgtcatgcagcagtatcgcagcgaaaaggcgctggaggcactgaaggatatgtcctctccgcgcaccaaggtgctgcgggatgcgacgttccaacagatcgattcgcgcgagctcgtcgtgggcgatctggtctttctggagaccggaaacatcgttcccgcggacctgcgtctgttggagaccgtatccttcaaatgcgaggagagcacgctgagcggagagagcgactccatcgaaaaggacgccaccttgctttatcaggaggagaagaacccggcggatcagcgcaatatggcgttcatgacgacggtcgtcaccagcgggcatgcgtgcgggatcgtcgtgcgctgcgcaaaggaaagcgaggtggggcagatcgcctccatgctcaaggagcgggatgatgtccgtacaccgctgcaggagcgtttggcacatctttcggccgtgctgggcatcatggccctggtcatctgcgcgctgatgttcatcatcggcatcttccagggaaagggcatcctcgatatgctgctgctgtccatctcgctggctgtcgcggccattcctgaagggcttccggccgtcgtgaccatcgtgctcgcgttcggcgtgcaggcgatgagcggccgcaacgccatcgtccgccgcctgcatgccgtagagacgctgggctcggtcaatgtcatctgttctgacaagaccggtacgctgacgatgaatcagatgcgggtggcgcatgtcttctgtctggatagtgcgccgcctgatcctcacctgctcgcctgcgccgtgctgtgcaaccatgcccagctcggggagaatgagatcggggagccgatggagagcgcattgctgcggtatgcgcaggagcagggcatcagcgtgcgcaagatgcgcgagcgctgtccgcagctgcatgagatcccctttgactctacccgcaagcgcatgtgcagcgtgcatcagaccccgcagggaacgatcatgtacatgaagggcgcgctggagagggtcctgccgctgtgcgatcgagccgtgatgaacggacgcacggtgcgattgacggctgccctgcgcggtgagatccaggaggagggcgcaaaatatgcggctcaggcagagcgcgtgctggcgtttgcctggcgcagcggcgcagatgtggagaaggaagaggagatgatcttcgccggcctgatcactttcgtcgatcctccgcgtccggaagcggcatcgagcatcgcggcggcacagggcgccggcatcaaggtcgtgatgatcaccggggatcatccgctgacggccttcgccatcgctcgtcagctgaacatcgcgcagcatgaggaccaggtgatgagcggcagcgagctggacgccctggatgatgaacagctgcagcggcggctgggcgatatccgggtgttcgcccgggtcacgccggcccataaagtgcgcatcgtcgaagcattccgccgcgaaggggatgtcgtgtccatgagcggagacggtgtgaacgacgcgccttcgctgaagaaggctgacatcggcatcgcgatgggaaagaacggcagcgatgtctgccgtcaggcctcagacatgatcctgaccgacgatcggtttgcgacgatcgtggatgcggtgagtgaaggacgccatctgtacatgaacatccaaaaagcggtgatctatctgctcagctgcaatctgggggagatcatgtcgctgtttctggctgtcatctgtctgccggccgtcggcgcgccgctgcgtgcggtgcagatcctgtggatcaatctggtgaccgacgcgtttcccgctctggcgctgggcgtggatcccaaggagagcgacgtcatgcgccagccgcccagaccgcgcagcgagagcctgttcgcccaaggccgcatgagctatacggtgctcaacggcatgttcatcggcacgatgacgctggtcgccttccgctgggggctgcagcgtgatctggcccatgcgcagtcgatggccttcatggtgctgtccatgtctcagctgttccatgccctgaatctgcgctccctggagcattccctctttcgcgcaggtccgttcaagaaccgctggctcatcctcacggtcttgttcggcatcgtccttcaggtgatcgtctgtgagctgcctgcggcgcagctcctgctggggaccgtgcatctggatggaatgtcctgggcggtggtcttcgtgctttcagcctcagtcatcgcgatcaacgaattcgccaaattgtttcattccgcgcgctgatgtgataatatggcagcggtgatgccatgaagctgaaaagagcatatatcgagatcacgaatgcctgcaatctgtcctgtcccttctgcgtgcagcggcatgatcaggcgcgttatcttgacccggaacgtttttccgacatcctgaagcaggtcaagccgttcacttcttatgtctatctgcatgtgctgggggagccgctgtctcatccgcagctggaagagctgctcgcgctgtgcgccggagaggaaatgaaggtgcagctgaccaccaatgggacattgctgcgctcgcgcaaggatctgctgcgcaagtatcccccgcggcagatcaacgtgtctgtccatgcgtttcctcatgcacgctgtgatctggagaatgtgctgcggcaatgcgatgcgctcagcgctgattcatatatttccttgcgcctgtggtgcatgcgggagggcgagctggatgagcaggcgaagcagctgctgaagcagatcctcgcgcattatggactggacactgtcccgcccggacacatgctggcgccagggcgctttctgagctttgatgaggtgttcaagtggcctgatctgcgcgatgcgcccatcgctgagcgcggaagctgccggggattgcgtgacatggtggccatcttaagcagcggcgaggtggtgccttgctgtctggatgcctatggacaggcgtctttgggcaataaacgccgctgcaggatatcctcacgtcgaaacaggctgaagacatgcgccgcggctttcaggaaggcaggctggtgcatgcgctctgtcagcgctgtcagtatcggacccgctttgacggcaaacgccgccgcatgagatgaaaaaggcagctctgtgctgtcttttgtccgtttttctgctatgatattggcgaaggggaaatagatatgcatcatgtatatatcgacaatgaatttgatgcggtccgcatcgacggccgcaacatgcagcaggtgatcgcgctgggcgcggtgatctgcgacgcgcgctatcaggaggtcggccggttttattcgctggtgcggccgatgggctttcagcgtctgagctatcatgtgcgccgcatgacccatctgcacgatcatgatatccgccgcgcttctgctttcccgcaggtgatggatacgttcatcgcgctgctgagggaatatgatcctttggatcagatcaagatctacagcttcgggccggatgatggtcgcacgctctgtgccaatgccggggcatatcatcatgagagcgagcagctgttcgcgcggatcatcgacctgcagagcctgatgtcctcacgggtcacttatcagggcgaagtattccacaaggcgttttcgctggaagcgctgaagctcgtctatcatgtcaggggcgaagtgaaccataacgcgctgagcgatgcggtcgacctgtaccgcgtgcatgaggcataccgccaggagcgggaactggatgaggagcaggtgagcgcgctgtatgcggcgatgatgcagaggagagcgcagggcgaacgaaaacgcagggagaatcaggcgcgccgtgtcgcggcgatggtcgaggggatcgcggagtcgtttacggatgcatcgatccattcggcgcaggactggcaatgcttccacgcgcagctgctggagctgggggagaagcatcagttcgctgtccttcgcgccttgcgccggctgatctccatgcccgagcatacttctgcctggatcctcagacacagcgaacgcgtctgttgctggctgcgtttcgactacccggatatgcagctgcgcttctgtctgccgctgtattatggcaatgcggatgacatgcgccgcttcctgaatcgctggatcaggcagaaatgataaaatgtgcttgtattattcagggcatgtggtaaaataacggtagaaaaaaggtcctttaacataatccagagaggttatgaaggcgaaaacagatctccgtatgaaaccaaggtccttttttgtgcaaaaaaagcggccttttttcttgaaacacacaggaggatgagctatgaacccaaacagtctgttacgaatccgtgatctgtcgaaagatgaactcatgggcattctcatggatgcacagctttttggtgcttcacaaaaagattggcaattgccgcagcgcaggctggttgctaatcttttttttgagccaagcaccaggacacactattcctttgcgtctgcggagcatcagctgggctgctgcgtggaagatttcaccgctgccggaagcagcgtggaaaagggagagagcctttacgacacggtcaagacatttgagagcgtgggctatgacgcggtggtcatccgtcatcgccaggatgagtatttccgggagctggagggcatcgagatcccgatcatcaatgcgggagacggcgccgggaaccatccgacacagtgtctgctcgatctgctgacgctgtatcaggaatttggacggatcgaagggatccggctggccatcatcggcgatatccagcattcccgcgtcgcttccagcaaccgtgaggcgatggaactgctgggcggagaatgggtgttctccggtccgccgcaatggcagcgcgagggctacccgtatatgccgatcgatgaggcggtggaatgggccgatgcggtgatgatgctgaggatccagcacgagcgccacgcctctgccatgcagatgagcaaggcggaatatctgcagcgctatgggctgactaaggagcgggcatcccggatgaagccgcatgcgatcatcatgcatcctgcgccggtcaaccgcgatgtggagatcgacagcgacctggtcgaatcaccgaagagccgcatcttcaaacagatgagcaacggcgtgctgatccgcaaggccgcgatcaaacgggcgatgggcgttcagttttaaggaggtaagcatatgaagctgctgaaaaacgtgcacgtattggaaaacaaccgccaggtccgcaaggagatcctctttgacgagaccggcatcctgaagatcgccgaacagatcgatgcgccggaagcagaagtcatcgatggcaaagagatgacggcgctgcccggcctgatcgatgtgcatgtccatctgcgcgaaccgggcttcgcgtataaggagaccatcgataccggaacgatggctgcggcagccggcggctt

SEQ ID NO: 2247 - DNA, 4275 bp, Unknown
  16S sequences of unknown bacteria
cggctcgtttttgctctcggcaaaatgtagaatttcgaccggcgtttttgttggtcttgccgataccaactccaagcacagatgccggcgcgttagcccgctgtgcgacgtttcagacgttaagaccgcaggcaagcctccgcccgtcccaggacgaaaccacggcgtattgacgacgctgggacgcgagaaagcaaagcacccgctgcaacgcagcgggtggtcgtttatctgctggatctcagcagagcatcggtttttaatgtcacacccatcatgtccttatgggcttcgcgagtgtcccggcagagcggcgagagaaacgtcagcgcgttctgaatgcggctcagatcagatgcggagagggtgtcctcgtgcaaatggcacagcacccggcgataggactcgcggagctttgcgtccacggacagctggaagaaatagtttgaaataaggccaccgatcaatgcggcttcgttatcggtgtactgcatggtgattgccctcctctacgatgttcacgcaacaaacgtggcaatcataccacaagatgcagtacccacgatgcaattttacccttgccgtgcagcgcgttcgtgaagtagtagatgcacttccggaggaagacgcggcgctgcttcgtgcgttatatctgcaaacgccgccgctgaccctgcgtgcctacagcgagaaaacaggaatcccggtgatgacgctgcattacagaaaagaaaagctgcttcggcttttgaagcagcaaatctgagtcaggtgctctgagccccagccgccagcagcatccgctccagctccctcgcggcgacgctcaggggctgccccttccgtttcacgatgcacacggcacgcagcgggaggggctcttgcagttcgatgcggcgcacattatcagacggacgaatgaacgcctccggcacgatgccgacgccaagacccgcttctgccattgggatgatctggtcagccgtggcggcttcgatggcgggttgaaaagcaacgccctgcgcggtgaaaacagagacgtagaacgcatgggaggtcgtgcccgcgccgagcgtgatgagtggatacgcttccagctcggaaagcgcgacgcttcgtccaagcaaaccggaaaaggccggcgcgcagatcggaacctcccgaatttctttgacgatcgtctgcgtgagagacggcgagagcgtaaccggcgttgtgatgaccgcaaaatctgccgtcgtctcgtgcagcgccgcgacggcctgcggcgtggagtggttgctgatgcgaagatgcacgccggggtacttttcctgataccttttaagtaccggcaggagtaaacaccgaagcgcaccctcgcttgctgccagaaacacgtttccgcgctcgagcgtccgactctgcgtcacggcggcttcgcccgcttcaatttccgtacaggcgatctttatgtgccggtacagcccctcgccctccggggtcaaaatcatgccccgattcgtgcgcgaaaagagtggacagccgatctccgcctctaagttccgaatcgcgcgtgttaagtttggctggctgttctgcagcgcctccgccgccttcgtcagattgccgcacctggcgacgtgatagaaaatccggtaatactcgtagctgatatacatggcaccctccgtgcattcgtttctcttttgccattctattttgatatatcggaaatgtcaaatatagattttacatatttcatttttctgctacgataggggcggccaagagaaaaaatgtaagacaggagcgaaaaaagatggaacggacgatcatctgcatcagccgccagtatggcagcggcggccgggaaattggcgaagcagtcgcaaaaaagctggggattccctgctacgataaatgcctcattcaaaaagccgcgcaggaagcggggctttccgaaaccgccgtcgcggaatacgacgaaaagggcgaggattttggcattgccgtctcgggcaatccctttgcggacaccgccgcgctgggcgaggcgttttactcggaagaagcgcgggtctttgaagccgagcgccgcgcgattttagagcttgcagaaaagggtgactgcgtcatcattggccggtgtgcctccgccattctgcgggccgcaggctaccgtccgctttccgttttcatctatgcggatagcgccgaccgggcaaagcgcattgcagcgcgtaataatttggatgaaaaacgcgctcttcataaggcgcagaaggtcgaccggatgcgcaagcaccactttgatttttacgcggacacactctggggcgaaccggaaagctacgatctgatgctctcgtcgagcgaatacggcgtaagcggcgcggcaagcgttattgcatccgcgaaggaggcgatgcaacatgaataaggatctgacgacaggcaagcccgagaaagtcctctggcagttctgcctgccgctctttggcagcatcattttccagcagctctataacatcgcggacagctttgtggccggcaaattcatcagcgacaacgcccttgctgccgtcggcaacagctacgaaattacgctcattttcatcgcctttgccttcggctgcaacatcgcgtgttcggttctggcggcactgttttttggcgcaaagcagtataaggatctcaaaactgcggtctatacggcgctcatttccagctgcgtgatctgcgcggcgctgatgctcgtgggcacgctctgctgcgacagtttgcttcggctcatcaaaacgccggaagaggtcttcgcggactcgaaattatacctcgacatttacatttacggtctgccgttcgtgttcctctacaatgtcgcaaccggcattttctcagcgctgggcgactccaaaacgccgtttatctttcttgcctgctcgtccacgtctaatatcgcggtcgatattctgtttgttacggcgttcaacatgggcgttgccggtgttgcctgggcgacgtttttgtgccagggaatcagctgcgtgctggcgcttgtggtcgtcttccgccgctttgcgaaaatcccgacggaaggaaaagtaaagatcttctcgtggaaccattttggacggttcgcggtcatcgccattccgagcatcttgcagcagagctttatttccgtcggcaacatcatcatccagagcgtcatcaacagcttcggcgcggccgtcatggcaggctactctgcggcggtgaagctcaacaacatggttatcacgtcccttaccacgctcggcaacggcatttccaactatacggcgcagaacctcggggccagcaaatatgatcgcatcaagtccggctttcgggctggtatcaaactcgtctgggcgctgtgcgtgccgctggtggcactttatgtgttcgccgggcagccacttgtacacatcttccttgagagccccacggggcaggcaatggatacaggcgttgcgttcctgcgcatcatcgcgccgttctacttcatcgtgtctgccaagctcgtctccgacggtgtgctccgcggcgcgggccttatgaagaagttcatgattgcgacgttcaccgatctggtgctccgcgtggcgctggcggaggtgctttcccgcaccgcgctcggcacgaccggcatctggatttcctggcccatcggctggacgatcgcagcggcgctctcaatcgtgttctacgcgactgtccgctgggaaaaggtctatacagcggcataaaccaacaaaactgcctgtgagaaaagcgtctcacgggcagttttttaagttcactgcgcaggagatcaagatctctgacgtaaaattcgtgctgtaggagatgttacagcggactatttcattttttagatgaagttatgcaaaatcaaatatatcgcgcagaaaaatgatattagaaattgcgtatttctatgttataatgataaaaaatgaatatcgggtagttcgcgtaagccatgtgcttgcaggtggaatggggtgagaagccccgcgagtcggtcactgtgatgtctgcttggtcagaataagtcaggccttctgagagttgccctgtgccttgccatgaccggagccgaaatattcagcacttatctaagtagataggggctttatttccgtgcggccatatcaggcagcacggttttttgtttgtaaccgcagtcgtgtgggagcggccgcgcttacataattctgaactggaagccaagcgtgatgccctgcaggaagaaatcgctgtgac

SEQ ID NO: 2248 - DNA, 21756 bp, Unknown
  16S sequences of unknown bacteria
tgtatatcgacgccgaccgcgtgacgaccgccgatcgggaactgatcccgcacggcgaattccgcgacgtggagggtacgcctttcgatttccgcaaacccaaaaaagtggggaaagacatcggctgtaccgacgactgcgacattgccaacggcggcggctacgatatcaactacgtgctgaacaggcgcggcgaatatcgcaaagtcgcggaaattgcgggtgcggaaagcggcgtcgcgatggaggtctgcacggatcttcctggactgcaattctattcgggaaatatgctcgatacggaaaaatataaaaagagaacgggtttctgtctggaaacgcagtttcttcccaacgcggtcaactgcccttcgtatgccgcgctcggcagtcccgtctacgataaagaccaaatctatcattcggtcacggcttacaaatttactgttcggtaaaaggcggtttctatgaaaatactcatcgcgtcggatattcacggctcggaattttatttacaaaagttgttgcaaagatttgccgaagaaggggcagagcagatgatacttctgggcgatatctataatcacgggccgcgcaacccactgcccgaaggctaccgcccgctcggcgtggctgctcttttgaatccgctcgccgaccgcctgacggtcgtcaaaggaaattgcgacagcgacgtggatacgctcatctccgatttcgagtttgtgcccgaagcgcagatctatgccgacggcaaaaagatatttttgcagcacggcgacaaattcgatttcgatcggcttccgaaaaactgcggcgatgcgtttgtgttcggccatatccatacgggatttatccgccgcaagggcggcgtgctggtcgcgaacgcgggctccgtatctcttcccaaaaacgatacgccgcgctcgtatctgattttggaaaagggcgaactttcgctcaaagatttcgacgggaacgtgctcgcgcgcgaacggatataattgaaacgaaagtcggatataagtaaatcgaaacacgcgaaggacgccgttgcttgacaaaatttgcctttcggtggtatattgatgcaggaaataaaccgatcaaaaggagttgttttatggaaaaaatcaaagtgggcatcgtcgggtacggtaatctgggcaagggtgtgcagtacgcgctttcccaaagcgaagatatggaagcggtggcggtattcacccgccgcgatccgaagagcgtgcgtaccgtccttcccgttgcagtggatgccgttgaaaatatacaaaattacgtcggtaagatcgacgtcatgatcctgtgcggcggcagcgctaccgatctgcccgtacagtctgtggaaaccatccgcgatttcaatacggtggacagtttcgacacgcacgccaaagtgccgcagtatttcgaggcgctcgacgaggcgggaaaacgttcgggcaaactgggcgccatgagtatcggctgggatccgggcttgttttcgctcgcccgcatttatttcggttcggtcgcgcccgatggcaacacctataccttttggggcaagggggtcagccagggacacagcgacgcgatccgccgcatcgagggcgtgaaagacgccaaacagtacaccgtgcccgtggaaagcgcgctcgcaaaagtgcgcggctgcgaaaatcccgtctttacgccgcggcagatgcatacgcgcgtatgctacgtggtcgccgaagatggcgcggatcttgcacgtatcgagcaagagatcaagaccatgcccaactattttgccgattacgatacggaagtgcattttgtttctcaggccgagttgaacgaaaagcacggaggtatgcctcatggcgggtttgtactccgttcctgtaaatccgcgaacgacaacgattttcttttggaactttctctgaaactggagagcaatcccgagtttacgtcgggtgtgttggtcgcctatgcgcgggcggtcgcgcgcatgaaccgcgaagggatttcgggcgccgtcaccgcgttcgatatagcgcccaaatatttaagcccgttgccgtttgacgaacaacgtaaaaaactgctttaaaacctgagcgcctcgatttttcggggctctttttataaggaaaattcccgaaaaaacttcggtgatttccttgacaaagaaggggctttgtattatactttatatagataaaaaaataaatgcgcacacaagatgtagtgtataaaacgaatttttccgcaactggtgggtttagcaggtcactgcgtgggagcggaaaaaatttttgtcgaccacctgggcagtatcgatagatctgcgcgggtttttttatcccaaaattcatcccaaagaaggagcgtgccatgcaaaaagagtttcaacacggaaagtacgaagaggagatcaatgtaagggattttattcagacgaattatacgccttatacgggcgacgcggcgtttttggcaaaacccaccgcgcgcacgaatcaaatgatggaaaaagtcaacgcgcttttgaaagcggaaagcgagaaaggcggcgtgctcgacgtagataccgaaagggtatcttcgcttttatcctatcccgcgggctatatcgaccgcgaaaacgaactgatcgtcggtttgcagacggacgaacccttaaagcgcggagtcaatcccttcggcgggatccgcatggcgcggcaggcgtgtgaagcgtacggctacaaattgtccgacctcatcgaaacggaattcaaatacaagaccacgcataacgacggcgtctttcacgtctataccgacgaaatgcgcgccgcccgccacgcggggctaatcacgggacttcccgatgcgtacggccgcgggcgcattatcggggattacaggcgcgtcgctctctacggtgtggataaactcatcgaggaaaaggaaaaagaccggaaactgtacggcaaaaagttgatggatgagaacaatatccgcgctttggaggaactttacaaacaaatcgaatttctcggtcagttgaaaaaaatggcaagtctgtacggcttcgatatttcccgtcccgcgcaaaatgcgaaagaggcgatccaatggacgtatttcggctatctcgccgccatcaaggagcagaacggcgcggcgatgagcctggggcgcgtgagcactttcttcgatatttatatcgagcgcgacatcgccgcggggattctggacgaagagggggcgcaggagatcatcgacgatttcgtcatcaaactgcgcattacgcggcaactgcgtacgcccgaatacaacgatctgttcggcggcgatcccacctggacgacggagagcgtgggcggcatgggggaagacggcaggacgctcgtcacgaaaacttctttcaggatcctcaacacgctgtatacgctgggcgccgcgcccgaacccaatctcacggtgctctggtcggaaaacctgccgcagccttttaaaaatttctgcgccaaagtttccatcgacaccgattccattcagtatgaaaacgacgacgtgatgcgcccgctctacggcgacgattacggcatcgcctgctgcgtatccgctatgaagatcgggaaacagatgcagtttttcggcgcgcgcgtcaacctcgctaaacttttgcttttgacgctcaacggcggccgcgacgagaagacgggcaaacagatcgcgcccgcgggcgaacgattcgagggcccgctcgattatgaaaaagtgtggaaagcattccgtacatacgagagttggatgtgcgatctgtacgtaaatattctgaacgtcattcactatatgcacgacaagtacgcctatgaaaaaattcagatggcgctgcacgataccgaagtggagcgttttcttgcctgcggcgtggcgggactttcggtcatcacggattcgctttccgccatcaaatacgcgaaagtgacgcctgtgtacaacgacgagggattgatctacgactttaagatcgagggtgaattccccaaatacggcaatgacgacgatgcggtggacgatattgcggtggaaattctgaaaagtttttcctcgcaactcaaaaagacgcccgcttaccgcaatgctctgcacacgctttccgtgttgactatcacttccaacgtggtctacggcaaaaagacgggggcgacgcccgacggaagagcggccgacgaacctttcgcgcccggtgcgaatcccatgcataaccgcgatctgagcggcgcgctggcgtctttgaattcggtcgcgaaactgccttacgaaacgtgccgcgacggtatttccaatactttttccatcgtgccttccgcgctcggcaaaaaccgcgaggagcgcgcggagaatttgtgtgatctgctggacggatatttcgggcagggggcgcaccatctcaacgtaaatgtgttcgaccgcgcgaaacttgtggctgccatggagcatcccgaactgtatcccaacgtcaccatccgcgtttcggggtatgcggtcaatttccacaaactgtccaaagcgcaccagttggaagttttaaaacgtacgtatcatgaaagagtataaaaacgccccgtccgagcaaaactcgggcggggaattcggttatatcgattcaatttacagcggctcgggcgtggacggcaagggacttcgcgtggtcgtattcttttccggctgtaatcttcgctgtccgttctgccataatcccgaaacgcttttcgggcagggaacgcgcacgggcgtgtcagcgctcgtgcagaagatactccgctataaaccgtatctgaaacggggcggcgttactttatcggggggagagcctttcctgcaaaaagattttgcgattgccgtcatacgggcgctcgcggaacacggcgttcccgtatgtatcgaaaccaacggtcagatcgccgatgcggaattgatcgcggctgcggaatatatcatctgcgacgtcaaaaatcaggagaatgcagacctttccgcttatgacgcttttctttccgtctgcgatgcgttgggggcgagggtagagttgactaatgttttagtcccttcgaaaaacgattccgaagccgcgctctttgctcttcaaaaattataccgttcccatcgcgtcagcgaggggattcgctttctgccttttcggaaattgtgtctggaaaagtatgaaaaaataaaaatgcaatttccttatttcgatgtgaatgaggcggaagaagaggatattttgtatgcggaaaagtacatttcaggcatttaaacagtactatgtgtgacataattcgcgattggtcgttatttgtttataccgttaaatacttgacataaactctaaaacgtgttatactgagatcaatcaaattgagaaaacaaacgcgtaaatatggggcgcgatttgattttgataaaacggcgacagtgttttcactgccgccgttttgtaatgtttaattctttttcagatattggatcgcctgcgtgcctgcaagcattccgtcgtataccgctttggcgatctgctgtaagcctttcacgcagtcgcccgccgcgtatacgccggggatgttggtggcgcgcttgtcgtcggtcacgatcttgttgccgtcgatctccaggcccagtttcttggcaagttcgaaagcgcccgccgagccgcacgcgacaaacacgccgtcgtacttttcgcgcgtgccgtcttcgaacacgacttcttcgagtttttcgcccccttcgaacgatttgatctttttatcggtaaaggggagggagtcgaacgagggctgttcgccgtcggtgagaatggtcacgtcgtcgatgatatttttcagaacgccgtattcgctcttggcgtatcccgcgttgccgatgacgcccaccttttttttgcggaagaaaaacccgtcgcagattgcgcagtaactcacgccgcggccctcgaatttttcaatgttttcgatgggcggcacgttgcgcgaagtgccgcaggcgagtacgacggcgttcgcttccagatctttcgaaagcgtcttgacggcaaatccgctttccgcgaactcgacgccgaccacttcgtcggtcacgaactgaacgcccagcgtccgcgcctggttttcgccgtcctccaacagttttcgcgcggagataccgccgtcgaatccgtaataattgtctatcttatccgccttttgcagcgcgcctccgtccttggcaacgatcgtcacgtccaggccgcctctgacggcgtatagcgccgcggaaatgcccgcggggcccttgcctatgattaccagttttttcatgttatacccccgtttttgtgcggccggcgcgatcgtcagccttctttgagaatacggtagcctttcttgggcttgtgccctgaagatttgcctttatagagataggagagcgcgatgcccgcggcgatcgccgcgatcgcgatgatcacgatatacgcccacaaggggatgggcacgcccttgacttcttcccacatttcgttgacggcggcgttagtctcgtcgtcgaagtattgcatgacggcgcagcgctcgatcacctcaacggtagggtactgcgcggagatctggcggtccaggtcctctgcttttacagaaatacttttattttctccgaaaaagtaactcagatcgtaggggaccgtgtccgcgccttcggcgccgtaattttcctgtacccattcgaatacttcgtcgcccgcaatggcgctcgaatatccgatgaaattcatgttgcatacggcgttttcggggcgggaaataaagttgatgaacttttccgcgagttctctgttcgcgcctttgggcatcacccagccgtcgaaccagatattgctgcattcggaggggatcgagtaattcaaaaatcggtcgccttcttctccttcgttcattgcggtgaccgcgtcgccgctccatgcgaaattgatgttgatcttgcccgacgccgcgtccagtttgccgctgtccacttcgaatccgtataaattatctttgagtgcgatgagttgttttttgaccgcgtccaacgtgtcttcgtccgtgcggttcatgatctcggtaagtttcgcgttatattcttccgcgcccatcttccctgcggcaaaatctgcggcaagcgcgtcgagttcgtctttcgcaacgtaggcgagccccagaaaataggaatcgcgcacgctgtccttgatcgtggactggttggcgtatttgtccatccacagcgcgccccaggaagaaacgtcctccttgtccacgtattcgggattgtatacgaagcccatcgtgccccacatatatgcggcggcgtaatccgaccaaccgtttttttcgaacagttcctgcagatagggcgaagcgtacgtgcgatactcgccgttttgaaacccgtcggaaaaaggttcgaccatgtcttccttgatcatgcgcatgatcatgtagtcggaagggcacacgagatcgtagcccgtggcgttgatcttcaattcgttgtacatattttcgttggtgccgaaagtggagtattccacaacgacgccgtactctttttcgaatgcggagataagatctttcaatccgctttcctcgtcgtcctcgtcggaaatgtaatcttcccagttgtacactttgagtacttcttttccttttttcggggaacaccccgcaaagcaggcgactgcggcgagcatcataaaacagagaaagagactgataaaccgttttgcgatcatagccctttgccctcctttttgcggctggcgcgcaggttgatgacgagcacggcggcgatcattacgacgaagatgagcgccgacagcgcgcgcagcgcgggcgtggaactgttggtgccgttgcgcactgcgttatagacgtaggtgctgatggtgtcgaacgtcttgggctttgtgaacgccgtcacgatataatcgtcgagcgagagggtaatcgagagcatgaaccccgaaaggatgcccgaaaaaatctgcggaatgacgattttgaacagggcgcggctgggggaggcgccgagatcgagcgccgcctcatacgtgttcggatccatctgtttgagtttgggcagaacggacaaaaccacgaaaggagtgcacagcaccatgtgcccgatgagcaaagaaaaatacgtgcggtacagcgcgatcatggaaaagaggagcgcgagcgaaatggcggtcacgatctcggcgttgatgacggggatctgcgaaacgccctcgatgggttttgaaactttctttttgctgtaaaagatgccgatggcgcccgccgtaccgagaacggttgcgagcactgccgccgctaaggcgagccatacggtattgaacagtatgcccatgatctcggcgtttttaaacagttggcggtataaatcgagcgaaaagcccgtccattgcccgatgatcttcgaggcggtgaaactgtacacgaccaaaagaaggataggggcgtaaatgaatacgagcaccagcgcgcagaacgcgacggaaagaattttctttaccataaatgggcccccctcgcgtctttctgtccgttggagcggaacccgcccgtcagcgccatggtgatgaatatgagtatgagcaaaataatggagatcatcgagcccatatgccagttgttataagtggtgaagtattcgtcgatgagttttcccagaatggtgatattgaaattgctgagtgtgtcgctgatgacgtagttggtcatgctcggcataaagaccatggtgatgccgctgatgacgccgggcatggagaggggaaaggtcactttcgtgaacacggtaaaggcgtttccgcccagatcggacgccgcctccatcaggctggtatcgagtttttccagcgtcgtgtacaggggcaggatcataaagggcagaaagtcgtagaccatgccgatgatcgtattcagataattttgcgtacccagaagtcccacccaatccagaagttcgcgcagcgccgtgatgcggagcacgaaattgatccacatgggcagaatgaacagcatcaaaagcacgtttttgcgcttgaacttgctgcgtgccagaaggtaggcgacgggataggcgatgacgaggcagaacgccgtcgtgatgatggcgatggtaaaactcatcagaagcgtgctcagttttgccgtactcgtgaaaaagttcagaaaattttcaaacgtgaaccgcccgtccgtgcccgtaaaggcgtaaaacagaatgagcagcatgggcacgatgacgaaaagcgcgagaaacactgcgtagggaatgcacagttgttttctggaaaattgtatctttgtcatttaactgccgcctcctctttgagtttcaaacggatcttttcgggcgggatcttcacgctcacgtagtcgttttcgttccagagatcttcggtatcgaacacgtagtcttcctcgttctcctcggtgcgcacgatcaactgatagtggtcgcccttatagatgatggaaacgatgtgcccgcgcgcgccgccttcgtccgcattgtcgctgatctcgatatcgccaagccccacttcgacggtcacgtccacgtcggtcagatccagtttttcgcccgcggcggtcacgaggtagccttcctcgtccatatgcgacgcgggatacaactgcgtgaggtcgcagtcgaattcgccgtcgccgaacacgaccgtgtttttcttggtgatgtagccgtcgtatttattggaagaaaactccttcttcatgatgtgaatgtcgtcgggcgcgatattcatgccgatgatttcgcccacggtacggctctcggtgctctggatgatgagttcggtctttcccacttttaccgtgatctcgtagtgcacgcccttgaatacgacgccgattacttttccctggatcatgccgttctcgggatcggtcatgcggatatcttcggggcgcacgaccacgtctactttttcattgcgggcgaagtcgtccacgcacgcgaaattacggttgcagaaacgcaccgtaaggttttgcaccatggtgccgctcagaatgttgctgtcgccgataaagtccgcgacgaaggcgttggcgggctcgttgtaaatgtcggtgggggtgccgatctgttggatgcagccgtccttcatgacgacgatggtgtcgctcatggtgagcgcctcctcctggtcgtgcgtcacgtagatgaaggtgatgcccagttttttatgcatggctttcagctcgatctgcatttccttgcgcattttcaagtcgagcgcgccgagcggctcgtccaacagcaaaatctcgggctcgttgacgatggcgcgggcgatcgccacgcgctgctgctgcccgcccgacagggtggatacgctgcgcttttcgaacccttcgaggtctacgaccgcaagcgcgtttttcaccttttcatcgatctctttgcgggtgagtttctgcaatttcgtataactttcgcccgcatcgttcacgtaggtgacgggcgtttttttcagtttcagcccgaacgcgatattgtcataaatattataatgaggaaagagcgcgtatcgctggaatacggtattgacgggccgcttgttggggggggagatcggtgatgtcctttccgttcaagaggatctttcccgaagaggggagatcgaagcccgcgatcatgcgcagcgtcgtggttttgccgcagcccgacgggcctaaaaaagtgatgaattctccctttcgcacgtacaggctgacgttatccacggccaccgtttccgaaaacaccttggaaacgttcacgatctcgatgatcttttcgtctttgctcaattttttcatatccttatcctgccgtattttattgacttattatatagtaaaagagggaaaaaaacaattactttttccctcttttgcgcagatttgaaaaatttttacataacgaaaaggcatagccttccgactacgccttctgacaatcttttttgaacgtttacgccttcgctttcaaagcgttgaggttctttgccaaagcggattttttgttcgccgcgttgttcttatgcaggattcccttggaaacggcggaatcgatcaccgaaacggtttcgggcagcaatttttcggctgcggcaacgtcgccgcttgccagcgcgtcgttatatttgcgaatcgcggtcttgaccgtggatttgaccatcctgttctccaaatttttcttttcgttgacgaccacgcgttttttagcagatttaatgttaggcactttttttctcctttcaataaagatcgataaattctttagctattttatcataaaaaaaaacgcttgtaaactgtttttgcttgaaaaacaggaattatttgcggcttttgccaatatattttcaagagaacgaagaggaggcgcggcgatatggagcctggttatatagcgtttttcgacagcggcatcggggggctgacgctcctgaaagaatgcgcgcagcaactcgcgggggaaagttttctctacttcggcgacaacgcgaacgcgccgtatggcaataaaagtcccgaagagatcgaacggctgacgcttacggcgttcggatatctttcgcgttttccgctcaaagcggcggtgctcgcctgcaacacggtcacggcggaatgcgccgccgcgctgcgcgcgcgctgtccctttcccgttttgggcgtggagcccgcgctcaaacccgcggcaaaggcgtgcaagaacgtgttggtactcgccacccgcgccacgctttcgagcaaaaagttccgcgcgctcgccgaaagcgtttccggcgcctgccgctttaccttttactgcccgcgggatctggcgggcgagatcgaaaacaacattttcgatctttcgaaggtcgatctttcccgccatctgccggaaggggaacagcatttcgacggcgcagtgctcggctgcacgcactatatttttctgaaagagcagattgcagcgcgccttagatgccccgttttcgacggaaatgcagggacggccgaccacttatcgaaaatcctcggaaaaatcgggcaaaaagagaagagtggatacggtggtttatcgataaatgcggtaaaacaggaggaatctctgttcgacaaaatggcaataaatggcgatttttgccgtaaaaacgcggtttttttcgtcggaaacgccgcttttaaaaataaaaccgtgttttttgcccgtttataatgcgaacatttgttcgtaaaacataaatttgcgtgtaaaagggggattcttcccctttttttatgaatttttttgaaaaaagtgagcaaaggtggttgacagtggtcaaaagtggtggtataataaattcatcaaacagcgggggtactctgatgtattctttcaacgggcgcttcaaccatcagttggacgcgaaaaaccgaataagaataccggcgaaattcaaagccgacctcggcaccgattacaaattcgcattcggtccgaacaagagtatctatgtaatgcctttttccgagtatcggaagattctggacagtttcggcgacgtatcttatttcgacgatgaaatgcaggaggcgatctccgatttcaccgcgatggtgtacgacgtgacggaggacaaccagggcagggtggtcattccgggcgaactcaaagactttgcggaaatcgacaaggacatcgtcatcactggcgcggcttcttttcttcgtatcgagtcgctcaaaaactttgaggagcggaataagcacaaggacgtcaagagcgtgtttgcaaaactcaaagccttgaagacggacaactgatatgctggaatttgcgcataagcccgttatgctcgaagaatgcatggcggggctggatataaagagcggcggcgtttatttcgacggcacgctcggcggcggcgggcattcctatgaaattctcagacgcagcgcgcccgacggacgtttgatcgctaccgatctggacgactttgcgatcgcggcggcgggggagaaactcaaagaattcggcaatcgtttccgcattttcaagagcaactacaaagattacgaaagagtattggaagaggcaaacgtttccgaactcgacggagtccttctggatttcggcgtttccagttttcagttggacgaagaaacgcgcggcttttcctacatgaagaaaaacgcgcctctcgatatgcgcatggatcccgaagcggcgctctcggcaagagaggtcgtaaacggatattccgaacagtcgttgtatgaaattctgcgcgattacggcgaagaaaaatttgcgaaaaagatcgctttcaatctcgtaaaggaaagggagcgggcgcccgtggaaacggcggggcggctcgtagagatcgtcgaaaagagcattcccgcaaaattcaagcagaacggcccgtgcgcgagaaaaacttttcaggcgatccgcatcgaagtcaacggcgagttggacaagttgtccgaaaccgtcaaggggctcgcgagaaaattgaaaaagggcggcaggatctgcatcctcactttccattcgttagaggaccgcatcgtcaagaacgccttccgcgatctggaaacggactgcgtgtgcgataaaagtttacccgtctgcgtttgcggaaaaaaacgcgagatcgtttcgatcggcagaaagccgctcgttgcgggcgaagaagaacagaaaaataattcgcgttccaaatgcgcaaaattgcgcatagccgaacgggtctgagaatatatataaggagaagggacaagatggcaacgttgtttccgacattagaaagagaaaatacacaggaaaaattcgaacaggaaagttctttaaaagcatacggaaaattgagcggaagggacgagtctgccgctttgacggaagacgaaaaagccatgcgtttcaactctcagatcagcgacaactatcagaaactgatcaatcccgaatataagagagaagaagaggtcgtcgcggagagcgcggccgaggcgcccgtattcgaaccaattttcgagcaccagcgcgtgaccgaagatctgttccgcgcggactccgtttacaacgctcccaagagaagttttgccgagatccccgcggcttcttacgccgagccggtctatgcgcccgaaacgtacgccgagcccgagcagaatacgtatgctcccgaacagcaggcgttcgtggcggaagccgatctcatgcctaccgccactacaattcaatatcagaacaatctttacagagaggaacagcaggaacgcgtcgaaaacaaaaagtcctattccatgaccgcgaaaggcaaagttttgatgctcgtctattcgttggcagtcatggtcatcctcgcgctcatcatcatcaacacgagcgtgttgaagacgttggacagcgacgcggcagccaagcgcgaagcgctcaacgccgcgatgaccgagtacgcgcaggtacaggaaaagatagacgaactcacttccgctgattcgatcatccagcgcgccgaggacgaattcggcatggtcatgggcgattgaaaaacgttgaaacgacagcctccgacgagtgttcgcttgttggaggctgatttttttaataaaccgaagaggtgactgttatccgaaagtacaattccgaatattccgcaacgattttacgaaagaggttatttgccgtgtttatggcgatagcctttctttttttgttgattttttcccgatttttctatatccaggtcatctggagcgacgaattgaaaaatcttgcctccgatcagtggacgcgcgagatccccgtcgtcgccgagcgcggttccatcaccgaccggaacggcacggtgctcgcgggcaacgtgacttcttacagcgtgttcgcccgccccaacgccgtatccgacaaaccttacgcggcggaagtcctttcttccatcttttctttggacaaagacgcgttcctcaccaaactcaccaccacggcggtttccgaactgacggtcgccaagcacgtggataagagtttggtggaggaactggaaaaattcgatttggcgggcgtatactatgcccgcgacaatacgcgcacttatccctatgccgatcttttatgccaggtgctcggcttcacttcgacggacaattcgggattgacggggttggaaaaatattacgacaaatatctcgcgggcactagcggcaaagtgctgtacgaaaccgacctcgtgggcaaggaactggaaaaggggaccatgtattacgttcccgccaccgacgggctgaacgtcaagacgaccatcgattacgagatacaggcgatcgcggagagcgccatggcggacgcattcgaaacctattcgcccgcctccgcgcagtgcatcgtgctcgatccctccacgttcgaggtgctcgcaatggtcaactatccgggatacgacctcaacgacgtgccgagagatgacaacgatcttttgaacgcgctttccagaaataatctcgtcagcgatatttacgagcctggctcgacgttcaagatcgtgaccgccgcgatcaacgtggaagaaaacctgcgcggcaattcgaacgctttttccctcaaacacgtgttcaacagcagccgcacccgcacggtagacggcacgaccatcaagtgttggagcaatcacgccaacggaaagcattccaaccagacgctcgcggaggcactcaacaacagttgcaacccctgtttcgtggatatcgcgctctccatcggcacggaaactttttacgattatctggaaaaattcaatttcggcaagtctacgggactggatttttcgggcgaagcgcagggcatgcttctcaccgagagcgcggtgcgcgactgcgatctggcgcgtatcggtttcggacagaccatagcggtcagcgccttgcaactcgcctgtgcgggcgcggcggtcgtcaacggcggctactattaccggccttcgctcgtcaaagaaatttcttccaaggacaacaatatccgcgaggtgttctcgcccgtgctcaaaaaccgcaccgtcagcgaagaggcgtcacgcattaccgcgtcgcttttagaaggcgtggtcgcaaaggggagcggaaacaaagcgtatatcgagggctaccgcgtgggcggcaagacgggtaccgcgcagaaatacgaaaacggcgtgatcgcgtcgggcaaatacgtctcttcctttttaggatttttccccgccgacgacccgcagtatctcgcgctcatcatcgtggacgaaccgcagggcgcctattacggcagcgtggtggcggctccctatgcgaagacgattttccaaggcatcatcgatgtaaaggggcttgcccccttcgaataaaggagtttgattgtgttactgaacgatttgctgcaaaaagtagagtatgaaaaggtcatccacgaaagaaacgccgagatcggcggcctgtccgcggacagcaaacatatcatggacggtgatatgttcatatgttttaagggaggcgacagcgacggtcacgattttgcggcggaagcggtggcggctggcgccgtcgccgtcgtctgcgagcgcgaatgcgatctgcccgtctgccagatcgtcgtgaaaaacgggcgcagggcgatgagcgaattcgcccgcgctttttacggcaatcctgcggcgaaaatgaaaatgatcggcattacgggcaccaacggaaagacgactaccgcgcatatgctcgcctcgatcttgaacaaggcggggaaaaactgcgcgctcatcggcacgctcggcgtattttacgctaaccgcgagatcgcgcccgctctcaccacgcccgatcccatctttttgcacaagacctttgccgacatggtcgaatgcggcgtggaatacgtggtcatggaagtttcggcgcacgccgtttatttcgataagattgaagggatccgtttcgcctgctgtatctttaccaactgcacggaagaccatctggattttttcaaagatatggagagttacgccgccgccaaaaagagcctgttcacgcccgagcgctgcaatctggcgatcgtcaataccgacgatgcggtgggcgcctcgctcacgggcggcaaagtgcggacgtacggctatgcgctggaaaatcccgcggacgtgttcgcgatcgacgtgcgcgagagcgtgcgcggcagcagattcgtgctcaacctgttcgacgatctgtacgagatcgatctgcatatgacgggaaaacacaacgtctacaacgccatggcggccgccgcctgcgcgaaattattgggcgtcggcaccgaagagatcggcaaagggctggcggcgctcgacaaagtgaacggacggctggaatacgtgacggcttaccgcggcgcggatattttcgtcgattttgcgcatactcccgacggattggaaaagtcgctctgcgccctcaaaccgcattgcaaggggcgcctcatatgcgtattcggctgcggcggcaaccgcgaccggcaaaagcgtccgatcatgggcgccgcggcgggtaaactcgccgattttaccgtgctcacttccgacaatccccgttacgaagatcctttcgacattatcgtgcagatcgaaacggggctcagagaacacagtaaaaattacgtcatcgtagccgaccgcgaaaaggcgatcgactacggtataaacatgctcgcaaagggcgatatactctttatcgcgggaaagggcggcgaaacgtaccaggagatcatgggggtgcgccatatatacagcgacgtttccgtgatcaggtccattctgcgggaaaaaacttcgggcggagaaaaacgtgagaactgattttttgataattctggcatcgggggcggtatcggcggcgctgtgcgctgccgtcattccgctcctgcgcaagatcaaggcggggcagtacattctcggctacgtcaaggaacacgaatccaagggcggtacgcccacgatgggcggcgtggcgttcatgctcgccatcgccctcgtgagcatttttttcggtatctatgcggacaagcgggcggcggtttgtatcacgctcgcgctcgcctatatggtcgtgggttttttagacgatttcatcaaggtgcgctttaagcgcaacctcggactgaaagcctatcagaagatcgttttccaactcgtcatcgcactgatcgcggggtttttctgctatttcaataaacttacgacgatcaatattccgtttacgcatatttccgccgatctgggcgttttcttcatacccgtcgccgcgctcgtattcatcgcggcggtcaacagcgtcaatctgaccgacgggttggacgggctcgccgcaagcacttccttttcctatcttctgtgtttcggcgttctcctcttattgcagtcgggcggggaggagatgcgccttctgtgcctttgcgccgcgggcgcgctgggcgggtatctcgtcttcaacacgaataaagcgtccgtgttcatgggggacactggttcactgagtctgggcgggctgatcgcggcggtcagcgttttttcgggaaatttgttgtatatcgcgataatcggcataatgtttgtcctttcgagcatatccgtcatcctgcaagtaatatactataaaaagaccaagcgcaggatctttctcatggcgccgctgcatcaccattttcagatgaaggggtattccgaaagcaagatcactttcgtctattcggcgatcaccgccgcgatggggctcctgtgcctgtgtttcgtataaaatcctttgaggggtaaaataaaatgtatttcaagacgcaaaaatttttggtggcgggtatttcccgcagcggcgtgtccgcggcggaattccttttggcgcggggcgcttccgtattcctgtacgacgacgtgacgggcggcgccgtggaaaagagcgagcgggccttggaacagaagggcgcccgtatcctcgggcccgaagatctgtccgcggcggtgcgcgacgcggacgtgctggtattgagtcccgggatcccgatcgaccacgaactcgccatcgcctttaaaaaagcgggcaagcggatcatcggggagagcgaactgggctgtctgttcctgcgcgcgccgatgatcgccgtgacgggcaccaacggaaagacgacgactgtgaccatgatctccgagatcctgaaagccgcgggcgaaaaggcgatcgcttgcggaaacatcggactgccgctctgttcggtggtggaagaattgggctacgacgggctagccgtcgcggagatctcttcctttcagttggaaacgctctcttccgtgcagccgcacgtcgcggtcgtgaccaatatttccgaagatcatctgaaccgccattacaacatggagaattacatattcttaaaacgcaaacttctgcgcaatatgcgtgagagcgaattcgcggtcctgaatttcgacgacgcgacggtgcgcggttttgccgacagcgccaagtgcaaagtcaaatatttttcgtgcaacgagcgggtggacggcgcgtatcttttcgagggcggactgtacttcgaaggggaaaaagtaatggaggcttccgaactttctttaaggggcaggcataatctgcaaaacgcgctcgccgcggtgtgcgccgcccgcatcgcgggcgtggagagccgtatcatccgcgaaacgctcgcctcgctcaaagggatccgccaccgcatcgaattcgttcgcgaagtgaacggggttacatacgtcaacgattccaagggcaccaacgtggatgcgagcgtcgtagccatcgacagtatgcagtcggataccgtacttcttttgggagggaaggacaagggctacgattacgacaaactgttcgcgaagatccgcgacagccgcgtggtgcacgccgttctttacggagaaaaccgttttaaacttttaaacggcgcggtcaaaaacaattattcgcaaatcaccctctgcgccgatttcgagatcgcggtgaagatcgcgtcgatgacggcaaagcgcgggcagtgcgtgcttttaagtcccgccagcagcagtttcgaccgcttttccaactacgaggaacgcggcgaaaaattcgaggaaatcgtaaaatctttggagagtgaaaacgttgacaaccaaatctgcaacgcgtccgcaaaaacttgcgggatcgaggagtaaacgccttttgggaaaaatgagcgacggggatattctcattcccgtgctcaccgttcttatcgcggcgttcggcgtgctcatggtctactccgcgagcagctacactgcggaagcgacttacggggacgcctttttctttgccaaaaaacaacttttgggcttcgttctcggcacggtcggcatgatcgccgtcagttttttcccgtatacgaaactgcaaaaactcaaatgggcggcgctcggcgtttccgtcgtgctgcttgccgtcctgttcattcccggcgtgggtaaagaaaattacggcgcgacgcgctggatcaatctggggcctttgaccattcagccctcggagatcgcgaaatacggtttcgtcattttcgcggcgtcgtatatgagcgaaaagcccgaacgcatgaagacgttcgtcggcatgctgcccgtgctcggcgcgggcggcggcatctgcctgctcgtcattttagagccgaatatgtccatcaccatgtgtatcgggctgttgatgatcgccatgctgttcttaggcggcgcgaaattcaaaaattttctcttcattctgatccccgcgctgctcgccgtgcccgttctcatcgccatggagccgtaccgcttaaagcgcctgtacgcctttatcgacccgtgggcgtcgccgcagggggaaggctatcaactcattcagtcgctgtacgcgctcgggaacggcggatggttcggcgtggggctgtttcattcccgccagaaataccgctttctgccctttgcggaatcggattttattctctctgtcatcggggaggagttcggtttcatcggggtcgtcattctctttgccgtatcggggcttctcatttactgcggcatacggacggccgccaggagcaaagacttgttcggctttctgaccgcgtcgggtattacgctcgtgtacgcgatacaggtcgtcatcaacgcgctcgtcgtttcgggctccatcccgcccacgggactgccgctcccgctcatcagttcgggcaataccgcgctcatttttaccatgatgtccatggggattttattcaatatttccaagcgaaaggggaaagcgagccccgattaactttttttcgttcatcgccatattatgaagtagaaaatacccttggtgacaaggtaattttgtacgttaatacggctgtatgaaaaagaaacgacgaaatgcggcggcacacgatacggggaaaaccgtaagccgccgtttcttgttcgtggttttaacgaaaggagttgattatggataaatttattatagagggcgggaaaagtctgtacggaagcgtggcgatacagtcggctaaaaacgcagttcttcccttacttgccgcgtctattttaaccgatgaacaagtgaagatacataagtgcccgcgcatccgcgacgtgatgaacatggtgcagatccttaacgaactcgg

SEQ ID NO: 2249 - DNA, 2248 bp, Unknown
  16S sequences of unknown bacteria
agtgaatctgaggacggtcgggctcttcaaaatagttaaggaactgcttgggagcgctgggaagctcaagacgctgtgcctcgccggcatattccttccacgtctttttaatttcctcgatggtgggtttctttttgaaggtgacaaaaacggcggcaaggtgaccgttggtaacgggcacgcgtatgcactgagccgtaaaagcgggacgggttgcattgacgatcttatcgccctcaatgtgaccccaaatcttaagaggctcctgctcggatttttcttcctctccgccgatgtagggaataacattgtcaatcatttccggccaacgctcaaaggtctttccggcgccggaaatagcctgataagtgcagacaagaaccttttcgggctcaaatttctcaagagggaaaagggcgggaacataggactgaagagagcagttggacttaacggccacaaatccttttttggtgccgagtctctttcgctgagccttgattatctcgatgtgatcggcattaagctcgggaaccaccatgggcacgtcgggggtgccgcgattggcgctgttgttggaaacaacggggcattcaagctttgcataagcctcttcaagagccaatatctcatcctttttcatgtcgacggcgcagaaaacgaaatcacagatttcggcgaccttttccttgtcggcctgagcgtcaaaaagaaccatgtccttcatgctctctgggataggggtgtccattgcccaacgggacgaaacaacgtcctcgtattttttacctgccgaacggctgctggccgcaagagccgcaacattaaaccaagggtggttctcaagcagggtggcaaatcgctgaccgaccattccggttgcaccgataataccgacattatattttttcataattttgtccctccaaaatcaataaatggcttgtaaaaaaaccgcaactgtactataatacaaattacttctaattataatatcatttaagctttactttgtcaaacgaaataagagggaaaatatgaataaaagcgattttttttacgacctgcccgccgagcttattgctcagcacccctgtgaaaagcgtgacaactcctcgctcatgcatctcaaccgaaaaacaggcgaaatcgaacacctgaaattttacgatttaccgagccttttaaatgaaggagatacggtaattttaaatgatacaaaggttcttcccgcgcgtctttacggcacaaaaatccccacgggggcggttgtggaattcctgctgctcgagcagcagccggacggagcatggatatgtcttgcgggcccgggaaagaaggccaaaaagggcgaccgtttttccttcggcgaaggcaagatgtcctgtgaagtggtcgatgtaaaggacgacggaaacagggtcgttaaatttgaatatgacgggaatttttacgaaattctcgacgaaatcggaaacatgcctcttccgccttacattaccgaaaagcttaaagacaattcaaggtatcagacgatatacgcaaagcacctcggttcggccgccgctcccacggcgggtctgcacttcaccgacgaggtttttgcaacgcttgtggaaaagggtataaacatcggatatgtcacccttcatgtggggctcggaaccttccgcccggttaaggaagaaaaaatcgaagatcatcttatgcacaccgaaagatattatgttcccaaaagcacggccgagctgatcaacgccacaaaaaaggccggaaaacgcgttatttgcatcggtacaaccagctgccgaacccttgaggccgctgcgaaggacgacgggacaatggaggaatgctcgggcaaaaccgatattttcatatatcccggctataaattcaaatgcatggacggtctcgtaaccaattttcatctccccgaaagcacgcttataatgctcgtctcggcctttgcgggttacgagcataccatgaatgcctacaaaatcgccgtagagaaaaaatatcgctttttcagcttcggcgacgccatggttatactttaaaattaaaccaaatccattttaacggagtttttaaatgtttaaactgataaaaaaagaaggaacggcaagaagagggcgttttaccaccgttcacggttcttttgaaacccctgcgtttatgaatgtcgccacctgcgccgccataaaaggtggactgtccgccctcgacctaaagcaggtcaagt

SEQ ID NO: 2250 - DNA, 32759 bp, Unknown
  16S sequences of unknown bacteria
agttacagcgaaacctgtcgtagatttgaggtaaacagcagagatcggatcaaatcatgggagcgaatctatctggaggaagggccggaagggttagccatcgaacggcgtggccgcagcagtaagggtcgtccgccaaagcagttgccgaagcaggtggaagaagatctgctggccgaagtgcagcgactgcgtgcggagaatgactacctaaaaaatttgcaagccttggttttggaagacgagcgacgccagcacaaaaaacgctggtagttcagaagctaaggcaaaaacacgcactcagtattctgctctcaatcgctcaactgcctcgtgcaactttctactatcatttgaagcagatgcagagagaagacaaatatgcatctgttaaggaagaaatcgcagcaatttaccacgaaaacagggggcggtacggctatcgccggatcacggcagaacttcgcaagcgtaaattctctgtgaaccacaagactgtccagcggcttatgaaagagttgggcttagtttgccgtgtcaggatgaagaagtatcgctcttataagggagaagtgggcaaaattgcgccaaatctgttgaaccgggacttccgcgccgaaaagccgaacctgaagtgggtcaccgatgtgacagagttcagtttgtttggagagaagctctatctctctcccatccttgatctgtgcagcagcgatctggtcagttacaccatatcggatcgtcctgtactcagcatggtaaccaccatgctgggcgaggcgtttgcaaagatcccggccggaacaaacctcattctccattctgaccagggctggcagtaccaacacaaacaataccaacagatgctccgggagaaaggtgttcgccagagcatgagccgaaagggaaactgtctggacaatgctgtgatagaaaatttcttcgggctgctcaaaagtgaactgttatatctgcaagaatttcaatccatggaacatttcaaacaggaactgattgaatacatggattactacaacaaccacaggatcaaggcaaagctaaagggcttgccgcctgcaattcacagacagcaagccctttcggctacttgaacaatttttacttcagaatattgtctaactttttggggtcacttcagaaaaggagccggttttttcatcttattttaaaactctccggcatcttattccaccgaaatgatgtaggaatacaccggctgaccgccttcgatcacagtgatctctgcattctttgcttccttggcgaacatctctttcacctgttcggcctgctgctcatcggcgccttcaccgtagaaaatggtgataaagccgctcttccggctgcacagatcccgggccaggcgccgggccacatcttcaaaccgggggctgttgctcagaagcttgccttccaccagggacataaagtcgccctgtttgatgttcttgccatcaaactcgctgtcccgggcggcataggtgatctggccagtggagaccttgctggcggcctccatcatggaagcccggttctgctccggctcggcgtccggatcaaaggccagcatggcggtgatgccctgagtcaccatcttggtgggcagcacatacaccagcttttccgacagttcggaagcctgctcggccgccatgataatattcttgttgttgggcagcacaaagacgatctccgccggagtctggtcgatggcgttgagaatatcctctgtggaggggttcatggtctggccgccttccaccaggttgtcaatgcccaggtctttgagcaccgaggaaatcccttcgcccgctgcgacgcccacaaagccatactttctctccggggcggccacctgccgcttcacttcggcgggagcctcattcttccggtggagctgctgaaccatgttctcaatcttcaccgtcagcagctggccgaacttcagtccctcagccagagccttatcgggggtgtcggtgtgcacatggactttgacgatctcatcgtcctccacaaccactacgcaatcgccgatggtctccaaaaagcggcggaatttatccacgctctttttctggtcctcccgggcggcgatgaattcggtgcaataggcgaaattgatctccccttcgtcaaactgggagaaatccgcagcggccatctccactttgggctgcttgggagccaggaaagagaacttgctcttgggcttgactccggtcaggctggcgtgcatattctccagaatgagcacccagccatagccgccggcatccaccacgccggcctttttcagcaccgggttctgttccactgtgttttccagcgcttccctggccgcagtgatggcggccgaaagcacttcatccacttccccattgctggccgcttccttcagcgcgccttcggccgccaggcgggaaaccgtcagaatggtgccttcggtgggcttcatcaccgctttgtaagcggtgttgaccccttcctgcagagcctcggcaaattcctgagcgttggcaccgcccagctctttcagccgcttgccaaatccccggaacagcagggatgtaatgacgccggagttgccccgggcgcctcgaagaagagcggaagaagtcagatccaccgctttgcccagagtgggcttttcgaacttcatcagttcggccgcagcggcgttgagggtcatggacatattggtaccggtatcgccatcgggcaccgggaacacattcagttcattgatctcctgcttcttctcttcaatggcggcggccgccgccagcatcatattcttaaaattctcaccgtcgataatcttaaccaaattcctacgcctcctgtcaatccacccggatggaatccacgcagatctcgatttgccccacaggcactcccgccaggcgctccacattatagcgcacttcgctgatgatggactggcacactgtggcgatgttgatgccgtgatccacggcgatgtggagctgcaagtcgatcttcccatcccgctcggccaccttgacgcccttggtcatggcctcccgcttgagcagatagacgatgccgtcctttaccgaagtatgggtcatgcccttgacgccaaagcagttggtggccgcgatgcccgcgatggaggccactacttccgccgaaagcgtcacatttccatattccgttgtcaatttcacattagtacccccttattcaggtagaaacacagccatgtcacccatggatctctatggaaactccggggcctttcggcccccggatctgattcttgggctattgtatcatatccccatggaaaatgcacgaatattttgctttttcccctgggtaagttctcatcctgcccattggtggagattgtaataaggattccgattggcccctaccacctggtgcatcacaccttggccggtgaccacgcagccccggccaaaagccatgggcacaaagggcatttcctcctggaaagcgtcataaagggcctgctgggcctgttcttcctcaccgggaagggcgcttttccaggcagtgatggcctgggtcagcgtttcgctggccccgccgtaacacaggcttccgccccgctgcaccatctgactgatgtcaaactggtcgttcagaatggtctccccgtaataaaggtcaaaatcgtcccggttcagggcctgctgaaagtcttcctggggcaaggtgcgcacagtgacctggataccgcttcccaccaaggactgggagacgatctccgccgcctggagcttcatctcactgccttccggcaccaatagttccaaagtgagattgttgccctctgggtcgttataaatgccgtctccatcggtgtcggcatagccggcctgcttcaaaagggcatccgggtccttcttctcggcctcaaactgctccagctcaggggacaccgggagggatacgccgtctccatagccggaaaaggccttctgcaccaaaagatcccggtccaacgccgccgagatggcctggcgcaccagaggatcggaaaggggcccgttgtttttgttaatacccagatagtggaaatcactggtagagacagtagtcacatcaaaattgccccggatggccgtttcggtggcaaagggcttttcaaaacaaactccgtcgataacacctgcacctatcacataagacaattcgctgtcctggtacagagcggacagacggatgctctccacgcccaccgcgcctccgtgccagctgtcattgcgcagcaaagtgacggtaccattctgggactgaaccataaaccgcccggtgcccaaaggattttcctcatccccgtcattccggggcaccaccggtatggtcagcagccgaggcagctgggaatccggggtggccagccggatgcgcaccgtataccggccgctgtaagtgcaggaagtgatgttcgcacaccgggaggcaaacagggtgctctcccgggcctggttgatggaatagaccacatcccgggcctgcatctcggtgccgtcgtggaacagaaccccttgcttgatatagaaggtccactggtcaccatccacctcatagctctcgcagagaacattttccagctgaaaatccgggccaatggcaaacaggccttcgtaaatcagcggcagcaagtaatagttgtattccgtggtcacctggaaggggttgagagaatcggagggattgtaggccagggcaatggcggttttctggccgggcacggtggtctccgtttcctcttccggctgctgctggggaaggcccacagcatcctggttttcctctgtctctccccccgcttcggtggtatggcagccgccgcacaccaaagagaaaatcagcagcagtgccaaaaaagatcgtctcataggcttcaccgttccagtgcaatcagtccggcgtgaacgcctctgtgggtcccctgacgccggtgggaccaccacagtttctcctctccgcagcaggtgcattcctcactgacggccacctgctccgggggcacccccgcctgggtgagccgccagaaattcagtcctttggtatcccagtgaaatttgtctccccgcacctggcagaatcgttctgcctctttcccaaagcgggccatgagcagatcgtatacatcccggtcggtctcaaaacaatcctggcagatggaagggccgatggcacacaccagatcctccgggttcgttccatactcctttttcatcagggcgatggtcttttcgccgatggcctgggcggtgccccgccagccggaatggacacagccgatggcatggttccgcttgtcatagaacatcagcaactgacagtcggcgtaaaaacccatgaggcagaccccgggcacattggtgacaagaccgtcgctgggctgcttgttgtcaaaaccgatgcgcatcccaggcgcccactgacgcaccacatcaatgagatcggtgtgctcctggcgggtgcggacgatatcctcataatcgcaccccaagagcgctgcggcccgcacgcagttttcccggatattctccgggctgtcgccggtgtgacggaaattcaggctttcaaactccccctggctgacgccgccttggcgggtggtatacaaatgctgcacgccggggctttccagaatgggtgcggcccaccgcaccgccatatcccccagatcttccgcgataaattgggacaaaagggtccctcctttccggcggttttcccgccttttccatggttgccgcttttctctttaccggatgttcacccgctgcactttctggcagcggccggttttttcgtcaatgtcaaaaatcgctcccagcaaagcgcagtccagatcactggattcaaaacggggccccagttctccccggaaataggacaccgactgctggtatttgacgccgatcaccgactcctgggccccggtcatccccagatcggtgagaaaaccggtaccctggggcaaaattcgctcatcggcggtctgcacatgggtatgggtgccccacactgccgacacccggccgtccaggaaatagcccaaagcctttttctcgctggtggcctcggcatggaaatccaccaggaaaatgtcggccttctcctgtttcaccagccggtccgccgtctcaaagggatcggaagtgcggaaatccatattcagccgccccagcaggttgatgacgcaaatgtccactccattgtaatccacatggcaaaagccagttcccgccagctgaggcgccagattgtgaggccggatgatagggtctccatcgtccaaataatcgcagatggagcgctgggcataggcgtgatttcccagggtgatcacatcggctccggcgtcaaaaatccaccgggcctgcttgggggtgataccccgcatagaggcattttccccgttgacgacgatgaaatgcactccttcctgccgccgcagaaggcgcaggtttttttccagagtcaaaagccccggctggccgcacacatcaccgatggccgcaatacgcatactgttctcctttgcattccgaaaatttgctgaaaaagcagggagccgccccagcaggacggctctccccagcggaccctgtggcccgcccctgtttgttttccttatttcgcccagtttcctgtggccgaagccttcagataggcattgatgaagctgtccagatccccatccatcaccgcctggatgttgccgttttcacagccggtgcggtgatccttcaccagggtgtagggcatgaatacataggagcggatctggctgccccattcgatctttttctgctcacccttgatatcctcgattttgtccaggtgctcccgctctttgatctccatcagtttggacttgagcatccgcatggccacttcccggttctggtgctggctgcgctcgttctggcaggccacgatgataccggtgggaatgtgggtgatgcggatggccgattcggtcttgttcacatgctgaccgccggcgccgccggaacggtaggtgtccaccttcagatcttccggacggatgtcgatatccacatcatcggtcatttcgggcatcacttccaccgccgcaaaggaggtgtgccgccggcccgacgcatcaaagggcgaaacccgcaccagacggtgaacgcccatttcgcttttcagataaccgaaggcattttccccttcgatgaggatgtcggcgcttttgatgcccgcttcttcgccgccgatatagtccaggatcttatagcggaagccccggcgctcggcccagtgggtatacatccggtacagcatgccggtccagtcctgggcctcggtgccgccggctccggcgtggaaggacatgatggcgttgtttttatcatattcccctttgagcaaggtggagagcttttcttcctccagcatggcctggaatttgtcgtaatcctgctgcacttcctggtacaggctttcctcgccctcctccagagccatgtcgatcagctccagggtgtcgttatacaggccctccagcttttcatagcgggtggctttgtccttcagctgcttgatccgctgcagcaccttctgggactgctccggctcatcccagaagccaggggccgaggtcttctgttccagctcggcagcttccttggcgccattctccagatccagcgctccccgcagctccatcagctcaggctttatattgatcaaattggtacgcagttcttctaactgtatcattccgatacctcccataagtacctaccattatatatgattcccctggtttctgtctatatggttttggtggtgtttacagatttttcatgttgcccggtgttcattccccaaattgaatagaatggacgatgcaaacccctctgccaataattttatatcttgtttatatctttcttttcaaaatgtggtatactgtgttagaatattcccgtatgctcttatgttcataccaggcgctggcggaagccttcggccggaaaggacggcttatgaaatttgttcgctatgtggaaaaagttcctggagcgcagcctgttttagggcttctctcccaaaatgaaacctcggtgcatcccctctcttccctgctttgccgggaaatgcgcaccatgcagcagctgatcgtctctttgaaaaaggaggagctgccgttgctggcaaaggcgtcccagggcgatggcattccccttttccaggtgaatgtcctggcccccattgaccggccactgcacgatatcctgtgcgtgggcgtcaactaccgggaccaccgggaggaaaccaaaaccgatcttcccacagagggcgccgtacatcacgccgtctatttcggcaagcgagcccattttattttaggcgatggggagaatatccctgcccggctggatctggacagccagctggattatgaagtggagctggcggtcatcatcggcaaagaaggccgggacatttccccggagcaggcggaggactatatcttcggctactcggtgttcaacgacctgtcctcccgcaccatccagaagcagcacagccagtggctgcggggcaagagcctggacggctacaccgccatgggcccctgcatcctccacaaaagcgccctgcccttcccggtggaagtggatgtttgctctctggtcaacggtgaggtgcgccaaagctccaacacccgccttctgctcacttccctgccccagatcatcgccgatctgtcccagggcatgacattggagccgggagacatcatcgccaccggcacccccggcggcgtgggactgggctttgatcctccccgttttctgaaaaaaggggacaaagtggagtgccgcatcccgcccatcggcagcctgtgcaacacagtggaataattcccggcccggggccgaaaatcatattatcagagaagtttgtaggtgaaacccaatggcaaatgcatttctcaaaaagctctttggcgactccagcacccgagagctgaaaaaaatccaacccaaagtccaggcggtggaagcactggagcaggaatacgccgccctcagcgatcaggagctgaaaagcaaaactcagcagttcaaagaccggtatcagaagggcgaaagcctggacgatcttctgcccgaagccttcgccgcctgccgggaagccgcctggcgcgtgctggggatgaaaccctaccgggtgcagatcatcggcggcatcgtgctccatcaggggcgcatcgccgaaatgaagaccggcgaaggcaaaaccctggtggccaccatgcccgcttacctcaacgccctcaccgggcggggtgtgcacatcgtcaccgtcaacgattacctggccaagcgcgacagcgactggatgggcaaggtctaccggttcatgggcctgacctgcggcaccatccttcacgacatgagcagccaggagcggcgggaggcctatgcctgcgatatcacatacggcaccaacaacgagctgggctttgactatctgcgggacaacatggccatctacaagcgggacatggtccagcggggccatgctttcgccatcgtggacgaggtggactccatcctcatcgacgaagcccgtacgccgctgatcatctccggccagggtgacaagagcaccgacctgtacaagcaggccgacgcctttgtccgcacccttaccccgctgaaagttatcgaggtggacgccaaggagagccaggatgatatccaggccgactatatcatcgacgaaaagggcaaaaccgccaccatcaccccccggggcgtgaccaaggcggaaaaatacttcaatgtgcaaaacctcaccgacccggaaaacaccactctgatgcaccacatcaaccaggccatcaaggcccacggctgtatgcatcaggatgtggactatgtggtgcgagatggtcagatcgtcatcgtggacgagttcaccggccgtctcatgttcggccgccggtataacgagggcctgcaccaggccatcgaagccaaagaaggggtgacagtgctgcgggaaagcaagaccctggccaccatcaccttccagaacttcttccgcctgtacgaaaagctctccggcatgacgggcaccgccctcaccgaagaggacgaattccgggagatctacaagctggatgtcatcgagatccccaccaaccgtccgctggcccggaaagacctgcccgacgccgtctataaaaccgagcagggcaagttccgcgccgtcatccggaaaatcgtggagtgccatgaaaaaggccagcctgtgctggtgggcaccatttccatcgaaaaatccgaagagctgagccgtcttttgaaaaaagagggcatcaaacaccaggtgctcaacgccaaataccatgaaaaagaagcggccatcgtagcccaggccggcaagccctatgccgtcaccattgccaccaatatggccggtcgtggtaccgacatcatgctgggcggcaacccggaagccatggcccgggaagatctggtgaaagctcagatccccgaagaagtcatcagcgaagccaccggttatgccgacacccaggacgaagaagtgctggcggcccggacccaatacgcccaggctctggaaaagcacaaggaagccacccggaaagacgccgaaatcgtccgtcaggcgggaggtctgtgcatcctgggcaccgagcgccacgaatcccggcgtatcgacaaccagctgcggggccgtgccggccgtcagggcgacccgggcgaaagccggttctatatctctctggaagacgatctgatgcgcctcttcggctccgaccggctcaccggcatgctggataagctgggcctggacgaagacacccccatcgatcagaaattcctgtccaacgccattgaatcggcccagagcaaggtggaaggccggaacttccagtcccggaaatacaccctggaatatgacgatgtgatgaaccgtcagagagagatcatctatgaccagcggcgcaaggtgctggacggcgaagatctgaaaggcaatattctgtccatgatcgacgactccatcgcccgctcggtggcccgggtagccggagagcacaaatatctggacacctggcaggccgaagagctggtgaagcggtgggagaagattttcctggctcccggcgagctgcagtacacccgggaagagctggatagactgtctccccaggacatccaggagcaactggaggaaaaggcccacgccttctacgaaaagaaggaagccgacctgggcagcgatgtgatgcgggaactggaacgggtggttctgctgaaagtggtggacagccactggatggatcacatcgacgccatgcacgagctgcgccggggcatcggcttgcaggcctacgcccagcacgatcccattgtggaatacaagcgccagggctttgatatgttcgatgagatgatcaacgagatcaaggacgataccgcccggatgatcttcattgcccggatcatcggccaggccgctccccagcgggaacagctgatgaagcccaccgccacctctggcgacggcactctgacccgtcagccggtgcataaaaacaagaagcccggccgcaacgatccctgcccctgcggcagcggtctgaagtacaaaaaatgctgcggtaaaaatgactgatctcaaaaggaccggctaaggccggtcctttttcttttctttgtcttttcaatgtgataaaatgaagttgatcgatccaccttcggaaaggaggagtttttatggcattttccgaaaaaccaaaaaaggcccttttccctttggttcttctttttgttctgaccgccgctcttttgtttttcttccgtccccgtaccttcgatctgtcccaagcccatacccttgtcatccaatcgggcaccaccggcgaaaaagtggaaatcacaaatcctcaaaaaatcgcccggatagccgaccaatttgtttccctgcgcttttaccgcaaaacaaaagctcattctgctggctggagttactccctttcctggtatgatgcccagggcaatgagcaaggctctctcaccattctcagccctggagaagttctctggaaggatcactattacactgttcgagggggtgttgtggacaccggcctactggaagaatggatggaaacaaactgaaaggactgccttccggcagtcctttttattattctcccaacttttgcaaaatcacacgagcggtctcttccggggtgagtgtggaggtgtccaggtgctctcccctcaggccggggtaatgccctcgccgctccaaggcccgctgcaccacatcttcctcccgtgcgccccgggcgatatccccctggagccgctctactaaggctttttcccccggttccagattgaacacatggagggaaaaccgaaggggagagagcctgtggagcaaatcctccaaaatggcatcttcgtggagaacccaggaaaaaagcacattgtccttcccttccgcctggagaaactggcccaggagaaaggcgatgttttccatcaccatctcccgcatggcttcatcggcaacgaaaggctccatcttccagcaccagtccccgtccagccagaaggcgggctgcaaatagggcagcagcacctggcacaaggtggtttttcccgcccccataggcccccgcaccacaatcagccgcttcatttggcaatgggggccgtctttcccccgcaaaggcgcagcagatcatcgggacgcagctccacctgaaaaccgatcttcccggcgctgacgataatggtttcacattccttgcagctttcatccaccacggtggggtatggccgcttcatccccaaagggctgcatccgccccggatgtagccggtgaccttctggagatcctttacatggatcatctccaccgatttgcacccggcggcccgggcggcggctttcagatccagctcaccggtacagggcaccacgaaaacccggtgttctccgtcatggccctttgtcaccagggtcttgaacaggcaccgtgggtccactcccagcgcctttgccaccgactggccgtccagcgcttccccgtggctttcataggtgtgcattttgtaagagaccccggcgctgtccagaatacggcttacattggtcttgatgggcgacggcatgaaaactcctccctttttttgcaaacagaaaagggaaaggcggttcttcccgcctttccccctgcatatcagtgcttatttttcgttgaaatagtccagcaggcccacaaaggctttgatgccggtggccatgacggcctcgtcaaagtcaaatttgttgttgtgcagggaaggcacatcccccaggcccagccagccgaacacaccgggataccgggcttcgtactcggaaaagtcctcggcaatcatggtcttttccgcttccagcagagtgatgcccgccttttccatggcctttttgtagtcctcatacagagcgggatcgttgttcaccggaggatagccctcggtgaggtggacttcggtcttggtgccgaattccttgtccacatcggcggcgatctcgtggatgcggcgcaccatgaagttgaacacatccagggagaaggcccgcacgctgcccaggatgaccgccttttcacagacgatgttcagggcatctccggcgtccatcttgcccacatggagcagatactcggcatcgggagccatttcatttttcttcacctgatacagccgggaaatgatctccgaggcggcggtcagggcgtcgatgcccaggtcaggccgggcacagtgggcgctcttgccgtggacggtgatggtcatttctgaagtcttagccatcatggggccgggacggctgccgatggcgttcttctccagtttgggccacacatgcaggccgaacaccttgctcacatggtgcttgtccaaagcgccgctttcgcagatcaccttggccccgccgatgctctcctccgccggctggaagatcaccagcacattgaacttatacttcttgtggttttcctccagataatcgcacagggccagcatcatggccatgtgggcatcgtggccgcaggcatgcatgcagccgttctggctggcaaacgcaagaccggtctcctccttgatggacagggcatccatatcgccccggaaggcgatggtatcctctgcgccattgtcaaaaaaggcggtgtagccggtgccgcagaccttctccacctggcagtggagcttggccagatgagcgcctacatattcactggtcttgaattcctgacgggcgacttcggggatctgatgcagatcccggcgatattgaatatagttttccataggtataacctccattgtgccgtttgtgcggcgattggggaatttctccccaggtcaattatatcctatcccgcttaaatcgcaagagccggaactgtcttttcttcactctttccgaaaaaacatgaagttttctccccttttccctttctttacaaaggccttgggggtatgataagatatccttagaccccttcctccccctgccggaggacatgagaggagacgatcttcatgcgattggtacataaatacggcggcagcagcgtggctacccctgaaaagatcatggccatcgcccgccgcctggcccaactgaaaaaagagggcaaggatctggtggtggtgtgctcggccatgggcaagaccacaaacggcctgatcaccctggcccggcaggtcaatccctccccctccaaacgggaaatggacgccctgctgtccaccggagaaatccagacggtgagcctgatggccatggccctccaggccctgggggtggatgccatctccatgaccggttttcaatcgggctttatcacaaatgccgtccattccaaggcatttatcaaggaaatcaacacccagcgggtggagcaatatctgaatgaaggcaagatcgtggtggtggccggtttccagggcatcaccgaggacggccacatcaccaccctgggccgtggcggcagcgataccaccgccgtggccatcgccgccaaactggactgcccctgtgagatctacaccgatgtggacgccgtctaccgggtggacccccgcatctatcccaacgccaagcccctcagccgcatttcctatgaagagatgatggaaatggccgccctgggcgccggcgtgctggaaacccgcagcgtggaactggccaaaaaatacggcgtggagctctacctgggccgcacgctggaagaaggaaagaaaggaaccaccgttatgagccagcaggtatttttcgaagagatgccggtgaccggcatcagcatcaaggagcattgtgccatcgtcactttccggcatatggattataacgccggcacagcggcctccatcttccgcctcatcagccggaacaacatcaatctggacatgatcaaccaaaccattctggacggcaaggtggccttctccttcagctgcagcgacgagcaagccgccgagctggaagaagccctgggtcgtgagccggaagaaaaagccctggttctggatatccgccgggatctgacccagctgtccctggtgggcgtgggcatggctacccacacaggcgtggccacccgtgtctttgacaccctggcccaaagcggcatcccctattaccagatcaccacctcggaaatctccatctccttcaccatcgacaaggagaacaaggagcaggcggtgaccgccctggcccaggaatttgacctgtaagcaataaaggggagcattttcccttttggcagctatattgaaagcagaaaccttatctccatcggatcgatgaaaggagaccgatcatatgtcccaaaccctgcacaccttcagcggctcgctggtggctctggccacccccttcggccctgacggtcaggtagattacaagcagctggaagctttggtggagttccagctggagcaccacaccgacggtattgtggccttgggcaccacagccgaaacccccaccctctcccaggaggagaaagataagatcgcccagaccgtcatcggcaaagtggccggacgcattccggtgatcgtgggcgccggttccaacgacacccttcatgccgccgctctggcccgccgctatgaggccatgggagccgatggcctgctggtggtcaccccctactataacaaagccaacaaaagcggtatgctggcccatttccgcaccattgccgacggggtcaacattcccatcctgctttacaatgtgccctcccgcaccggctgctccattcccctggatgtgctggaggagctgtcccaccacaaaaacatcgtgggcatcaaggaagccagcggcgacatcgcctatgtcactgccgccgcccggcttttgagccaggatttctgcatgctttcaggcaacgacgatgaagtgcttccccttttggccctgggtggcagcggcgtcatttcggtgctggccaacatcgcccccgaccagacccatgagctggtgtcctcctatcagtcgggagacatcgcccacgcccgggatgtgcagctgaaatacctggagctgatccacgccctctttgccgagaccagccctgctcccttgaaagaggccatgaaccttctgggcatgaaggtaggctcctgccgtctgcctctgggccctgtgagtgaaagcacccgccagcggctggaaaaagccctgaccattctgaaataacaaaaaggaagtcaaaaaagatggaacagaagaaaatcgctctggtgggctatggagccatgggcaagcgcattgccgcggccatccaggcccatgagggctgggaactgtgcggcgtcatcgacccgctgaatgaggaatgcctgtcctctctttccctattgccggaaaaaccccatgtggtcattgatttttcccacccggccaatctggagatgatcctttcttactgccgggagcaggaagtgccctgcgtattgtccaccaccggcttttccccggctcaggaagccatgtgccgggagctttctgcctatacgccggtggtgcgcacccagaatacctccctgggcatcaacatcatggaggaaattctgcgcaccatcacccctgttctgaaggatcggtttgacatcgagatcatcgaaaagcaccacaacatgaagatcgacgcccccagcggcaccgccaaaatgctggcccgggccatcgaggaaagcggcgactttccggaggttcacggtcgggacggcgtttgcccccggcaaaagggagagatcggcatccacgccatccggggcggcaccattgtgggagagcacaccgtgctctttgccggagacgatgaactgatcgagatcaaacacaccgccctttccaagcaggtctttgtggccggagccatcaaggccgccgaatttgcactgtcggcccccaagggcttttattccatgggggacgccctgttcccccacaacgctcactgaggaggaacgctatgaacacccaggaaatcatcgatcgcattcacacagccaagaaaaagaccccggtgaaggtctatcttcagttgaaagagccgattccattccccgaaagctgcaaggttttcggcggccccttccaggtggtctttggagagtgggcggacatcgccccggtgctggagagcaacaaagacagcatcatccaatacgaagtggagaatgaccgtcgcaacagtgccattcccctgctggatctgaaaaacatcaatgcccgcatcgagccgggcgtcaccatccgggaatgtgtggagatcggcgacaatgctgtcattatgatgggcgccgtcatcaacatcggcgccgtgatcggcgaaggcaccatgatcgacatgggctgtgtgctgggcggccgggccactgtgggcaaaaactgccacatcggtgcaggcaccgtgctggccggcgtggtggagcctgccagcgcccagccggttgtcattgaggacgatgtggtcatcggcgccaacgccgtagtgctggaaggctgccgagttggcaagggagccgtggtggccgccggtgctgtggtcatcagcgatgtgcctgccggtgctgtggtggctggcatccccgccaagatcatcaagcaaaaggatgagcgcactcagtccaaaaccgctttggtggacgctctgcgcagcctgtaagcgcattattgtaaaaaaatcgcgtctgcaacatatgcaggcgcgattttttcgtccctttctcttgtgcagggcaccaatttatagtaaaataaaccggttcgccattttattttcagaaaggaggggcgctctgtgaagcatcacccttgcaagcggatccaatgttggcacaatactcggtttccccgcagaccgcccccggactgtccttttctctatttttaacagataaaaaataagaaaaggatgtttgatacatgaattggtttattctggcgctgatcgccattttgttctggagcggctctgatcttttttccaaaatgggttccaaatccgacgatatctatagccactggaaaatgatcatggccgtgggtactgtcatgggtatccatgccatttatctgatcgccaccggcacccccttctcttttgtggacatcatcacctacctccccgcttccttcctctatatcctggccatgatcctgggttatgcgggcctgcggtatatcgaactgtccatctcctcgccggtgtgtaactcttccggcgcggtggctgccctgctgtgcttctttatcctgggcgacaccatgggcgccatgcagtttttcggcgtggctctggtgtgcatcggcgttttcgccctgtctgtcattgaaaagaaaaaagacgacaccatccggctgcaaagcggtctgtcggcagacaaaaagtatacccgcagcgtgctggccatcgtctttcccctgctctattgcctgatcgacggcctgggcacctttgccgatgctctgctgctggatcgggccattgcggaaactcaggccaacatcgcctatgagctgaccttcctgttcatggcggtatgcgccttcatctatgtggtaatcatcaaaaagcaaaagatcaccctctccaaggaaaagcccaaaatggtggccgctttgtgcgaaaccgcaggccagtttgcctatgtattcgccatcggcgccaacgccattgtggccgcgcccatgatctcctcttactgcatcgcttccctgttgtggagccgtttgctgctgaaagaaaaactgtccaaagcccaatacctggtcatcgccattgcggcggtgggcatcgtcatcctgggccaggaataatcaaaaaagcgccgcacagcggcgcttttttgatgctataatccgatccagagaaacagcaacattccaaaaatgcagagcacaaggcccactttgcgcaaagaagaaccccgtcttgtttcataggcggccgggcaaagatgcagcagatcccacagcacccacactttttgaggaaacaccacaagaaccagaccagaccccagcatcaaagcactcaggggccacagaaccaaccggggccttgtgcgggcatcctgctgaatctcaatggaaaaatccgcctgatagctttctccccgctgcagcaacaccccatttgcatctcccaaaggcacattggagccatcggtgaccacatggcagcggaagcgcacatcccctttttcaaaaaggaaagaatccgtagcgcttttctggatttctttggccaccgggcggacccacaaagccagcgggtcggctcttctctgtgctccttccacagccaggctggaaagcagcatgatctcccgaccggtggcggccaccccgatcccttcctcctgaatggaaaaagcaacccctgtgagcacgcctttcttcactgtataggtaaactcgggacgaggcgcccggctgttctcaacagagtagtccgtggcgatgttttcccaccggccctgggcattcagctgccgcccgtagtccatatccagatgctgggccaaggcgttgtaattttccgcaaattcttccaccgtgagcggcaggccgttgggaacccgcagcccctggcgctgggctgtgacactgataagagccataaccaacccacaggccacaaagaccagtgctcgcacccattccttatcctcccgaagggaaaggaccgtttcctcttcccagggctgcttttccaggtttcttgcccgtcggaaactgcaccacgaacaccataaactcaccaaaggcaggttcagtccctggccataaagcagaaccttccatgtacggtgcaaagcctgtccataggatagatatcctccttcttccccctggatgtgcagccccagaatggcttttcccggcgtcgtcccccacagatgaaggcacaatggctcaaaaagaagcaaagtcaaggcagacaagcaggaaaagagataccagtgtattccttccaaggatagaacatccactttaaaaaccaaagtcaacagcaattcccagggcagcgcacagattccggtgtccagcccccgggccagataccggcgtacgggagaaaacaccggagcaggcctgtcctttctaagggtttcctccggatcttccagctgggccaggtaccggggcgcatccaaagcggcaaaggaaacccccgcttcctcaatgctgcggcacacttccctggctcggaccagagcctgctcccgactgtccaggcggtatgcattctctctcagcgcctgaggcaaagaccgcacccccgcctggatctcaccgatctcctccaaggacactcccaacgcccgcagcaatttaatccgcagcagctgctgcacatcctcctgggaatattcccggtagccgttttccctccgtcggggggaaatcaatccttgctgttcgtaaaaccgaagggtggcccgctccatattgcacagcttttctacttctttgatggtcatatatcccgcctccttccccttttgaggccagtataaaggataaagccccttgacagtcaagggactttatggtcaaaatctgtttttataccagtttcgccttttccaggatggcatccacctgcttttgctgttcctcggtcaaaggcagcaggggcgggcaaggctctcccccctggtatcccagttgattgcaggcatacttcaaagcgggaacccccagcttgccggtgacgcaggcattcaccgggaacatcctcttgtaaagctccagggatgcggcatagtctcccgcttcaaacaggcgctgcacctccacacactcctggggacagcagttggccagagccatcaccgcacctttgatgccgatggccagggccggataccaggccgaagcggtgcccaccagcaaattgaattccgggtccagaccctgggtcataaaggagatcaactgggcgatattccccgagctgtccttcatgccgatgatgttgggatgatgagacagaatggaagccgcccggggagaaatattcacatgggtgaacttggtcacattgtagatcagaatgggaatggggctttcgtcggccacctttgtaaagaaggcgataagggcttcgtctcccatctggtccccataataattgggggtgaggaccagggcgcactgggccccggcctcagcggccttcttggtcaggcggatggtggcctgggtgttttccagcccggttcccgccatgagcaatttgcccggcgctttgtgctgggcggccatgcggatgagctccagtttgtcttcctcttccagataaggggtttccccgttggagcccagcaccagatacccggccacgccggtgtcattccatttttcaatgttcttccggaaggcctcaaaatccacctttccttccttggtgaacggcgtgatcaccgggggcagtacaccgtgaatttcaaaaaacttgctggccatggtttcatcctcccttggtttttgggtattttctctaaaatccatggtagcatctccccagcctttcgtcaagatgaaagaaggaggagcatttgctcctccttttcccatgtcgaaaaagtggcaaagccgctttttcgtgtttttgcaaggggctgcgtgcagccattgggccacacttgccccttgagaagtgtaaaaaccgacgcacaggtcaccagtttttacaaattagtgaggggtagaacgaacaatcccttctagccagataaattttttgccagcccggaagaagacgcagttactccttcttttctcttatttctgttgggccgacagggcatccaccgacagaagcgcttgctccagattcttcgggctgatttcccaggccatattgtggatggactcgccgggagcacaggccttttcggcggcgatgatcacccggcttttgtcggtgatccccatttccgccaaagtcacaggcaatcccaccgagcggcagaaccgatggacctgccagaattcttctgtggggccatcctccagcagcagctgggccagagtgccataggccaccacttcgccatgcatggcggtgagctcttccagagcggtaaagccgttgtacaccgaatgggccacagccagaccgccgttgtcggcgcctacgccgctgagataggtgttggcttccacaatggcctccaccgccggagtcaacaggccttgctgggcatccaccttggccagaagccccttatcctgcaaggtatcccagcacaaccggcacagtgccatggccgagcgggtcacgccgccattttccaggctgggtgcatgatttctctcgcagacccgggcctcgaagaaagtgcccagggcatctcccatgccggaaaccaaaaaccgcaccggggccttggcgatgatggaagtgtccacaaccaccacatccgggttctggggatagaacaaatagctgtcgaaggtgccgtcatcctgatagatcaccgaaagaccggtgcagggggcatcagtggcgcaaacggtggggatgatgaccaccggcttatgctgatagtaggccgtggccttggcggtatcaatggcgctgccgccgcctacgccgcagaccacatcgattcccttttcctgaaccagacggcccattttctcgatttccccacgggagctgatgccgccgaaggtttcaaaataaatctgggcttccgaggaggcaaagctctgacggattttatcctctgtggcttttcgtccacttccgctgcagataaacaggaagctctttcccagattttctacattctgacgcagttccagcaatgcgtcctcgccctgcacatatttggcgggggcccgcatgagtttcagcataagaatcactcctttgccccctattgtagtctcttttcccctgttttcaagaagcagattccataaaaaaacacagggattttggtcaatttgtcaaaagtttaacatagaccttttccctgtgtttgattgatttttccgcgcttacattccgtactttcgcaggaaggggatgtggctcataatccatgctgcaaggaagctcaaaaggaacaccaaagcggtagccaccggcacagccaccagcggtgtccaggtgaccgcattcagccccagagccaccaaacggctgttgaaaaaggcatggaccagatacattccaaaggacagctgggaaaccttgagacaaaaggccagcccccgttttcccaagcgatttccatggcaatgctctttgaaaaagaggaaaatccccacagacatcatggccacattgggagtgacatacaaaaaccaggtttcgttgggggcattccaatccaggctggccaccaccgtcatgccccaggtccacagtgtccccagaatcccggcggcatagatgagctttttcactttcggggtaaaatcataggttttgaagtaatacccggccacaaaatagccgatgtatccacccagcatcttcagatccagccggtacaccacaccgctgaccacctgccccacctgagtgccgttgaacatgggcagaaagagagtaaagacaaaatagagcagcaaaaaatactccagatcccgccggctggcccctttgataaagagccggaggatgggagtgatgagatacaggcccataatcatatagataaaccacaaatgataatggccaaaggcgatgttggtgatgatctgccacagggagtcgggagtgccggcccggctgttgagcaaggcagtatacagggcatagaaggtggaccagatcaaaaaagcggcggcaatacggggcagattcttgcggaaaatgcttttataggtcacattccgctgagggtccaaaaagaacatgccgctgagcatgacaaacaccggcacacaccagcgcaccaggctgtcaaacccgttgaggatctgccattctgtgctgcgcacatccattcccggccagttgttcccacacacatgaaccacgatcaccgcaaccatggccaaagcccgcaaaaggtcggcatacagcagccgacccgtggtattttctttcattctcttttcccctttgtctggaatagtaccagtatagcatatctgccaccggaggaaaaccggccattctatagcccgatggctgtttttcctcaaaagttttgctttttgtgaaaaagaggcgcaaaaaatcccctctccctcttgcatttttgtaaaaactgagtaaaatgattcattatccctaaaggacttttattttatccattcaggaggttatatagatgaaaaacggcgaactgatcggcgagatgattgcctgggaggaaggctcccccaagcggatcaaccattttctcaaggtctatggcttggccaaagccatcgcttcccgtgagcagctgagctccaccactatgaacatcgtggaaaccgccgccattctccacgatatcggcatcaaaccctgcctggaaaaatacggctcctgccagggcccccagcaggaggaagaaggggaaaaggcttgccgggctctgatggaaagatgcggctacaccgacaaggaatttgtggaccggatctgctggctggtggcccaccatcacagctatgacaatgtgcaggacatcgatctgcaaatcctcatcgaggccgatttcctggtgaatctggatgaaaagcaggccgatgaggccgccatcgaaaaggtgcgggacgaccactttaaaacagccaccggaaagaagttcctccagcagctgcttctcagcaagaaataatgtgaaaatatcaaaaaaggcttcggcaaaaccgaagccttttttatttttgtccttccagaccacagcactcctgcagcgcatcgataaacttttgagccgccttggaaaagacctggtaccgcttccagatgatggacgcctccccttccatccggggatacaggggccgaaaacacaatttgctgtctccactcacattgatcagcttgtcaaagcacagcgcataccccagtccctcctccaccaacagcgaagcattgaacaccaggttgtaagtggccaccaccgacagctcttccgggtccttccccatccaccgggacatgggccaatggtcgctttcctgggccgaaacgatcagcggcttatcccaaagatcctgaggggtgatgtactcttttgaggccaggggagaatcccggcgcatcagcacgccccaggtgtcccgcacaggcaatttaatggcatgatacccagcggtgtccaccggaccgtaaatgaccccaaaatcaataagtcccctgtccagatactcctttacaaaaacagcgttgccgctgcggatgtgatagtggatgccaggatattgtttttgcaggcagcaggccgccttggcaaaaatgcggatcaaatccgattccccagcgccgatatacacatcccccacaatgacttcgtcggaataggcgatctcccgctgtgtcatatgcaccagttccaaaatctcctcggcccgcttgcgcaggatcatcccttcctgagtgagcatcaccttacgggagcctttgctgccccggatgagcaactgctttcccacttcctcctccaaggctttcagctgggtggacaatgtgggctgggacagatgcagggaatgggccgcggccgaaatgctctgctcccgggccacagccaaaaaatattgcagcacacgcagttccatccaatccctccatccatagaataacaaatttagctataggtttcaactatactttcctattgtaaataagtatttgatatatatttggctgcggattatactgaaattaaaaataaacaaatcgggaaaagaggttttttatggataagcaaatgcttcagggcaaagtggccatcatcaccggggccagctacggtatgggccaaaccatggccgagcttttcgctgaggaaggagcggccgtcgtcctcaccgcccgtgaacgggaaaaactggaccaggtggtggaaggcatccgggccaaaggcggccgggccatcggcgtgacagccgatgtgtgttcctccgaggacaccaagcgggtttttgaaacagctttagagacctttggcgatgtggatattctcatcaacaacgccggtatcggcgaacaaaagatcatcgacgaaaccgacgacgactggatgctttatgtgatgaacaccaatctgggcgggcctatgcgctatatccgggaagcactgaaaatcttccttcccaaaaacgacggcgtgatcatcaacatctcctcggtcaatggcacccgtcccttctgcggcgccacctacacttccaccaagggcgccctgaacaccctaaccaaaaatgtggccatgcgcctgatcgacaccaacatccgctgcaacgccgtggcgccaggtgccaccgtcacccccgcccatgtggccaacaaagctggccagcagcccggcggcgccaaaatgctggagcacagcggccatttcgtctatttccccggtccggaatgcgaccccatggaccaggcctatgcctgcctgttcctggccagcaaaatgggccgccatgtgaaaggccaggtcattcaggtgtgcaacggcgccttcctttaataaaatacacccggccagacaactgcggaacacaaaggaggagatgcaccgatgaaagccctcacttctgtcctgttatggttttttctgctgccctgtatggtctcctgcaccaagcccgctgagactccatccgaatccactcccccttctcaaaccactcagccggaagaaaatacccaggaaaccgaaccggaggaaccttctatgcaaaaagagttctatatcaccgccggcggccagaccttcaccgcccgttttgaaaacaactccagtgccgacgctctgcgccagcttctctcccagggagatctcactgtagatatgagcgactacggcaactttgaaaaggtgggaagcctgggacaaagccttcccacaaacgatcaatccattaccacccagccaggggatgtgatcctctatcaggggaactccatcaccatttattacggcaccaacacctggagctttacccgcctgggaaagattgaaaatgccacccgggaggggcttctgcaggctttgggggacgggaatgtgcaggtgaccttctccctcaccccggcgcacaactgaccactgtaaggaggatgctgctttatgatcaagcaaacagcgggccgggacggtctgggagatctggctcccaaatttgcccagctcaatgacgatgtgctcttcggccaggtatggtcccgggaagatcggctctccctgcgggatcggtccatgatcactgtggtggccctggtttccaaggggatcaccgacaattctttgaaataccacatccaaaacgccaaaaaccacggcgtgaccaaaaccgaaatggtggagatcatcacccatatcgccttttatgtaggctggcccaatgcctgggcggtgtttcccatggtacgggaagtttacgcccaggatgccgaaaacgccaaagagcctctgttcggcctggggcagcccaacgacgcctatgccgcctatttcatcggccaaagctatctcaaccccctcaccacccagggcgtcacggtgtgcaatgtgacctttgagccccgctgccgcaacaactggcatatccaccatggaggcggccagatcctgctgtgcaccgacggcgagggctggtatcagcaatgggaacagccggcccgcagcctgcatcccggggatgtggtgtatattcccccggaggtaaagcactggcacggcgccgccgaggactggttttcccatgtggccatcgagatccccgccccgggtgcctccaatgaatggctggaaccggtgagcgacgaagaatacaacatgctgacgcaaatgcagacggaggaataacaaatgaacattctggtactcaacggaagcccccggaaagaaggaaacaccgcggccatggtggaagcctttgctgcaggcgcccgggaagcagggcatcaggtggatatcgtccctgtatgccaaaaaaagatcgccgggtgcctggcctgtgaatactgccacaccaaaggcaacggaaagtgtgtccagcaggatgatatgcagcaggtctatcctctcctggaacaggcccagatgatcgtgctggcctccccggtgtattaccacagcttcaccggccagctccagtgcgccatcaaccgaatctatgccctggataagccgaaaaacctgaaaaaagccgccctgattctttcttccggcagcgacaatgtgtatggcggcgccatctatgaataccaaaattccttcctggattatctcaagctggaggatatgggcactttcaccgcttttggcaagcagaataaatccccggaaaaactggaggaactgcgccagtttggattgcatctgaaatgatctatcaggacttcaatggactttccatctcccggctggggctgggagcactccgctttcccactttaccgggagagcccgaccacatcgacaccgtgcaggcccggcgaatcgtggacgaagccattgcccaggggatcaactattttgacaccgcctacacctatcagcagggagattccgagcgggcactgggggacgccctttcccgccacccccgggacagctttttcctggccaccaagttctatgccgccgccaaaaaggacatcgccagcgtatttgaagagcagcttcgccgactgaaaaccgactattttgatttttatctgctgcacagcctggatgaaaactacatccaggactacaccgacccccaaaaggactatctgggctttcttctccggcaaaaggaagccgggaagatccgccacatcggtttttcctcccacggttctccggagactctggaaaagttcctcaactggtacgatggctttgacatggccctgatccagctcaactatcttgactggacgctgctggatggcaaaggccagtatgacatcctcacaaaacaccatatccccatctgggtgatggaacccctgaaaggcgggcggctgtccacgctcaaccaaaaagcccgggatatcttgcaaaaggccgcccctgattggtccatttcttcctgggggttccggtttttaatggaactgcctggagtgcagacggtgctcagcggaatgtccaccccggaacaagtgcgggaaaacgccgccaccttctcccaggcccggcctttcacccaagaggaacggcaggccctttcccaggccgctgaggttttcctcaaagacctgggggttccctgctccggctgccgctactgctgcgacacctgccctgcccacctgaacatcccccttttgataaaggcctacaacgaacaccggatcagcggctccacctggaagatccagggcctgacccccaccgaccgggccgggcgctgtctccattgcggcgcctgcctgaaacactgtccccaaaagatccagatccccactatcatggaagaagccgcaaaagctggactgtaaaggagagaaaccatatggaataccgcatcaacaaacgaaccggcgacaaaatcagcgtgctgggctttggcacttcctacattgcccaggccgacgagaaagacgccatcgccaccattcgtcaggcttacgaaggaggcgtcaattattttgacctggccacggcagaaagccgtaccttcccctatttcggcgcggccctgggggatgtgcggaagaatgtgcgctatcagatccatttcggtgcaaactacactggcggcccctatggctttaccctggacgccgaagccatcaaaaaaagcatccactggcagctggagaaattgggcaccgattacatcgattacggcttcatccactgtctggacgaagtggccgactggcggaaataccagaaaaacggcgcactggcctttttgatggagctgaaggaacagggcattgtgcgccatctgggcctttcctcccacactccggccaccatccagcaggtgatggacgatgtacccctggatatgctgatgttttcggtgaatgccgcctacgattaccacaagggcacctatggcaagggcagtaccgatgaacgcaccgccgtttaccgccggtgcgaagcggaaggcgtgggcattgcggtgatgaagccttttgccggcggccagctgctggacgcttctctttctcccttcggtcaggctctgacccattatcagtgcctgcaatacgctctggaccggcctggtgtgctcactgtactgcctggcatgagttcggtggagcagatcaaacatcttctgggctttttcgaggcctccccggaggaaaaggactattctgtcctgggttctttcactcccccggatgccgtgggaaaatgcgtctactgcaaccactgcgccccctgtccccagggaatccagatcggccttgtgaacaagtactacgacctggccttgcggggcgacgccatggcagaagaacattaccgggagcttgcaaagcacgcttcggattgcatccagtgcggccactgcaacagccgctgtcccttccatgtggatcagatggcccgcatgaaggagatcaaccggcatttcggcttgtaaaaaagaaaagcacggcgtatttcaagatacgccgtgcttttttataccccataggagctttcggccagcagatttcccccttgatcataagcccgcacttctattttgtagcgaagtgttctttgctgataggtcagatcctggggactgttgagatcgaagaaaaagcccagccattcttcctctgtcggcctttctccctgacaaaagaacaggcttcccattttttcttctccttcaaaaaagacctgtaccggctcatcatatcgggtgtcggtgagcaccccttccacccggtatgtgccctccggcgcccaggcaaacagcagcagagagccttccagattatcttcccacatcaccggaaccgcctggagctcctgctcccgatgatagcgcaccagattccagccactccaccgaagaaaacccactttctgggccacacacacttccagcagatcctttccctcagccagcaccagccggtctttgtctttcagccccacaggcagcgtatccagataatccaccttttccaccatgtgggcctgctcctgccagcgaaggacctgccggggcgtcagggccggatagccctgggatgcccaccaaagccacagagccagaagagccagaaacacattgcgcaaagtgcgcagggtgcgatgatatactttaggaggtcttttcatgctctgtcacctcctccaaagggatgcggatgcggaatgtattcccttctctttcatagaccagatccagccattggtttttgagaaattcctccctctggccataatccatatacatagtgaggcggcattcctgccagaaaaacaaaggacgactgctgctgatttgcagcaagggctggctgtaatcggcatcgggatgccagctgcccaaataaacctgtccttcgctgccttctatggaaagataggggctgagtttcggctcatccagataaaagaggggggtatagctgcgaagggtcacattcagctccagagtctgccacacctccgggccgtaattgcccgtatatatgtcggggtaacgggggttccaggcatcctgcaaggtggcctcttcgatctgaaaggtataggctcccaaccgagccttttccgaaggtcctccctgcttcagaatctcctgccggtctgcatggaacatttcctccggccagggccggtaaaactgatcccgcagctcgtcaatgggccacaaggcaaaaaaggccaacaccagggaaatactcaaaaaccatttggaaaggatccacagccaccccagcaagggagaatgggctttgtccagcaaaataccgatttcctccgcatcacccatgcgcttta

SEQ ID NO: 2251 - DNA, 15681 bp, Unknown
  16S sequences of unknown bacteria
ctcgacggcttgtctatcttatcacatctttcctcctcttgtcaatatcttttttctttttattttattttttctctttcttgaagtatcctgcgttttttgctatactatactatatcttttcagcagctgatttcatgaaaaatatatactatattatgtatatactattttgaggagagagtcataatgccaatacaaattccgtcttctttacctgctatggatgttttggaatcggaaaatatatttgttatgacacaagagcgtgccatacatcaggacatacgtcctttgaaaattattattttaaaccttatgcccactaaaatcgaaactgaaacccaattgttacgtttattgggcaacagccctctgcaaatcaccgtcgattttttgcaaaccgcaacgcatgtatctaaaaacactccggcatctcatttaaatactttttataaaacatttgatgaaattaaagatgaaaaatatgacggaatgattttaacaggagcccctgttgagctgatgccttttgaagaagtagattactgggatgagctatgtgcaattatggattggagtcgtaccaatgtatactctacaatgcatatttgttggagcgcacaggccggattatattatcattatggaattcccaaatatgtattggatacgaagctatccggaatttataaacataaaatattaaatccgcttcacccgttgatgcgtggatttgatgacagattctatgcaccgcattcccgtcataccactatcatgcgcgaagatgtagacaaacatgacgatttgcttacactttccatttccaatgacgccggtatttatattgtagctgaaaaaagcggccgtcaattttttatcacagggcatgccgaatatgacagggataccttagcgaatgaatattatcgcgatgaagtgcggggattaaatcctgaattgcccgaaaactactttcctgatgatgacagacgagctatcccacattttatgtggagaagtcatgcaaatcttctgtttcaaaattggttaaattattatgtatatcagcaaacaccgtttgatttgaaagatttgattacgctggaaaaaccccagaaaaaatcttaatcacacaatgatacaatggaaactataaaaacacagactgcatccgaaatcatcgttttgcagtctgtgtttttctttttactgtatacaatagatgtcaattattttctatgctttaaacgtctatcgctcttaatggaaactcgggttcctactgtttggaatatttgtaccaaaatgattaagcaaataacagcaaaccccataactaagtattggtatctgtagtaaccataattaatggcgattttacccaatccaccgccgccgataataccactcatggcagaatatcccaatactgtggtaatggtaagcgttatattggaaataagcgaaggaatactctcaggaatcatcacttttacaataatttgcattggtgaagcgcccatgctctgggctgtttcaatgatattaggatttacttcacgcaaactgctttctaccaaacgtgctacaaaagggaaggccgcaatcacaagcggcacaatggatgccggggtacctactacggtgcccataaccaatctggtaaaaggaaaaactaaaatcattaaaattaaaaatggaattgaacgcagcaaattaatgataatattcaaaatatgcagtatccactttggaatacgtaatactcttcccttttcacctgctacaagcagtacacctaagggcagtcctattacaatggcaaaaaaagttgcgattactgtaacataaatggtctcccaaattgcaaggggaaattctgtttttaaaatgtccagcgcggtttgcactgtctcggatgcaaaaaaatcacccatggtcacgtgtcacctcttctacatgaatatccggaatccgtcgtaaataagcaacggctttttccatttgttcctttccccctgaaattcccagtaacatatttccgtatgctttgtcaccaagactgcgggtagaagcaaacaaaatactcgccatgatattttcttccatagccatttttgcaattaatggtgtttgtgtagcgctggctccattaaatacaacgcgaattaaatgttcttctctttctgtttcaatggcttgttgatatccttccggatacaccagctgttttgcttcctgcgacttaggtgaagcaaatacttcactgaccgcgccctcttccacaacagtgccatgatttaaaattgcaactctggtacaaatttgttctaccacactcatttgatgggtaatgataatcacagttaagcccagtttatcatgaatatctttgataagagataaaatagattgcgttgtttgaggatctaatgcactggttgcttcatcgcataataaaatcttaggatgtgttgcaagagcacgtgcgatagcgaccctttgttgttgtccgccggatagctgagcaggatagctctttaacttttctcccagaccaaccaattcaagcagttcggttgcacgttcaaccgcttctttctttttatagcctgcaagttccaaaggaaaacaaacattttttaaacaatttctctgcatcaaaagattaaatccctgaaatatcatggtaatattacggcgttcttctcttaactgagcttgtgtcagactgcctaagtccttaccgtcaatgattactttcccgcttgtgggtctctccaacatattaatacagcgcaccagggtacttttgccagcaccgctcataccaataataccgtagatttctccgtcgggtatcgtcaaagaaatatcttttaacgcttctacagtacctccggaaacaggaaatgtttttgaaagattttgtatttcaatcataaaaagagtctcctaacacaaataatgccgactgcaaaatgcaggcagcgttatttgttacatgataatttttaaattattgttgcagtgcatccagagatgtttgtttgcctccgtaaagacccattggttcaacatgaattgctccaacagatacaacattggtatgattctccgtattaaagttctcaaggtaaggcagatgttggaagtagtttgcgtcaatctctccgctttctaccaaattatttggctgtacataatctgtaaactctttaatatctaaagtaatatttttctctgctaaaatttctttagctaccgctaagatttctgcatgaggtgtaggagatgctgcaatagaaatggtagtgcctgcaagagcatcatagtttacggaatcatcaaatccattccccggattctgtactacactgatgatggaaccttgatacttttcggtaataaaatcagctactttttgactttccaaagctgcttttaatgcttttacagcatctgtattttcattgccagcttttacagcaagaatgttgctgtaagatgaggaggagttctccatagctaaggaatcttgcacaggatttaatttggccgaaattgcataattagagttaataacagcgtagtccacatcctgtaatacatttggtacctgtgctgcttctacttctctaaattgaatatttttcggattttcagcaatatcgcgtacggtagcagtaatgcccgcaccctcttttaatgtaatgtaacccttttcttgcaaaagtaataatgcacgtgcttcgttcgttgcatcatttggtacagcaacggtaatagaatttcccccgccggaacaccctactaaagttaccaatgctaaaatagtagtaagtacaatagcaaaaatttttttcatctttttcaacctttctctctttgcagtcttttaaaagcgaaaaacatatttgagtgataaagtattatatcatatgtgaacatttccgctttatttgccgtaatcagtcatttttccgtttcacatgtgcctattatatactaaaaataatagattgtccaatacttgattaatataaccagtcatagttttatcctataacaaaattataaactattgtagcattattccttatcagcatacactttactgccaaatcatttgctatcataaacaacaaaagattgtgctgatttcgcagcaactaacaggacacataacttttagagtttataacgaaattttaggtgtcttttccataaaatacaattgtttatcaaagaaaaaatctctgctgtatgcagagatttttgttgctatgtatcgctcaacttggtacgcaacttattcaaaattactttttctcgtcttgatacttgtacttgagtcattcccagaaactgagcagtttgtgtttgtgtttgatttttaaaatagcggaataaaataatttttttatctctcggttccaatgttccaactacttgttgaagtgacagcaattctgcaattttttcgtcctccgcttccactgcaacatcaatctgtcccccaccttcctcatcatcacctgtaagagaaatgggacgttgggcagcgcctactgcttgtgcggcggcagccggttccacttctaatatttcagccaattcctgtacagtgggaactctgccttcttttgcagtaaaatctgccgtagcttttgtcgcttttaaagacaattcctttagagcacgtcctacttttaccgcaccgccgtctctaaacaaacgtttcatttctcccaaaatgacaggaaccgcatacgtagaaaattttactcctctatcatcatcaaatccgtcaaccgcttttaccaaacccagacatcccgcctggaacaggtcatcatactcaattccacgcgacttaaatcgtttggcgcaggcatggaccaaaccaatattatcgctgattttttgttcgcgattatccattggcaccctttgcctgtttgcgttcaatctctttttgtaatactacaacggttcctttgcccactttggaagtcactttcatttggtccatgaaactttccattaccataaagccaagaccggcacgttcttctcctcctgttgagtaaagcggctcttttgctttctcaacatcttctataccacatcccttatcacgaatgcgtattactacttttccgttttcaaaaatttttacacttatgtatatcataccaataacatcacggtaagcatgaatgatacagttggtaaccgcttccgaaactgctgttttaatatctgatatttctcccacggttgggtccaactgcgctacaaaggcagctaccgtcgcgcgggcaaatccttcatttgcagagtagcttaaaaaagataaactcatttcattcattggcttcatcatcatttgtttcccccttttctattttcgccaatttccctacacccgacagagatacaatttgttccattttgggagacaagtgtgaaaccaccagttctcctcccaaactttccatcaatttatatctgcctatgataaggccgatgccggcgctgtccataaatccgacatgttcaaaacttaaaattaactttttcggttttgattgattgacagtaaaatcaatttcttcccgcattccctgggctgtatgatgatctatctctccgcttaataccgcagttaatacatcatcctgtaaaatcagccttactgttccgttatccatgcatatcctcctttttattgcaaaacggttgtttgcacaacaaaatgccgctttattttgatacatgaatgttttgttttacaaagaatgtaataattcctcctttttatatttgatggcttgtcctttttctcttccgcagaatctatttttgtataaaaaaagaccctttatcgctatgtataacgataaagggtcaaacatgagaaaagactcgaaatgtgcgaatcgtatcactatttttccataaaatggtattttattttttctcttgcttctgccgctacaaaaagcgacccacacaccaaaattacgtcattttctcctatcaattgttgtgcacggctcatagcgtcgtttatatctgccgccgcagttgcttgccgcccgcaggcaatccaacgcaatgcaaatattttagcatccaaagctcttggattattcggtgtaatggtaacaacgtgatgaaatatatctgaaagcgcatgaaccatataatctgtgtctttgtcccgcaaggcgcctatcacggcaacgattgttcgattgggaagatattgttttatggatgcttttagcatatcaatcccatcctgattgtgagcaccgtcaatgataatcagaggatgttttcttacaatctcccatctggccggaaactgtaccttctctaaacctgctttgatatgattgatttcgattgaaaatcctttttgctttaattgttctgttacagctaataccgtacaaacattgaaagactgatgtacaccaatcaatggcaaatgtaatgtactgccatgatacaaaaaatctgtcccgtttaaatctgtatggagtagttgaatatcattcatggaagcctctacgacataattgttctgcttttccgcttcctcttttacaattggcataacttccgctttttgacatggagctatcacaaaggttccgtttggcttcataatcccacatttgtctctggtaattctctctatggtatctcccaatatctctgtatggtccatagagacagaggttaatacagataccaatacattggtaatcacattggtggaatctctcttgccgccaacaccgacttcaaatacaacaatatcacatttttgtttggaaaaccaaagaattgccaacactgtaaccaattcaaattccgacatgcgctctcccgatgactgcaattgctctacatatggaaacacctgctccataagagctgcgaatgcttctttggaaatcatctctccattaacctggatacgttcccggaattctataatataaggtgacacaaataaacctgtttgatagcccgcttctcgcaaaatagaagataacatagcgcaggtggaaccttttccgtttgtacctgccacatgtataaattgcaattgatgttgcggattcccgaattgttctaaaatccaagcgacacgttccactgcgccgggagagccaaagcgctggagcgtaccaagcttctccattgctgtttcaaaagtcatggtttacctctctgttctaaaaaacaaaagaaggtttttcatcgccaaaacgataaccaaaccttctttctatccttatgattgtaatgctgaaatactggactcaatcagttgtatccgttcggttaaggtctcaaagtctttttttacaccttccaccacctgtgcaggtgctttggataaaaagccttggttgtttaacttgccgtttacttgagcgaattgtttctttgcagtttcaagctctttattcaaacgagccaattctgcttttttatctaccaattcgtccataggaatatacacttttgcatcgttggtcacaatagtaactgcaccctcaatgtcaaacgcttgtccaatggtaatctgagtcgcataagccagtttatttaaaatggcaattccgttttcaaacgtgtttggttctgcagttgcaatgtataggtttgtttttctggatggcggcacattcatttctgctctgcggtttctaacaccacgaattacatccataatgcgctgcatttccagctctgcttccgggaaatcatgttcctgacaatattcaggccactcggctacaatcagtgcgtctcccttatggggcagtgtttgccaaatttcttctgtaataaacggcataaacggatgcagtaactttaatgtaccggtcataacccaaaccaatacttcacgggcattttgtgctgtttgtgcatcatcggaattcattctgatttttgcaatttcaatataccagtcacagaatacatcccacagaaaatcataaattttctgtgcggcaatacccaattcaaatttttccagattttctgtaatctcttttgccacacggttaaacgaactgataatccatttatcctctgttgttagctcatttggaagttcatttttaatttcatggccttccaaattcatcaggataaagcgagccgcgttccaaattttatttgcaaagttacggcttgcttctaccttttcgggcgaatagcgcatatcatttccgggactgttgccagttgcaagcataaaacgtagtgcgtctgcgccgtattggtctatgacctctagcgggtcaataccatttcccaacgatttagacatttttacaccgtttgcatcgcgaacaataccgtgaatgaataccgtatcaaacggcacttttcccatatgagccaatcctgagaatatcattctggctacccagaaaaagataatatcataacctgttaccaaagtgctggtcggatagaaatagtttaattcttctgtgttatccggccagcccaaagtggaaaacggccacaaagcagaagaaaaccatgtatccaaggtatcttcgtcttgatgaatgtgggtgctgccacatttgcaacaagcatgaggcgtttctcttgatactgtgatttcattacaatcatcacaataccatgcaggaatacgatgtccccaccacaattggcgtgaaatacaccaatctttgatgttattcatccagttaaagtatattttatcaaaacgttccggaacaaatttaacctctccatcttccaccgcttttacagctggctttgccaatggttccatttttacaaaccattgcttggaaacacgtggttctaccacagttttacagcggtaacaagttcctacattatgtttaatgggctccactttgattaaatatccctgttcttccagcgcttttacaattttcttgcgggcatccaggcggtccatcccctgatattctccgccattttcgttgataatgccggattcatccataatattaatcacaggaagattatgacgcagaccaacttcgaaatcgtttgggtcatgagccggcgtaatttttaccacgcctgttccaaaatcctgttctacatacgtatccgccacaattggaatttctctgccaaccaatggaagaatcaacatttttcctatcaaatgttgataacgttcatcctcaggatgtaccgatactgctgtatcacccaacatagtttccggtctggtggttgctaaatttaaatagccgcttccatctgccagtggataacgaatgtgccaaaagttgccgtctttttccgcaaagtccacttcggcatctgaaatagaggttttgcagttaggacaccagttaatcatacgctcgccacgataaatcagtccttcattgtacaattttacaaaaacttcttttaccgctttggaacagccttcatccagtgtaaaacgttcacggtcccaatcacaggaggaacccaacttttttaactgagagatgatggtaccaccgtatttttctttccattcccatgcgcgcttcataaaaccgtcacgaccgacgtcttcttttgtaacgccttcttgcttcatcgcttctacaattttcgcctctgtggcaatagaagcatggtcagtgccgggcagccataaggcagagtatccctgcattcttctgaaacgaatcaaaatatcctgcaaagtttcgtccaatgcatgtcccatatgcaattgacctgtaatatttggcggtggaatcacgattgtatatggtttcttcttggaatccacttcagcgtgaaagtattttccattcatccaaaactcataaattctctcttctacttcatgcggctcgtaagcctttgcaagttctttgcccatgcacgttcctcccatatatatcaacaacaaaatttacaaatgtttaactaatttattatgccatttcttcccgcctttgtcaattcagttcggcggctgtctgtgtgcattcaccaccggaagcaaaagcgtcaattaccacagagatacaaaggctttctaacgcaaattcaggttgttctatttgcagtgtataaccatttccactctgcggcctccattgtgctccatgaataaaaatgacggtgcggtcaacgtctaccacatcaaaattgcgaagtaaaacatctccgcggaatatccatgtttgaccgtttattttaaataaaggttcagaagctgcaaaactgcataacaaagtcatgcactttctgccatttataaaaatactgctgcgaagcatttttgaaaaacccatacaatgaatatctgcaacttttccttgttctgttgtctcaatatgaatgcatttaccaaaccgatgtttgtttataaatacctgatagcaaggatgccccaattcatccataacatgaaacagaagattgccaggttcgattgattgtttcaagtataatatcatagataagacctcctatcatagatacatgggttaacgcttctttcaatcggaataacgcctatcagactcgcttgaaatggagcttgcggatgattgcaaccgcgataggagcgttaactcctcaccgtttcagtgggagattattaattccattgaaatgatgaatggcaccgccgctttagaggcggcggacatcatcgtttcggttatagtattatcatatcatgtttggaatgttgaaacaatctgaaaactgacgaaaaaagtccaccaaataattggtggactttttatcttattccggaagtgtcatggtaaatggttttgtggtagcatccattgctttaaactcataaccgttttcttttgccttttgaataatggcaggtaattgctccaatgtagcactggagttgttatccattaagacaacggattttccactgtttaaaatgccgtttacagtggtatcataaatttgctgtcccgttgcccattggttactgtcgccggagtctaaactccagtcatggtacgtaaacccacggcgttccatttctttgacaatatccttaatcgtagcttgattataaccgtttacgctgcctcccgcaaaacggaaaacagttggtttttcaccggttgcttccgtaatcaaatcgaatacctttgcaaaatcagccaaatagttttcaacggacgcatatatggtttgataatcatacgtattggtcaatacacctacagtatgacctttatcatgaatctttttaatagattcctttaaatacgcgtctgtattttcattacaataaataaagaaagtcgccttcacaccttgttgctctaaaacatccaatagcttgtcggtttgagcagacggcgcattattaaaggttaaataaacagacttttctccctctgcagcaccgattttttcaacctgcggaacatacatatcaggatataacgtctcatatgaattggcagctgtctgctgtgacactgtgctttctgttgattgtgtactttcaatcacagacggtgctgttgaggatacatcattttgcgatgtttgtgtcggctgataaaacacaaagtaccatatcagtacacctgcaactgctaatgctatcactgcagatgctgaaatgataataatatttctaaccagatgattgtctctgccatatctggagtatcggcttctgctgtttctgcggtacacctgatttcttctgcccaaaccaccacttcctttatactcatttcttgtcaccgattatatcacaaaagacatatagatgcaatttataacctaatatcgtatctgtcacaatacctctgtcatatgtgacataactttactttttatccattgtcttttcgactacagattccttctgccggaaaagattttgtccgttgttttgtttctcattctctttatgatagccggctttgattgctttgattttaattccctgagcagtaaaacgctgttcatgttccgttgtaatattgtctacaggaggttgaccattttcataaagattggtggtataccataaaatttcaaatccgctttctctcaaatagcgtagggtagattgatataatccgccgtcatctgtcttaaaatgaatctgagctccgtcttttataaaagttttataggtttgtaattgattggtatgtgtcaagcgttttttatgatgtctcattttcggccaaggattacaaaagttaatataaacacggtcaatttcatcatttgcattcataatctgtaaaattcgttcaatatcgtatgcaaccaatgcaatattttccaccttgcggttctcctgctcataacgtgtctgaatattccttctggcaacaccaagtacatcggggctcaaatcaattccaatataattgatatccggatgctttactgccagctctgataaaaagacaccctttccgcagccaagttctaaatgaagcggctgttttttgggaaaccaattgctccaatttccctttaattcttgtggattttttataaaatacggacatgcgtccaattcaggtcttgcccaagctttttttctcattctcatggttgattcttctccaaaatacgaaatatctctagggtattataacaaaataatcttaggctgtcgatgaaataaaaaaaatgtaatatttgaaaaatttttttaaaattttctgttattttcatttaacctcttgctatttgagagatatggcagtataatatattgaattttgttgtgaatacgaaaatgttcaaaaatgaatggatggaggacgcttatgaaacatattattgacccactggatttatctgttgaagaactggacagctatttggatttagctgaccgcatatttgcaaacccggaaaaatatgctcatgtttgtgacggaaaaaagttagccactctattctatgagccgagtacacgtaccagattaagttttgaagctgcaatgcttaacctgggcggaagtgtgcttggcttttcttctgccgaaaacagttctgcaaccaaaggcgaaagcgttgcagataccatacgggtagtgtcaaactttgctgacatttgtgccattcggcatccaaaagaaggcgcgcctatggtcgcctctcagtattccagaattcctgttgtaaatgcaggcgacggcggtcatcagcatcctactcaaacattaactgacattatgaccatacgtgcattaaaaggaagacttggcaatttaaccattggtttatgcggagatttaaagtttggcagaactgcacactccctaattacaacgctggcgcgctatgcgggaattcaatttattttaatctctcctcctgaattggaaattccggattatattcgggatactaccctgatacaaaagaacattccatttcaagaagtagagcgtttggaagatgtcattggagatttagacgtactgtacatgacccgtgtgcaaaaagaacgctttttcaatgaagaagattatgtacgtttaaaagacagctatattttggacatggaaaaaatgtctcttgcaaaagatgatatgattgtacttcatccattgccaagagtaaatgaaattgcggttgaagtggacaacgaccctcgcgccgcctattttaaacaagtacaatatggcgtatatattcgcatggcgcttattatgaaattattggaggtgaatgatgttgaatgttgacagcctaaaacgcggtattgtaattgaccatattaaagcaggcagctgtatggatatttataaatacctggaactggataaattagattgcagtgttgcgattatcaaaaatgcaaaaagcaatgctatggggaaaaaagacatcattaaagtggaaggtcttttggatattgatttagacgtactcggatttatcgactgtgacattacagtcaatgtaattgatgacggaaaaataatcgaaaagaaaaaattgaccatgccggaaaccatacgcaatgtggtatcttgcaaaaatccacgctgtatcacttccattgaacgtggaattgaccaagtgtttaaattaagtgacagagaaaaccatgtgtatcgctgtgcatactgtgaacaaaaatacgaaaaaaaataaaaacagccaaagtatggaggaatccaatactttggctgtttttatttctctttatgattcaatttttcctttttgcgaaagaagaaagcgatagtagctgcaatagaggaaatacctcctgttaccaatagtggttctacaataaaatcatcccctgttttggctgcttccaaattggcgcctgtttgtgtttttatttctgtgttgttcatctctccgccttgtcccggtgcttgtggctgctccggttctgttggtggtacgatagattcttctttctcatattgtgctgttactatggtgtctcccataatattttcaaatgatacatcccaacctgtgaagcggtaaccttctctgtttggttctgttggcgcgcttgctcctgtgttatatgctacctgctctgttttcagcacgcttccgtcccaatctttgaacgttactgtatattgatttactgtatatgtcgctgttactactgtatcttctgttacattatcaaaagcagcattccagcctgcaaaggtatgcccttcttttgcaggctctgtcggtgcagttgctcctgttccctcgtctacaatttctgtctttaacacggttccgtcttcatctttaaaagtgactgtccaagtttttatgtattgcgctgtaatttctgtatcacctgtaatgacatcaaaggttttgtcccagcctgtgaagcgatagccttctcttgtcggggctgccggggctgtcgctgctgtgttatatgctacctgctctgttttcagcacgcttccgtcccagtctttgaaggttactgtgtattggtttgcttcccatactgcatacagggttactgtatcatgattagttgctgtaaggttgttgacagttgccccgtctgtatacataacctgtccgtttactatcgtggaccaacctttaaaagtatatccctctttggtaaacctatttgtttctaatgcctgtgctgtatcatatacaaacgcttgtgaaggcattgtacctgttccgctatttgcattaaactctacactatatgcatttgcttcccatactgcatacaaagtcactgtttcattaggaactgatgtaagatttttcactgattctccgtctgcatacacaacttgaccatctgttgtagttgaccaacctttaaaagtatatccttctttggtaaacttatttgtttccaatccctgtgctgtatcatatacaaatgcttgctctgacattgttcctgttccgccgtttgcgttaaaccctacactatacgcatttgcttcccatttggcgtataatgtcaccgcatttgcgggcattttttccgttgcaaaatcccatttattttggcatgcagcttctttataccatcctgcaaaggtatagccttccttggtcggtactgttggttcctgtatcagattgtcgtactcaacgctctgttctgcgacaatgcttccc

SEQ ID NO: 2252 - DNA, 6513 bp, Unknown
  16S sequences of unknown bacteria
ctcttcttttccttatctcttcttttccttatctcttcttttccttatctcttctatcgtcaatacgccccgctcctttcctcatctcttctatcgccgcaggtatgctccccgcgcctgcgtttcaaaaaaatcctccctcctatccgtccttatcgtcagaccgttcgccgccctttaaacgcccttccacgatttcccgcaatcttcatccgcccgtttcttgaagaaattttgcgttttccgcttacatggcgataaaaaacccgctttttacagcgggcgcattttatctttctaggatgcgggaaaacttccttcgtcggaaaaactgttttcgccgtcgatgcacgttgaaggaatcctaagcgctatcttataaatccgcctgcttccacggtgcgctcctcttcttgtcctatccggcggcaaacggtttccgttcgccctgcgaatatggacgtcgcgacgcggcagaccgtcccacgccgcccaaggcatggagaagagaagcggcgaaaatcgcgcaaagaactccccgcggcactttgcggtatactttttattcttctttttccgaagaatccccccgcgtcagagcaagtacgctcacccgtaggtcggtagcgccgtaaggctgcaatttcaaagccacgtttttcccccgcctcttatttccggggattctcgccgccacaaaatcgtatcccggctcgaatttccactccacgggcgcaagctccgctttgattttgagcggagggcgttcgcggtcgaaaggcagctcatattcgcactcctccgcctcgaacgaatcggaggcaaacgcgtaccgccattcccccgcgggggacaacgaatagtcgcaatagggaaacttgcgttccacgccgtccgccgtatattcccgcatttcccgcttcgccgctacggggagggcaaacagcagagcgccgtatttaaggcaatagccgccttccgggctcttttccagacgcggctcggacaaaaaggacacttcgacggattttcccgcttcgagcgtaagctccatccaccccttttcctgccgatatgcggctttgcaggcgggctttgcccatgcgggaatgcgcacgagcacgtccgtccgcctgtccgccgtcagcgtaaaacggctgcggaaaggatattcggagtcgcacacgagcgtcgtgtctttgccgtgtacgctcgtctttatccgcgcgggaacgggagaaagcaccgcgatcctttcgccttttttcctatacgcggacagagcgaacttcggccacccctgcccgaaatttgcggtgcagcagccgaaattcggctctaagccgaatagattggattcgggaccgttcgtgcggaagatctgtttttcgaaacggacgcaggcgatctgattgacctgctgatcgtattgatgcgtccacatatccgcggaaatcgccgcagggagggcgttgaacgccaacgattccagcctgtccccccattttccttcccccgtaagggcggcgagccattcgtagctatacatggcctccacgacgccgcacagctcggagccctgcacggcgctgtttcccgacaggcactcgtcgcccgtgaaatgtccgtaagcggtgccgtgaaagcggtcgagcgtttccaacatctcttccgccagtcccgcgcttttctctcccgtaagctcgcagaataaagcgtcgcttttcagcgccatggcgatattgacgacgtgcgtttcgtaagtccactcgttcctcgcctctttccacagcccgatcgcctctttaaagtctatcccctgcgctttcaagcgtcgggcgagccgtatcagccattcttcccgtccgcgcttatacagccagagaacggaaacgaggcattcgtaccatctcgacgcggcccaatttgacagcgtgcgcccggaaagcaatttgtcgataaagacaagcccgcggcgaacggcgttttcgatgcgggaatcccctgaacagtcggcatatacggtcaaaaccttcaagagcagaaactgcgaccagatatcctcgtttttttcgtccgtatcgtttttcgggcgaaagcgcccctcttcgtcctgtccttccaaaatacaagttatgtagtttcgggcgcgcgcctttttgtcctcgtcgcccaaaagataggcgagcggaatgaacccgtcgaggaaatagggcagtcgttcccagccctccctatcgccgccgagccatttgctctcgcggatatcgggccagattttgtctaaattcccgctgagtccctccgcctgcgtttccagctgttttctcagccagcctgtcggaaggatctctttcggcagcaaagcttccaataccatacttctatctcctttttttttcgtataatcattataaacgtttttctttcgcttttcaatatcaaaaggaatcgaaaatattgcaaaaatcacaattatatgttatcatagaaaaaacgggagaaaaaaaatgctgaaattgagttttgacgaactgccccactatctcttttccgataaccgccagtttctgcccggagaacggcatatagacagactttgcggcgaagacgtccttttgctcgtgcgaaaaggcgtcctgcgctttcacgaagacggcgttttggcggagctgcacgcgggagaatattatatccaacgggcgggactgtatcaacagggattgctgcccagcgacgcgccgaattatttttttgtgcattttcacggcgtttttaaagaaaacggcagacttcctctccgaggctccttcaacaacgaatccgcgcggcccatcctgcaagccctgaaacttttgggaatcgaatcccccagactcgaatacgaaaaaaatttttatgcgcttttgtccctcctctccaaacaacagcacgacgaaacgacggcggaaaatatccgttcctatcttctgacgaactttgaaaagcagatcacgttagacgacgtgcgcaaggaagtattcctttcaaaaaaccaaatcatcaacgtgttccgcgccgcttacggaaaaacgccccatcgttatcttctcgactatcgcctcgacaaggcctgcgagtttctgctttccaccgcgcgccccgtcgccgtcatcgcctatgccgtgggttttgaggaatattccgtcttttatcgcgcgttcgtggcaaaatacggcatttcccccgccgattacaggcatatacgctcccgcgccatccgccccgacggcaagatcgacgaagatgtccaaaaaggaatacctttcccccgacagtaaaacgcttctgttttccgtgttttttctaaaaatctttttattttttataaagctcacaggaaatatgcaaggagccccccttacttcaagggctttccggacaaaatctttcctttctcatacataatagataaagaaatattagcgaatttctgtaagggcatgagctaaacagcgctctttgctcggcaattatactatcgttacgcgcacaattttcgtaaaccctataaaatcagcgctgtccgcgcggcgaggatccgcttatctattttctcttctgtcgttacgaagccccctgacgagcgccgcgattaatttttatatcgtttaaatcgcctatgtcctgttcatattatatttgcaacgcttccgcttcttttgttcccttccttttacaggagagttttcttgtaacaaccaaaaaggcagatctttcaaaagacctgccttttctcctatctatctgttcccaaactttttattccgcggcggagagtttcgtttactccccctgctcccgctatattctccgttcgccttccctatttagcgtttccctccgtatgcctccttagtgacaacgcttatttcgtttatttcagaccgatcaatccgcaaacgtacttttaagcgatccgtttctatcattgcaaagttttataactcggccgttgcgtcatggaatccatcgcgaaagctatttttcgaagccgttaagaaaaaaacgcctgtctttcctcgttccttccgtcgattctttacagcgttctttcccttttattttccgaacggaaaggacaaaatgtgtttatcccctgtctttttgccccgctttccgccgtcctcgccgccgtcgggcgaaactccgccgttgagtccggaaagcagagcgaggtacttttcgtattccgaatcgacgcccagatagacgatttcttcgaggtcgagccgggtatatccgtccgcttttccgtcctcgtccaaaagcctcatttcgaggatgttccaatccctgcccactgcgtagccgctgattttatccagcgtttcgaaaccgatctccatcgtgcagagccgcttgctcttgatgacgaaatcgataaaattttccagcacgtttttcggggatacttttaaagcgggaatttcctccccgtagtggcggtataccttgacgagattaaaaaggtattttgttcccgcgtccactttgagaatttcctcgatgcggatgcaatgaaagccgtcgaacctccctgcgggagagatgaactccatcagtacgaactcgtcgtcggcctcgtgcacgaatcccgcgcagaatccgcccgagctcttgtaatagacggcgacgggcgtgcccgtgcccttcaaacgttttaaaatttccgtcatgttctttctcctttatcctgtctttaaaggaatttttcctgtttttaattcgccttattttaattatagcacggaatgattttttgtcaaggcggcgcggggcattttgcaactcttttccgacaatcgcataaaatcggggtattttggtgaaattttccgtttttctattgcaaagtcccaaaaatgtgttatactgaatttataccaaaaaatcaagggaggcgtttttatgtccgaaagaatttattacggcggggaaatcctgacgatggaatccgagctttacgcggattatctgattgccgaaaacgggaggatcaaagggacggggaagggcgctccgcccgcctccctctcgggaagcgccgaaaaaatagatttgaagggcaggcccctcctgcccgcctttctcgatccccacagccatctttccgcctgcgcaaaccgttttttacagctttcgctctcgggttgtaaaacggtcggggaaattttaaaagcgatcgaaactttcatcgcggaaaacgccgttcccgcgggcgaatgggtgctcgccagcgattacgatcacgccttcgtaaaaggaaaccgcctcaccgcagccccgctcgacaaggcatctgcgaaaaatccgctcgtcgtgcagtatacctcgggacatatgggaattttcaactcctccgccctgaaaattttgggagtgaacgcggacacgccccccatggaaggcggagtcatcgaaaagggaacggacggcgcccccacgggatatatggaagaagccgactttgtttcccgtctgcaacaggtgcccatgcccggcgcggacaaactgctcgacgcctttgaaaaggcgcaggagatgtatttttcccacggcatcgtcaccgttcaggagggactggcggtcaaggaacttctgccgctttatcaggcgctgacgcaaggcaaccgcctgcgcgcggacgtggtcgcctatcccgcgttacaggactttaaagcgtacgaaaccgcctttcccgccagcctgaaagcctatgacaaaaacttcaaaatcggcggcgtcaaactcatttccgacggatcgccgcagggcagaacggcttggatgcgcaccccttatctcaatgaaaacggcgcgcccgaaaaggacggctactgcggctatccttccgtttccgaaagcgaacttgtggaaaacgtgcgcttttccaaagagcgcggcttacagcttctcgtgcactgcaacggcgatatggcggcggaaaaattcatccggacgcagcttgcctgcggagatcccgccacccgtcccgtgatgatacacgcgcagcttttgggcgtcgatcagctggacgatttgaaacgcgcggggatcctgccctcctttttcgtcgcccacgtactgtattggggggacgtgcacgtcaaaaatttcggtttcgaacgcgcctcggccatcagcccgctctgctccgcgctgaaaaaaggaatccgcttcacccttcaccaggacgcgcccgtcgtttcgcccgatatgttagaaacgatttggtgcgcggcggagcggcggacgaagagcggaaagatcctcggcgaaaaagaacgcatcggcgtcctgcccgccttgcgcgccgtgaccgaaaacgccgcgtatcagtatttcgaggaaaatacgacgggaacgctcgcggcgggaaaacgggaaaatctcgttcttctctccgggaatccgcttcgcacgcccgcggaaaaactccgcgatatcgttgtggaacggacgataaaagac

SEQ ID NO: 2253 - DNA, 32759 bp, Unknown
  16S sequences of unknown bacteria
caagtttccaagtatctggttgatactctttacttacacttttatggtacaaaaatagacaccctgaagacggcggtgaacgcttttatcgacgaatccgcaaaggccaacagcgagcggtccaataagaacctgcgcagccggatttctctggtgaagttcgccgggaataagaccgacaaggagggaaatgatacctaccgatcgggttactatacttacaactacactcaggttgtaagcaactacaaagcgtacaccaacgacaacaagtcggagctgaagaacaaggtcaatgcgctgagaccggcaggtgccaccgcagcggattacgccatggatcaggccaagaagcaggtgaaccaaagcaagagcgacgaggccgctaatccggaccgcaagaacgtgaagcgcatcgtcatcttctttaccgatggtgagccgaatcacggcaccggttttgacgaagacgtagccaatacggcgattcagacggcgaagggcatcaaggctgacgccaaaatgtactccatcggcgtgttcaagaatgcggatgccagcatcaccaccggaggttccggtttttttggcggctggaccgataaggagatgttcaacacctacatgcacggcatgtccagcaactatccggacgcgacctcgtacgacaatctgggcacccgtgccaagacttcagacggaaccgaaacagccttctacaaggccgcaacccaggcttcggagctgaatcatattttcacggaaattcaggaagaaatcattgccacggcacagtccccgacggaagtggattccggctcggatccgaatcagagcggatacatcactctggtggatcagctgggagactacatgcaggtggatgatatgaataccctgctgtacgcagacaagctgtacaacaacccgaagaaggatgtgaccaaggaaggaaaggtaacctacacctttgaggcggagattccggacacgaatcacgtatatccgacgggaaatctgagagatatcaagattaccgtagagaaagccgatgcggcgaccgcactggcgacgggagataaggggaccgtaaagattccggccaacctgatcccgctgagatactatgaagttaccaaggacaataagattaccatcgacaacacttatccatgtcgactcttctatgacgtgagcctgaaggcagcggcagagaagaagctggagagaccggatgaagcgatggaggcttatattgccgaaaattccagcgaagacggtcaggtggcgttctatgccaacaagtacgataagaagtcttccaatcgggattcggaaggcatcggcgcatatgccaacttcacgccggcgtccaccaacgacttctactacttccaggaagacaaggtactgtacacggatgaagcctgtaccaaaccggcaaaggatgccatcgataccagcggcgacaccacgtactactaccagcgtcagtactacgaaaagggcgcttccggaaatgcagtgaagaagacctatgccgtaaagattccgggcaacagcaatcttctcctggaaggctatgcgaagaaaaacaccaagacgggtgaatactacatcccggctggaacaccgagaaccaccagtctgacttattttaccgaaaataaggcggacggcgccaataagtcccagacatccaatcgggtaatcaagccggtatgggagaacaactacgccggaaagaccgtatatacccatctgggcaacaacggaaagctggtcaaggaacttccgggtgagctggatattcggaaatccgtacaggcggcagagggccatcaggttccggacagcctgaaagattcggagttcgagtacagcctgacatttaccggcggtacaaaagaaaaatataccgctcagaagtacaccggcgcggacaaagagggagacgagttcaccgtcaagtccggagatacctttaaattaaaggataatcagaccttgaagatttacggtgtggatggcggaacccggtacaccgtaaccgaagcaaaaccggagcatttcaccggaagcgctgcacagcggaatgccggtgaaggcagcgagaccggaacgaacaacgacggcggtgtatatgcgaagggaaccgttgccggcaaagatgccgcagtggtagattacaccaatatctatcaggcagactccaccacactgaagggttccgagtcccttaagattaagaagaatttcgaaaccgcatccggtgcatccgcatgggatatggattatctgcaggacgcgaaattccagttcattctgagcccgctggataacgaatgtccgatgccaaaggatgccgctgttgtggatggcatgaaggtttcccgcctgaacgtaaactccaaggcggaaatcgaaaaagcctttggcgatatagaatacaccaagccgggcacatacgagtaccagattacggaaaaggatccgggagatacggcgaagcagggtgtaacctactccaacgcatcgtaccgcgttaccgtaaaggtgaccgatgagaacggaagcctgaaggcaaatgccaccatgaagaaaatccgcaaggatgacggctcggaagtggcaaacccaactgctgtggacaacaaaaccgcggcatttgcgaacgtatatgacgcaaaagagcagaccgttaccctggaggccggaaagaagttcacggattacaccggaaccaagtccataaaggacggcgactataagttccgactcacaccggttaccgaaggtgcaccgctgccggatggcgcatccggacacgtggacgcgtcgaatatcggaaatggcgtgaaattcggaaacatcacctttacggcagaacatgtaaagggtgcaacgcaggataaaccgctcacttacgagtacaagatgaaggaaatcctgccggaaggtgcgaccgcatccaaccattacaccgtagacggattgacctatgacaacgcggaatacaaggtgcgcatcaacgtgtacatcgatgacgtggatggtcaggacacggtagttgcggattacaagtatctggatgcaaacggaagagaactgcagaccgtgccgattttccggaactcctacaaagcagatgccgtaacccttaccggaaacacggcacttgcaggcgagaagaccctcaccggaagagacggaaagaccgacgaagcatttaacttcaaattgacaccggacgcagagacccagaaagcgattgagaagaacgacgtttccatcgctgagaacggagacaccgcttcggtaaagaatctgaagaacggcgaggcaaaggactttggattcggcaatgttaccttccgaaaagaaggcgtatatcactttgacattaccgagaaggtaccgggaaccccggccggcggaatgacctatgaccgccacgccaccaaggtgaccgtgaccgtaaccgacgatgcggaccacccgggcaaactcaaagccaaggtggaatacaacaacggtactgtatcggataagacggacaaagccgtattcaagaacaactacgaatccagcctggtatacggaaccaccggcgccctgaacattcagaaggtgctgaacggccgtaccatgaaggcgggcgagtttgaattcacctatggaccgaaggacggccagacggtgaaaatcaccaacccgaaccagcgcggatccggcgaaccggacaccatgaatgttctggcagatcttaccttcgaccagaccatgtccggaaagacccagacatacatcgttcgggaaaccaagggaagcatcaagggtgtaacctacgacgaacgaatcggtaccgtggaaatcacaccacaggacaacggcgacggaaccatgcacgtggtaaccaaggtaaccatgaagaacgcagacggttccggcgaatcggtaaaaacatacgatagctccaagcagaattccggcactccgaccgttcggttcaccaacacctatgcggcagcagcgacggatccggtacaggtcatcaccggcttcagcaagaagcttaccggaagagagtggaaggacggcgaaacctttacctttaagctgaagaacgtatcgaaaccggatggcgtggaaaccgcaccgatgccggaaaaggacgaaattacagtccgcaaagcagatgtgaaggacggaaaagctccgattgaattcggcgcactgacctttaagaaggcgggcgagtacaagtaccagctgaaggagcaggtaccgagtccggaagcagcgggcatgacctacgacaaggcggttcgcaacattaccgtcaccgttaccgataacggaacgggcaagctcaccgcagcagtaaccgctgtcagcggcagcaagacctttacaaatgaatacaagacagaagatctgccgatggatcacgttctgggactgagcatgaccaaagttctgaccggtcgggatatgacggaagatgattttagttttaccctgaaaggcacagacgaagcgtcggcgaagaagctgaacattgcggaagacggtaaaaccgtaccgggcaaagccggtgcggacggtgagaccgttaccgtacggagcggattgaacatgaccctgaaacaggcggatatcggaaagacgtacgcatacacctttgaagaggtgaagggctccgcaaagggcatcgtttacgatgagagccaatataagctggaaatcaccgcgaaggacggcggcgacggaacgctgaaggcggaagtggtactgaaggacaaggccggcaaggaattgttccggaagaccgtaagcaacgagaacccggcaatgggcgaaaagggcatcaccctcgcttttgcgaaccggtacgacggatccacggatgtttccggcggaaccaaggcggacatcaacgcttcgaagaagctgaccggccggaagctgaaagccggagagttcacctttgagctgatgacgaagccgggtgacggcagcgaaggcaccgtacttcagaccaagaagaacggcgcagacggcagcattcatttcgatgcgctgagctaccggaccaatgagaaggcggcaggcagcggcaccgtactgaagaaggcggtagaagacggatatgcaaccaagaccactaaggatggcaaggtggtatacaccgtgaactaccgtgttgcagaatcggcaaacaacctgccaaagggcgttaccgtgactgcaggaagcttcgatctctcggtagaggttaccgataacaacgatggaaccctcaccgcgaagaccatttatccgaaggattccggagataagtgcgaatttgtgaacacctacggaaacggcgaggaagttccggtgaacgtatccggaagcaagactttggaagcagaggaaggattgaatccgccggatatcagcggtaagttcacctttacgctggaggcgctgaccgaagacgctccgatgccgaaggatgcgccgaaggatgcatcggttaccaacgacggaaacggcaacgtaacctttggaaccctggcattcaatattgacgatctgaaagacgtggaccaggcagatgacggttcccgtgaaaagaccttcaaatacagcgtgacggagtccggaaatgtaccgggtgttgcgaacgattccaagagaaccaaggaattcgaactcatcctgaaggatgacggagaaggacacctgtcggtaagccggaagccggagaccgataacctgtttgcttttaccaacacctatggggtaaaggaactctcctctagcgtaacggatcagattgacatcaccaagaaattggacggaagaaatctgaaggacggcgaattcaagttccgtctgatggaggacggcaaggtgatctctgaagcggcaaaaaatgacgcaaacggcaaggttaccttcgataagattacctacacaaagccgggaagccacacctacactgtctgtgaggagaatgacggcaagggcggcgtggtctatgacagcaatagctacaccgtatacacactggttgtggataacggaaacggcaagctggaagcaacccaccgcatcgataaggaaatctccggtgaccagccggctgcgaaggatattaccttcaccaacaagtatcaggcaaagtcgacatcggtaagcctgggcgcagcaaagtgtctgaacaacgcaaaactgaagagtggacagttcaccttcgtgctgaaggatgcgaacggcgaggaagtggaacgtgctacgaataaggcggacggaagcgttcagttcaaggcaatttcgttcgacaaggccggaacccacgagtacaccatcgaagagctgaatgacaagcagaaggacatcacctatgacaccaaggttcaccatgtgaccattacggtgacggatgatggtgaaggttccctgaaggcagagttgaccggcgacaaggcggtattcagcaacagctatgataacggtgacaacggcggtggcgatgacgacggtaaaacaccggttgtaacgccgactggcatccagaccggagactacaccagtggtttcatgggaatggtagtgctgttcctgtccgcatgtgcaagcctggcagtgacccttcgcaagaagagagcataacagcaggggtttcgtaacggatgaaaccgtaaaggaaatgtatcctatcaattaatccccaaaataaagggagcagcgatttcgattttgaaatcgctgctttccttttttgtgcaagggatttgccggaggcccgggctccggcatggggcacagggttcgcgcacggctgcccgcaaagccaatgaattcggtttttgagcgcgaactttgtgccgggaaaagagggaaatagagcccgggcgccggcatggttcgcgctcgcctgtccgcaaagccaatgaactcggttttcgagcgcgaactttgagccgggaaaagggggaaatagagcccggcgccggcatggttcgcgcacggttgcccgcaaagccaatgaattcggttttcgagcgcgaaccctacgccggaagaaagcgaaaaagcggcccgggccccggttcggttcgcacacggctgctcgcaaagccagtgaactcggttttcgagcgcgaactttgagccgggaaaagagggaaatagagcccgggcggcggcatggttcgcgcacggttgcccgcaaagccaatgaattcggttttcgagcgcgaactttgagccgggaaaagagggaaatagagcccgggcgccggcgaggttcgcgctcgcctgcccgcaaagccaatgaattcggttttcgagcgcgaaccctgtgccggaagaaagcggaaaagcggcccgggcctcggttcggttcgcgcacggttgcccgcaaagccaatgaattcggttttcgtgcgcgaactttgtgacgggaaaagagggaaatagagcccgggcgccggtgaggttcgcgcacggctgcccgcaaagccaatgaattcggttttcgtgcgcgaattccggagcggaagaagaaggcaaggcggataggatgccagcgggtgacagcaacggtttgtatttaataagtacaatctcacagaaagtactgcattgtgcgagaaaaagtttaaaagtatgtcgtatgaaattttaccttcttagcagtatgtgctatactgaagaaaatacaaggaggcacatatgatttgtaaggatatcagttttattgaaaaggttttgtcagaacaagaactcttgaaaagtaaatgtgagaataagttggattccctccgggaatacaagggacaacttttgaaagtcggttatacaaaaggacatccgtattattcggcatattttccgggagaagcaaaacattatttgggaaaagaaacgcatccggatgttttaggaattcgagaatacagattatatgaaactctattaactttagctgaagggaatattgaagcggcagagtattttttgagtcattttgtgccaatttcgaacgaggaactattaaaagtgcttccgaaacattatattccatctactttgaatggagctatggagtgcagtgatgcgagagcgcttctgcttaaagatttgcagcacctgaaagatatttgtccggctccacatccggaatcgttgcaagtatcaacggtagatggatctttcgtgcgaagccgctcagaatcattgacgtacaatttactgcattcatatgggttggattttttccatgagctaccaatatatataaatggccgatatatttatccggatttcacaattgtgcatccgtttgaaccgattctttacatcatagaacatttgggactttggtttaaggatgatattggtgaaaaatacagttcttcattctatcaaaagtctcttatttatgagaaaatgggattttcgccgggtgtaacattgttgttgtcttttgaaaactcaaaaagtggtccggacttggaaagtcttgctaaaataattgaacaaaccttcggaagagttccgacagcacaagcccgaaaaattggaataacggcagaagattttctgaaatcccagacggcacatcttcctgcaaatataagagagtcctttgcgacgatttctatccactaaagagcagaaaaggcggcccgggccccggtgaggttcgcgctcgcctgtccgcaaagccaatggattcggttttcgagcgcgaactttgtgacgggaaaagaggaaaatagagcccgggccccggggggttcgcgcacggctgcccgcaaagccaatgaactcggttttcgtgcgcgaaccctgagccggaagaaagcgaaaaggtggcccgggcgcctgcagggtttgcgtacgactgcccgcaaagccaatgaattcggttttcgtacgcaaaccaccgggccggaaagagcggaaaaggtggcccgggccctggcagggtttgcgtacgagtgcccgcaaagccaatgaattcgattttcgtacgcaaaccaccgggacggaagaaggagaaaaggcggtccgggcgccggcgactgccgtccccaaaaagaaaaaaggaaaatgccaaccgttccatggcattttccttctctttctctcatattccccggagggtcggcactattccccggagggtcggtactattccacctcaatctggcagaccttcatggcattcagtgcattccggtgctgctccggggtgacgccggcacagcatttttccaggacacggataggggtttccgggaaggctgctttgagaatcatggcgttggaaatcacacagatatccgtgcacagacctaccagggtgatggaagaaatcggatcctcatcgtcctccaggagctggatgcattttggcagttccagggaaccgaaggatggtttgttcagctccatcacggtgtccggcacgtcggcggcttccgcaatgaccgggttcagctcccagccctctgtgccctccacgcagtgaattaccggaaggtgttccccctcctgggtatgaaggtagaacttctggtgcgtgtcccgggtgcagatgaccggtccgtcccagtttcgaatggtctccgccaccgccggcacgatggcttccgcctccttggtacccagcgcgccgtccacaaaatcattttgcatatctacaacaatcagaaaatccatgatatattcctctctcccttgaattgataccgttcgcagcgaggccatcgaacaattcacagcgcctcgcttcctctaaattatatcgagggtaaaaagaaataacaacccccaatcgattccggcattctgcagggacttttctcctcaaaagtttgacagcatgcccctgcaagtggtaaaatcagcccattgcgggacttcccgaaaacgaatcccgccggaaatcgagaggaacttatatttatgacaaaaagtaattttttgctgattaaccggaagccgcaggtgctggaggaagtgattccgggggaaaagggcctgatttttctgggaaaggaccggcgcatcctggatcacggggttttggtcatggactcgggcgttcgggcttgcctgtattgcgatgacgtgcgcaacctgacattcctggtggaccggccgggcgcttacggcattgagacacttatttttgccgcaaaagaaaaatacgagaaggtgcgggatgccatcaagaaggattatccgaaactggagatgagccctcagaacaagaagctgaaccggtatgcggaacggctgatggaaaagctgaaggacggtcaggaagtgcgaattgtggatgccgttcgggcagaggatgtgattatctgtccggagtgcggggtgcagtgcgcaccggggagccaatattgcatggagtgcggcgcggagctaccgcagaagtagacgaagagcgaggagcgttgagaatgagaagattgtatagagaagataagccgaagtttttcactatcgtgatggtgttctgggtggccctgggcacatttgggattttccgaggatggagcaccttgagcctggtgatgtgcgccagcatggcggcgtcggccttcctgttcatcggaacgtccaagaaggatgcggaatggattgcggagcacggcgatccggatgagtatgagaagaagatgaagcagctggaaaaagaagcggcgctccgtgcggcgcaggaggcggaagcggcagaggctgcgccggagtttgcggagatgccggaacggccttttgtggacgccgagggcgagattgaagaagccgtggatgcggattttgaggtagagaagtagagaaataggagagacgctatggacgagagttcatagcgttttttatataaaaaacggataatcgcagcctcgctgcgattatccgccctcttaacttgcatcaaagaaattactaaattactttccgatgtatctgctctcgatgtagtatctcttctcgttggcttcgcccatggagaaggtctttcttggcagcgcaccgtctgcggcaactgccgggaagagcatgaacttatccattgccgggaggtagaaacctgcgttgcccgcttccttagacagggactctacggctttggaaccgtggatgtagtcgatgtctgcatcctctctttccttaacgataacgtccagtgcgttctggagtgcacctacttccagcttgttggccggatcggtcacaacgatagttccgcgctgctcgccggtaacgtaagggattgcgaactcaccttcttttgcctgatatccgtcttctgccaggtgcgcaccgccgttctcctgctgcagcagttcaacggtctcgtttaccagatccatgccggactggcccttctttgcgaagattacacggtgaatcggctcgaatacgatgccctcatcgtggatattttcaatttcgcacagcgcgtagcgagccggatgattctccgcttcttccggagtcagggtcttcttcaggttctcccacatggtctttgcggttgccagggagtggtttccgtcgcccattgcctggaaaatcacgttgccttcgccatacttctcaacggctttgtcgaagagtacggacagggcatcctttgcgccttccagatccttctctgcgatgaaggaaccggtgatgtgtccgccttccatcatcaggtcggtatcatataccggagtctgaggtgcgttcaccagcggctcgataacgctcttgtccggatcgtcaatcaggatcaggatgtgcggcatctcgatcggagcaccttcacggatgcgcagacgaggtgggattctttcgattacggtgccttcggttgcgcgggtcagggaagtggatcccttgctgaagtcatatgcttccagatccgtagcgattaccagaccggtacgggtacgtccctcagcggttctcttgatgagcatgcagcccggatccagagtgcggagagtaccgtccgccagatactgatccatagtcttgcggatgtctgcggacttctccgcttccgcttcttttcccaggaaaatttccggaagcatcaggcgaagcgtggatggtgcatccccaacgatttcttctacctgttcccaatattccggttccgaagtgtactggtcacaagcaactactgcccacttgctgtagtcggtgccttcctttggaagcatgatttccggaatatggaatccgaatgttccccaatcatatttagccataattaagtcctcctgttagttatgaaatcacaatgagcgtcaaattgctcacacataatatattatgtattaaatcgcatagaatttcaactgaaaaaactcagtaaaaataaggattttacgagaattctgtcgctaccggcacggttttgtgttatcatctacagtatgcctaaagaatacttatttcaggaggatatataaatatgaagattattgttgccggtaccggtaaggtgggaaaccttctggcggatcagctcacgagagacgggcacgatctggtggtaatcgataagaattctgtcgctttggaagcggctttggagcagtatgatgtgatgtccatcgagggcaacagcgcatcggtgagcgttcttcgcgccgctaacatcgagcagacggatctgctgattgcggccaccggtgaagatgaaaccaatctgctcacctgtcttacggcaaaaggattgaatccggacatcacaaccatcgcccgagttcgctctccggaatacatggaaagtacggatatgctggaggaacagctggggctgtcccttaccgtcaatccggaattccagaccgctcacgaaatcagcagtctccttcggtatccgggattcctgagccgggaagaattcgtcaacggactggtagacctggtggaactgcacgttaccgccggcagcccgatttgcgacaagccgctgtacaagattgcggatatcgtgaaatgccagattctggtatgcgttgtggctcgccgggacgaggtcatcattccttccggtgaatttgttttgcaggagggagatcacgtgtacgtcaccgcttccgccagcaacctcaccacactgttgcacaacctgaacatcgtcaccaagcgcatccggaacgtcaccatcaccggcggcggacggattacctactacctggcaaaacggctggaggacgaccgcatcggcgtgaagattatcgagcagcggagagaccgctgtgagtacctggcagaccgcctccacgacgccaccatcattcagggggatgcctccaaagagtcggtgctggaccgggaacacattgagaaagcagatgcttttatctccatgaccggaatggacgaactgaacgtcattacgtctctgtatgccaatgagctgaaggtgccgaaggtggtcaccaagctgggtcggggagagaatatttcgctgattgccaacatgccggtgggcagcgtcatcacgccgaagattctttgcggcaatactattcttcgatacgtgcgggctatgcagaacggatccgatgcagcggagaccctgcactccatcgccggcggaagagcgcaggcgtacgagttcaaggtgaacgaggacacctggcattgcaatgaaccgctgaaggatattgactttaaaaagaacattcttctggccaccatcacgagggaccggaagatcgagttcccgggcggaaacagtttcttccagccgggagaccgtgtaatcgtggtatccaacggatccatgccgattatacagctgaacgatatttttgaggaggataaagaggaaaaggatgaattataagataatgatgcgggtgtgcgcctggattctcgtcatcgagattgggtgcatgacaccggccctgggagttgccatctacacgggggatcagatggccgttatcggattcatcggcgccatggcgacggccggcgccctgtccttgttgatgtatgccggctccgtgcggcgccggatgaatttctacgccaaagagggaatgctggtaaccgcttttgcctggattcttttgagtatcgtcggggcactgcctttctatctgtccggacgaattccgggatttgtggatgccctgttcgagattatttccggtttcaccaccacgggagcgtcggtagtgtcggatgtggagggcctgggcaagggattgcttttctggcggtccttcagccactggattggcggaatgggcgtgctggtgttcttcctggccatcattccttcggctcacaaaggcgagggatattcccttcaccttctgcgggcggaatcgccgggaccttccgtgaacaaaatggtcccgcgaatgcgggatacggccacggccctgtatcgaatctacgtggttctcaccgtgatcaacatcgtgctgcttcttctttcgggaatgaagcctttcgattccttctgcatcgcattcggaaccgccggaaccggaggttttgcggtgctgaactccggatgtgcggaatacacaccgatggcccagtggattaccacggtgttcatgctgctgttcggcatcaacttcagcgtgtactacatgatggcccacaagcgcttcaaagaggcaattaaaggagaagaactgagggtgtacctgttcatcgtgttcgccagcgtcgccggtatcgcggccaacctgatgcgttccggaagcacgcatccgctgggcaagaacgtgcgggatgcagccttccaggtggcatccatcatcaccaccacgggtttttccaccgcggacttcaacctgtggccggatttctcccaggccatcctgatctgcctgatgttcgtgggcgcctgcgccggcagtaccggcggcggcatcaaggtttctcgaattttgattttattcaaatccgccagacgaaacctccacaacgtattccatccggaggaaattcggaccgtgcggattgacggagagcgggtcagcgagaaaaccattcagcatgttcaggcctacctggcactgtacgtgttcatcgttatcatcagtttcctgctggtgtccctggacccgaaggagttctccatgaccaccaatttctcggcggtaatggctaccttcaataacatcggaccgggcttcgatgcggtgggaccgatgtccaacttctcggcgtacggcgatttctcgaaaatcgtcatgtgcatcgacatgctgttgggccgtctggagatctacccgatcctcaccatgttggcctacagcacctacaaaaaagcgtagaatacggcaaaaacaacgagcggcgactccatacggggcgctgctcttttttgttgcgccgattcgagggagcacgtataatgatgaaaagaagcatcgacgaaagacggaggatgacgttatgtacgagaatggaagaatatatatgggcctggcgggggacaagcgagtggaaatggtgctgaaaatgtgcaaccgccacgggttgatttccggcgccagcggtaccggcaagacggtcaccatgaaggtgatggcggaatccttttccgacgcaggcgtgccggtgttcatgtgcgatgtaaaaggagatgtggcgggcatctgtgcaccggggcagagcacggaggatatggagaagcgcatcgaccgtttcggccttcgagaaacgttctcctatcgggaatatcctaccaccttctgggatatctatcaggagggcggacaccccatccgggtcaccgtcagcgaaatggggccggagcttctcagccggattctgggattgacggatgtgcaggaaggcatccttcatatcgtgttccgcatcgccgatgacaagggccttctgctgaccgacctgaaggatctgcgagtcatgctgaactacgtgagcgagcaccgctcggaatacatgatgacctacggaaacattacgcctcagtcggtggcagccatcctgcgggcgctgctgcctctggagcagcagggcggcgacctgttcttcggagagccggccctggatattcaggattggatccgcaccgatgccgagggtcggggcatgatcaacgtgctggactcggtgaaactggtgcagaatccgacgctgtacgccactttccttctgtggctgctgtcggagctgttcgaaagtctgccggaatccggcgacatggataagccgcgcctggtatttttcttcgatgaggctcacatgctgttccgagatgtgccgaaggtgctgctgcagaaaatcgaacagacggtgaagctgattcgttcccggggcgtgggggtgtatttcgtgacccagagcccgagcgatattccggataccgtgctggctcagctttccaatcgggtgcagcacgccctgcgcgcctacacgccggcggagctgaaggcggtacgcactgccgctcagactttccgggccaatccggaattccggacggaggatgccatcctggagctgggcgtgggggaagcgctgacctccttcctggacgaagagggcgtgccgaccgttgtggagcgtacgaaaatcatttgtccccagagctccatggcgccgccggatcccatgttccgctccaaagccatgctgcacgacggcatggagaagtacgacgactccgtggacaacgagtctgcctacgaggtactgacggcagaggcggtaaaagcagaggccgccgcggaggaggaggccgaccgcaaaatccgagaaaaagaagaggtggcggcgaaaaaacgccttcagaaattagaagatgaggagcggcgccgccaacagaagctggaagatcaggcccttcgcaagaaggagcgccaacaggaaaaagcggaagccgatgcccgccgcagggcggatcggattgaagccgagctgctggccgtgggggccagtgtcctgacccggggcctgctgggggtactgcagaatcagtcgaagaaatagaagttataggtgcaaaaacataggtgcaaaaaggcagattcccacacgaaaggtgtgggaatctgtctttttgggtgtattggttagacggctttgcagacggtgagaggtcatgttggcgccttgctgcccgcaaagccttgatccttcgtcgacaagaaccacgcctttggtctggatgggcctccggccgccatcgcatcccaaaagtgatgcatgagcccttgtttttctactccatacatcacccccattttcaaggttgatgcatgagcccccttttttccatctcatgcatcactccaattgtttctgtgcttattctcttctactttgatttcgcttaagtgaaaaaatgatgtacgcgtccctgttttctacttcccagcattacatacatccggttcccctcgggcatttcatcccaatcttcccggcggtcgcggggaaagtgatgtaggaacctattttcggagcatgcctgcatcacttttcaccaatccccggaaaaaggtccgaattagaggcgcgcgccctcactttcggcgaaacctgaacccgcgccggagcccaataatgaaaagagaggtacgaaggaccgctgccccttcgtacctctctttcatcttcctaattcccgataaggaaggaagatgaaaatcatttccaccaccaacaaaaaaaggtaacattgcggaaaactattccgcatgagccagtcttcttttttctttacgggtttcgattacgtggcgaatggccatgcccggtcggtggaacagcatccgggggccggagaatttcataacttcctgaattcgttctctcatatccttcttgtagcaatgcaccttgcagttagcgcaaaaggtcttggtctccatgaaggggcagaggtcgctgcgctttgcggaataggcatccaactccgcgcattccggacaaagagtgtcaccgccgtgcttcttgcggcagtacaaagaaatcatgtaggaaaccacttctttttccttctcttgttttgcttgtatatccataataaaatgtcctcctgtatgtgctgaaaaactcgctttttggcgagcaacgaggggtagtgtatcacatgcacggtagggatgtcaatttgggggtgggatatagtggattgacaagaaagcatatatcgggtactattaaataacgcaatgcgttattcaagcgggagagtttaatcatgagtagagggaaagacgtaaaagagttaagagaaaaaatgggaatgaacagacgtgaattcagcgattactatggtattccatatcgtactgttcaggattgggaagcggagaaaagagaacttccagagtatttgctcaggcttttaaagtatagagcagagattgaaaaaatgatgaaaaataaaggggacgaataagtgagatatgataaaatagatttggagtcccttcctatgctggattatatattttttaccttgtacataacgcattgcgtatcaattgggaggactaaagaatgaagaaagatatttttcctgcagatcaaataaatgagaaagactataatgcatgggtaaaggaaatcggcgacagatttcggaaaagccaagtaagagctgttgcgaaggtaaatgaggaatcattacgattcaactggtcagtaggtcgagacatagttcttaaagactttaccaatacttatggttccggcttttttgcaaaattcagtaaagacatgaaaaagcagtttccagagataaaatctttttctgttaccagtctacactatatgaaatggtattatgaactttattctggagaagacaatttaccccagcctggggtagattctgtggaacatatcccgtggggacacaataagctgataattgataaatgcaaaacaatcaggaaaaggccctgttttatgtgaggaaaactatagaaaacaattgggccaaaagaactgaagagagccttaatgaataatgtgcaggactttcttatggaattaggcagaggatttgcctttggtggaagagagtatcgattggttgttgttaatttagaatattgaaaaatttcgaaccatatgatatgttggtccaataatatgcataattttgaactaacaaaaaaactgttctagtaatgctcttatttttagacttagaataaattaagttcaataatatagagataattagatcaagaatagcatcggtctaaaaaatgcaataaaagcagattatcgagaggagatatgcaatgagatttgaagagatatatcaaaatgtgccatcaccacatatacctgaaaagcttcccatagaacttggaacagctttatttgacaaggatatcattagacttatttcaaaagcaaataacgcattgggtgcgtatagaggtttccttgtaaacaccatcaatccaatgttattgatttctccattagtatcgcaggaggctgttctttcttcaaaactagaaggcactcatgctaccatagcggattttattaattatgacgcgggtaatgaagtatcgattcccaaagatgaaatgcaagaagttatgaactatagaagtgctcttttttatgcgttggataaaatgtcaacaatatctgacaattctgaagaaggaagacataagcttccactgagtacacgcttgattcgggaaatgcatagaattttattagataatgttcgaggccaggcaaagacaccaggagaatttaaaacggaacagaattatataggcactattaatacaatttcatttacaccgttgccgccagaattaactttagaatatatggcaaatctagaacaatatatacattatgatgagattgatttcttaatacaggcagctctaattcattgtcagtttgaaatgattcatccttttaaagatggaaatggtagaattggaagattattaataccactatttttgtattatagagacatgcttccagtcccaacattctatatgagtgcttattttgaaaaggatcgcaagacgtacttagaaaaattatctgctgtatcaaaggataatgattacgctgcatggattaagtattttctggagggtgttgtagagcaggcggaaataaatacattaaaagcaaaagccatgttggacaaatataatgactataaggaaatttgtttatctgagatgagttcaaagtatgcaattatgcttcttgatgaaatattcaagagaccagcgtttaaggctaaacagcttcaggatataattcccggaagtaagggaaccttatataatatgctagatgaatttgttgataagagtattttggtgaaagatgataaggtgagaaatacgacatatttttgccctgctattttaaacttattataagaagttgtatttaaccgttggactacgctaacagtaggaaacaggccttccttgagcgcgttaccggcgctgtgatataatgaccctgtataaccgtaaaaaatattcgaacagaggagcagcgttatatatgcaaaagaatgagaatcgaaattcaaatatagaagagctgcgcaaagggtttcgcactgcttttatcgatggagaatacaattcgaatctggcatatcggccggaattcttgtcgaacaatgcggcagaggggaagaaagtgctgtccgcgattgagagcgaacttcttcggtgcgacgaattcgccattagcgtggcgttcattaccaacagtggaattgagccttttatgcaaacgttcaaggaattagaacgccgaaatattccggggcgaattttgaccacgaattatctcaatttcagcgatccgaaagcccttcgccgtctgtcaaagctgcagaatctggaaattagaatgtatgtcacggacgatgaatcggaaggttttcataccaagggttatcttttccggaaagatgaaatgtaccgggtaattgtgggcagctccaatatgactttaggggcgctgacacggaaccgagagtggaataccaaaatggtatccaccgagcaaggcgagttccttaccgaaatccgtcaggaattccagcaactgtggacctcggagcggacgcggagtttcgaagattttattgataaatatgaactgctgtacagggagattcagaagcagaagaaggtggcgacccaagggaaggccatcgatttgttgggatatcagctaaaaccaaattcgatgcagctgaacttcatccagaatctgcagaagcttcgggaagaaggagagaatcgagcactactgatctctgctaccggtaccggaaaaacctacgcctccgcattcgcgatgcgagatgcggcgccggggaaagccctctttgtggtacatcgggaacagattgcgaaacaggcgctgaagagttatcaacgagtattgggaaaatacaagccggacggaagtccaattcggtatggcttattgtccggaaatgaaaaggattacgatgcggactatctcttttccaccatgcagatgatgtccaaagaggacgtgttggaaaaattcagaccggaggaatttgattttatctgtatcgacgagacccatcgcgccggtgcggaaagctaccagcggattttggagtactttaaacctcagttcctgctgggtatgactgcgagtccggagcgaacggacaatttcgatatctttgatttgtatgactacaatattgcgtatgaaattcgactgcagcaggcactggaagagaatttgctgtgcccgtttcactatttcggcattacggatttggaaatcgatggagaaacatttgacgatgaatccggccttcggaattttgtcaagctggtgagcgatgaacgcgtagattatattctgaaacaggtggaatattttggctacagcggggaccgggtgaaaggcttggtgttctgcagtcggaaggatgagggcgaagaactggctcggaaattctgtcagcatggttatcgcgcccggatgctgtcgggagatgattctcaggcggtgcgagaagaagtgatcgatcggctggtgagcgatactcgagaggattacctggactacgtgttcacggtggatatcttcaacgaaggcgtggatatcccggaggtgaaccaggtggtgatgctgcgcccgacccaatcaccaatcgtattcgtgcagcagctgggcagaggcctgagaaagtcggatgataaagagttcgtggtgatattggacttcattggaaattataaaaacaatttcatgattccgattgcgttgtcgggcgaccggtcctacaacaaggacacgatgcgccggtatgtcagtgaaggggccagggtgattccgggaagttccaccatccactttgatgagatttcgaaaaaaagaatctatcaggcaatcgattccgcgtcaaccaatgatctgaaaacattgaaggaagcgtacagcaacttaaaacagaagctggggcggattccaaagctgaaggatttctatgattacggaaccattgatgtaacgaaattcttcgataagctgggatcctatcacgaatttctcaagaagtacgaggcggattacacgacggagatgagtgcgaaagaagaggagattctgcagttcatttcccggaaactggcaaagggaaagcggattgatgaattggttgtcttaaaggggttgctggaaaatgaaccgcgaattcagcagtactacaagaaatttatgaaaatccggtataaaacagacgtgcaagacgaggtaacccattccgtgctgagaaatttaacaaatgaattcgcaagaaatgaagatcaaaagaaatttacagcctgtgttttcttaaaggaggacaaagaaaactatgaaattgcatcggaattccagcaattgctttctcacccggaattccgctccgcagttaccgaactggtggattttggtatcgagcgcagttaccgcgaatacggaaaccgatacaaggatacggcgtttcagctatacgcaaaatatacctacgaagacgtatgtcgtcttctgaattgggagcaaaacttgactgctcagaatatcggtggctatttttatgataagcgaacgaaaacccttccggtattcatcaattacgataaagcggaggatgcgattgcatacgaagaccgatttgttacgcctaatcatttgatcgcattgtcgaagcgcccgcgaaaggtaaattccagcgatgccgatcatatttataaacgaaccacggaagatcaagacaatcgtattttcctttttattcggaaagacaaaaacgataacgaggcgaaggagttctactttttgggcgagatctatgcagagggcgatccgcagccgattcagatggcgcagtccaaacgcgatgcgtttgaaatcaactatcggttggatcggccggtgcgggacgatatctatgagtacatcgtagaggaaacggtgtaaaggaggaatcatgaataaaaaaacaaaaataatttcaaaaaatccgagtcaatcgcttgacatccacgggtataggtaagtcataggagtatgtttagcacacaaatcttatcctgataagtgcatgtaaatgtgttttgaataacaacaaaatgacgaatagtgttgtatatactgatgatgtagaggactgcaagtatggatatagaaaataagatgagcgatatacaaaagggatataatgtgaaatctgaagttgaatatcttaaaagcagagtgaagaaacttgaagacgaaaacattcgattaaaaaggctattggatgaagcgggaatcagttacgaatgttcctgcaatcagattccggatatttcacttgaaaaggcaagattgtttttttcatacttttggggaaggtcggacgtatatgctaaaagatatgtcaataaaagtacaggtgtttctggatatttcccgcaatgcagcaacttttggagatatggagtatgccctaaagcgaataggataaaagtgcaatgtaaaaattgtgagaacaaagcatgggttaaactgggggcgaagcaaattgaagcgcatctgagagggagcgcagaagattgctcagatgtaataggtgtttatcctctgtttgcagacggaacctgcagatttttggcttttgatttcgataatcataatagtgacaatgacgattttgggtttgaaagcaatgatataaactggatgtctgaggtaaatgcgcttcgagaaatctgtactctttttgatataccggttctagttgaacgttccagatcagggaaaggagcacatgtatggatattctttgaaaaaccaattgacgcagccattgcgagacagttcggattcacattacttgaaaagggggctgagtatgttaatctgacatcgtttaggtattatgacagaatgctgcccgcacaggaagaattaaaagatggcggtattggaaatcttatagcgcttccattgcagggaaaggccgtgaaaaaagggaacagcgtatttgtaaataatacgtgggagccatatgataatcagtggcagattttaaaaggtacaaagcagctcagcgaggcggatgtgaaggggtttcttgaaagaaataaatcaaacgaggaaaatacagataattcttgtgcggataaaccttggcaaagaaataaacactttctgaaatcagattgtgacggcacaattcatgcgattatatctaactgcatatatattgacaaaacaaatctgaaaccaagaatacaaaatcaaataagaagaattgcagctgtttcaaaccctacatatttcaagaataaggcaatgggattatctaattttaataattcccgatacatctatatgggatatgatgattctggctacatctgtatccctcgagggctatttgatgaaattgaaagaaaatgccaagaagatgagatagatttaactgtcttggatgaaagatgcgaaggtaggaaactgagagtttcttttagcggtcagcttagagaagaacagcaaaaggcggtagattatttcaaggataaggatactggtatactcagtgcagctacagcgtttggtaaaacagttgtatgcagtaatatcattgcaacaaagaaggtgagtacactgattttattggagtcgtctgctttgattgagcaatggcaggatgcactggaaacatttctggatataaacgaggaattaccggagtatttaacaaaaacaggcagaataaagaaaagaaaaagtcttattggagtaatacatgggtccaaggatacttcaactgggataattgatattgcaatggtgggatcgctaaagaaaaaaggcgaatttcatgaacgtcttaaatcttatggaatggttatagtagatgaatgccaccatagtgcgtcagataccatgagtgaagtattgatggaagtatgtgctaaatatgtatatggtgttacggcgacaccattccggggagatggccttgaaaagatcaacaatatgctgctggggcctataagatttcagtatacagcaaaagaaaaggctgaatcacaaggaattgaccatattgtaatcccaagatttacaagggttgttaatccacatggacagaataagatgcatataaatgatgcgtatgaaattctgagaagcagcagtgtcagaaatgagcagatttgcgaggatattcgtaaatgtatttctgagggaagaacacctgttgtgctgagcaaatttgtagagcatgcagaattaatatatgacaatataaaaaattatgccgacaaagtattcttattaacaggttcacagacgagaaaacagcaaaagatgattcgtcaggaaatgaatagcataagtaatgatgaatcaatgattcttgttgcaacgggacaacttgttggagaggggtttgatttccctaggttggatacactaattatggctactcctgttgcgtggaagggtctggtggagcagtacgcaggcagattaaacagagattatgaagggaaagaaaatgtagttatatttgactatattgattcgaatattagagtattcgataatatgtatgcgaaaaggcttaaagcttataagagaataggatactctcttcagggtgaacctgatattcagaagcagaaggcaaatgcaatatatgattacgaatcgtatgctgaagtatattgcagagatttagcagatgcgaagacaagcatagtggtttcaagcccatcgcttagatacagaaaggtcaatacgtttataagtgatatgaaacctttgcaggaaaaaggcgtaacaattacagtgttgacatggaatcctgattcgtataacttcggcagttcgattcacaagatggagattcttagaactctaaacgaagccggcattgaagtggtattgaaggaagaaaattgtctgcattttgcggtaattgataattcgattgtatggtatggaagcttgaatcttctcggaaaagaagatgttgaagacgatataatgagaatagacaacgatgaaattgcagcggaactgttcgaattgagttttgggagaagtcagtgatggatatcaaaaagttgattggagagacaaccgaatacgacaagaaacagtcagtagagatacgaagaccaaagagttggcttaagagtgtgagcgccttcgctaatggtgacggtggatatcttatttttggaattgctgacgacggtactgttgttggtttgcttgatgctgaaaaagatgccgaagccataagtgaaagaatcaaagcaagaatggatcctataccggaatttttcttgagttttgaagaggaagaggataaaactcttattatacttaaaataagcaaaggggaagaaacaccatactattattccggggatggaacactcgaaacgtttgtacgtgttggaaacgaaagtgtcaaagcaacagcaacggaacagaaacgccttgttatgagaggaaagaatagctcatacgattctcaggtatcttcttatgttaaggatgactttgcatttactaaacttcgtgcaagatacaaaaagtggacaggtaagagttttgaagataaagatatgatatcctttgggcttgtagaagcatcgggaaagttgacaaatgcaggggctcttctggcagacgatagcccgattaggtggtcaagattattctgtacacgttggaatggactgaataaaagcggaggtacaatagatgcggtagatgatgctgagttctctggaagtcttatctatctgcttgagaacggagaagaatttataaaacgtaactgtagaaagatgtggagaaaaactccaaactccagagaagaaatgccggaatatgtagagcgcagctatcatgaggtcctaatcaatgcactcgctcatagggattatcttgtcaatggcagtgaagtgcatattgatatctttgacgaccgtatggagatttattctccaggaggtatggcggacggtattgcaattcaggacagagacccactgtcagttccatcaacaagaagaaatcctctgcttgcggacatattcgaaaggcttggatacatggaacgaaaaggtagcggatttgggaagattattgattcgtatgagtttcaggtgaattatacagaggataaaaagccatatttccgctctgacagagcaggctttgtcgctattatgccgaacctgaattatgatgtccctcaaggtgtcccccaaggtgaccctcaagatgtccctcaagatggtacaatcgatgagaggataatagcacttataattaaagattcgtcaatttcaacggaacaaatggcagcgtttataggggttagtgccaaaactataaaaagacatataaagaaaatgaacaacataaaatatgtcggtagcggctacagcggtcactgggagatagaagaataactgaataaaaaccactgtcaatggcttgacatccaccggtaccggaaaaacctatgccgccgcattcgcgatgcgagatgcggcgccgggaaaagccctccgatgccgatcatatttataaacgaactatcgtagaggaaacggtgtaaaggaggaatcatgaataaaaaaacaatatccgttgtggcggcggtgattcgggacggcgagcgggtgttcgcgactcagcggggatatggagaattcaaggatggctgggaatttcccggcggaaaaatcgagccgggcgaaacagcggaagaggctttggtacgggaaattagggaagagttggataccgagatttctgtgggaaaactgattgatcggatcgaatacgattatccgacgttccatctgaacatggactgtttttggtgcgaaatcctgtctggagacccggtgctgaaagaagcggaggatgcaaaatggctgaccaaggagacgctggacagcgtggactggctgccggcggatatcactttgattgagcagattcgggaggaattggacatggatacgaagaagacagagacaccaagggacatcgactcgaaaattatcaatgtagtaaacgcaatggatttttcagacggttttgctgtagaagaaatctctgaacgcgcactgaacaaggccaagaagattccgatatcaaatcttgcgttgttggggaccgctttttcgcagatgtcggaagccgcccgtacaaccgtcacaacggtcaccagtgagataaagatggagaatttgtttgtgggaatttggccggaaggtgccaatgggagattgtctatcaatgaaattggtgctacggtgggcaatattatgggagagaaaggcattgattcacggatgaggttcaagccaatcggcgaagtccctatggaaaatataataacttccattaagccaataaatcccacaatgatagcaattgccgtggcactgatggaaataaaccggaagctggatggaatccagatcagcatcgatgaggtgctccggttcctggaaaccgacaagcaggcgaagcagcggggcaatctgcaaacccttgcggaaatcatggaagatttcaagcgaaaagggaacgatgcggatttctgcaagagcaaaaatcacacggtacaggaaattcagcgggacgcgagacaagacattgaattctacaaaacgagaatcgaaacggccgtaaaggagaaaaagacctttcattcgcaaaaggacgtccgcgaatatgtgggttccattacgacgagttttgccgagtatcagctggcctgctatctgtatgcgtacagcacattcttagataccgttctgcgaaaagattttgtggaagggtctatcgacagctgccgcaacaaaatcactcgcatcgcggaagactatgatgcgctgttccgggagtgccgcgcgcagattgcatcttatcaaagaagttccgtcgggaataaaatggtgggcggcatcggcaaaaccgccgatacgctgggcaaagccatccgaagcattccgttaatcgaaaaaggtccggtggacgaactgctgctggacgccggggatgttctgcgggatgtgaataaagacaccgtcaaagcccaagtgaacaatctggaagttcttgagaacaaccgaatgggagatttcctgaacggaattggcgtcgtgggtgcgctgtgcaaccgaaagagtgcaatgataacggacggaatgaatctgtacgtttttgactcggaaactgtgtagtcgtgtttcaggatagccattgagccgccggccggaatcctgtataatgaaacgagtacggaaacggtacgaaagcggatgatatgatgaattgtatttttaggaaaaggaaggtaatggtacatgaaaattgcagtaacatacgataaggataacggaaccgtattccagcattttggacattccgaagcgttcaaggtatatcaggtggaagacggcgaagtgggtgccggtgaagtgatgggtaccgacggtgccggacacgaggcgctggcaggtgtgctgaagaatcacgacattgacgtgctgctttgcggtggcatgggcagcggtgcgcaggcggcgctggcagaggccggaatcgaagtgtgctccggtgtgaccggcgatgcggatcaggcagtggtagattatttggcaggaaagctggagtctgcgggcgtgaactgcgatcaccacgatcacgagcacggccacgatgaagatggcggctgcggacactgcggcggtggttgcggaagttcttgcggcggctgtggaagccaggagctggagattcttttcccgggaaagaatgccggcaagaaggtaaaaacacattacgacggaaccctgaatgacggcacgaagttcgattcctcttatgacagaggggaaccgctggaattcgtgtgcggcgtgggcatgatgattccgggcttcgataaagcggttgtggaaatgaatccgggcgacgtggtgaatgttcacctgacaccggaagaagcatacggcgagagaacggaacaggcgattttcaccgtggagcagagccagatgccgggctgcgagcagttcaataccggtgacaaggtgttcctgcagaatgcattcggacagccgttcccggcagtgatcgcagcgaaggacgagacgaccatcaccttcgacgctaaccatgagctggccggccaggaactgaacttcaagattgagctgctggaagtagcggaatagggataattgaaaatgaagagagaaaagcaccgagcagcgattgcactgcccggtgcttttcgttagggggaggagccgccggcatgtctgggcgtgtgcggccggcgggaatgtgaagattttgctccccgaaacggaggcacaaggcctagcggggagcggggagcaaagagaggaggccgccggtcgcgcagaaaaatcgggagcccagttggaaggttgaattgagataaagcaaaagcggactggcattggcggcccgcttttgctatccttcttatttaatttttatgccgggttcacgtgaaccatgcagtgttttacatttgggaaatcctgttcgatatcgtcgtgtacctgctgagcgatatcgtgggcttcatacaggctcagggaaccttccgcctggatttccacatccacgtagatcatggaaccgaaatcccgtgtccgaagaacgtcgatgccttccacacccggaacggcgaggatggttttccggagggcgttgaccaccggatcgctgcaggcatggtcggtcatcttggagatggcatccaggaagatgtcgaaagctgcttttaggataaagaagctgatgatgacgctggccagagggtccatgattgggaaacccaagcgggcgcccaggatacccacgaaacttcccaccgaggacagggcgtcggagcggtggtgccaggcatcggccatgagggccgaggagcggatttttttggcattgattcgggtgtaccagaacatgccttctttggtgacgatggagatgacggccgcagccagggccagtttgccgggaacggtgaggtgcaggtagctgctgcccacgatgttccgaagaccctcaataccgattgcggcgccggtgagtcccagcatgacggacagcacgatggaggccacgcattcgaagcggtcatgcccgtaggggtgattccggtccggggctttgcccgccattttgacgccgatcatgacgatgatggtgctgatgacgtccgatgcggaatggatggcatcggaaatcatggcgccggagtgggcgatgattcccgcaaccagtttgaatgcggtcagaacgatattcagtgccatgctgcgggcggacacccgcatggcgacggcttcgttttctttcagttgagcctgatttcggctttcttttttcatttaaaacacttcctttttcgagcgtatatataattataattcttgtattctatacctcggacacaccgttagacaagaaaaacccgaaattgtttttagaatagaacgaaatagaacgaagaaaaaggatgccgccgaagcagcatcctttctcgaaagatatgtgtgttataggtaggtgtttgcttagttgttcttggatggggatggagtcggttcgcatactgcggtgtagtgtgctttacgagccttgaactccggatccttgtacaggttcatcagacggccctcgttctcaaagatatcgtcgccgtgggctttcttgccggagatggtatcgtgagcgtgccattcggtagccgggtcgaactccagcttgaatgcgccatccttgattttcagcgtaccctgcaggccgcacagctcgcactctgcggttgtggtacccggatagatgtagaacgcattgccctggcagtgcggacatgcaccttccttacccttccagtaggacttctcggtcagctctgcgattgggaattcgtggcagtttgcattatcttcgataatctgctgtgctgcctccaccaggttgcggccgatttccttcatgcgctctaccttgtcatcctgcatgattacgtccttggaccaggagaagaagtcgttgtcgataaccttccagcccgggctcattgccagcattgcgtggtcggtctcaacacgaacggcccagtcggatccgccgatgcctacgaa

SEQ ID NO: 2254 - DNA, 4625 bp, Unknown
  16S sequences of unknown bacteria
ctatacctaatttcctttcccacatttttccgaagatatttgaaaatgttccttgacaaatccggaaacatattgtataatagtatattaataagagattttccgaagatgccatataaccgaaaggagcaaaatttatggtgaatatgaatccgtccgaaaagttcgtcaaggaggggcttaccttcgacgacgtactcctcatccccgcgaagagcgaggtcacaccgaacatgatcaacctcgagacaaagctcacgaagtcgatcaagctgaacatcccgctgatgagcgcggcgatggacaccgtcaccgagtcccgcctcgcgatagccatggcgcgtgagggcggcgtcggcgtcatccacaagaatatgccgatcgagaagcaggtcgacgaggtcgagagggtcaagagaagcgagaacggcgtcatagtcaatcccttcttcctctccccggacaactacgtctatgaggcggacgagctgatgggcaagtacaagatcagcggcgtgccgatctgcgacgaggagagacacctcgtcggaatcataaccaaccgcgatatgcgcttcctcgacaatcaccagatgaagatcaaggaagtcatgacgaaggacaacctcgtcacagctccggtcggaaccaccctcgccgaggcgcaggaaatcctgagaaagcacaagatcgagaaactcccgatcgtcgacgacaaattcatcctccgcggactcatcaccatcaaggacatcgaaaaggcgacaaagtacccgcactcctgcaaggacaagaacggcagacttctctgcggcgcggctatcggcgtgaccgccgacgtacttgacagagccagagcgcttctgtcggtcggcgcggacttcctcgtcctcgactccgctcacggtcactctaagaacatcatcgcgtgcgtcgacaaagtgaaatccgcgttcccgcaggcgcaggtcatcgcgggcaacatcgcgaccgccgcggctgccaaggacctcatcagcgccggcgccgacgcagtcaaggtcggtatcggacccggctctatctgcacgacccgtgtagtcgccggcatcggcgttccgcaggtcacagcaatctatgacgccgcgtgtgcggcggcagaatccggcgtcccgtgcatagccgacggcggaatcaagtactccggagacatagtcaaagctctcgcggcaggcgcgaacgtcatcatgatcggctcgctcttcgccggctgcgaagaatcccccggaaccaccgaaatctatcagggacgctccttcaaagtctaccgcggcatgggctcgctcgcagcgatggaacacggctcaaaggacagatacttccaggaaaacgcgagaaagctcgttccggaaggcgtcgaaggacgcgttccgtacaagggaccgctcagcgaaaccgtcttccagctcctcggcggcatccgctccggtatgggctactgcggcaccccgaccatccccgaactccaggaaagaggtcagttcgtaagaatcaccggcgccggtctcagagaatcgcatccgcacgacattaatataacaaaggaagctccgaactactcagttcagactaatctttaatcaaacagggcacgaccccatccgggttcgtgccctttattaaaaaaaggagaaatcatcatgaaaaaacgattcctcgcgctcatcctcgcactcgcaatgtgcctcccgctcgccctcgccgtctcggccgacgaagccggcggcgtcgcggctaccgtcctgaacttcggctacaatatgacaaacgccgaaggctacacagacatcacgatcaccctctacaccggaagcgaagatatcagagaagtcacctccgccgatatccagacccacaagccctactacatactcaccgacgcgaacggcaataccgtgaagaaagaaaacatcacctccgcgaccttctcgctccacctcacagacccgggcgaatacgagctcgcgatctacgattcaaccggaacgagacagggcagacccaccctcgtcgacggaaactatttcttcgacgactcgccgatttccatcactgtcagtgaagcgtacgtggatccgggagacaatatcgatcatccggaaattctcgacgtaagctatcagacgacgacctccgccgacggtatgaccgtcacggtcgacctctggttcacccgcgtcgacgatccgtcgctcccgatcgattccgacttcatcaaggcgaacaacccgtctgtcgtcatcaccgaccgcttcggacgcttcgtagacgcccgcgccgtaacaagcgggagcatgagcttcaacctcatcggcccgagattctacgacatagtaacaaccgacggcgacggctacggtcagcctgtcgcgggtcttgacggcgacgtcataaccgtgaacgtcggcaccgacgactacaaaataacaaaaaccctcgcggctctcgccgacaagtggtcaaaaaccctcctcgagagaaacgccgaatacgccgaaatcgatgacgacgcggaagacttgaaatacgatctcgaactctcaatcctcagcccgttcatatacgaactcgattcggaagacatcaccaccttcgacctcaccctcgacgaagccctcacaatcgccgaagaaacagcggactacgacgaaaccagactgaccctcgtatacgccatccgcgacaactggtacgcggttgacgacgccttcggaatgtacatgatggacaaagaaggctacggagaggaaatcaccgaaccggacatccccgaaatcaccttcgacgacgtcgcggacggcgcctggtacgcggattacgttaagatggcggcggacgccggtctcatcaagggcaagggcgaaggaaagttcgctccggacgacaacatgacgatagccgaggcgataactctcgcgtcccgcttcaacaacctcctgcatgagatcgagactgaccccgcggacggaaagaccggggaaaagtggtacgatccctacatcgagtacgcgaaggagaatagcctcccgtacgattacgccgattataacgcgaagatcacccgcgaggagttcgcgcacattttcgcggctctctacaagaataataagtcactctacgacgagggagagataaccgagatcaacgacgttccggagaatttcatccccgacgttccgatgacgcataagtactcggacgacatttacacgctctacagactcggagtcctcggcggaagcgacgagaagagaagcttcctgccggattcgaacataaagcgctccgaggtcgccgctattctttgcagaatgggcggagagggcagagtcgagttctgataaaacggagggacaacgatgaagagaagattcctcgcgatgatcatggcggtcgtcatgtgtctttcgcttgcgtccggggcgtcggcgtacagcagcagcaaaatagaggacgtcacgccgatcatctggaactgcgaattgagctattatgacggcaggacggttgtcgaagtaagattgtacgactccgattacggtcagctcgacaaggagacgctcatcaagtatcagccgtactatgtcgtgacggacgattccggcaatacggtaatcaagagacatttcaactccgacaggttctctcttgagctgaccgaaccaggagactactttttcacggtttacgactccaccggcaagaggatggggatgaggtgggattatccggatggaagcgtctatttctatgacgaccctctcgatttcttcgtgagagagggaaagtccgacagtcagaaggacgacgcgtacagagataagtccgcggttctcgacgtcagctgtctgcgctccgacgtgtacgggaccgacaatacgaaggttgatctctggctctggttcacgcgcacggacgacccggagcttccgattgacgatgagtttctggagaagaacgcgccttatgtggaggtcagtgatttctacggtccggtttttgatccggatgctgtcaggtatgaaattaccggagacagtatgcacctgactgtggatggtccgggtcttttcgaggtcaacgtgtacgataaggaacggacgaagcagagcgccggcgagtatttgccgatgcgtgtcgctatagccggtaaaaaccgcgtggttgaccatgcgcttgcggacagatgggcggatgttcttcttgagaagcatactgattattataccgcgtatgaccgcgataagttcgcggaggcggtgcttatgagtttctggaagatgcttggcgtcgaggacgtatatctgtttgatctttgtcttgacgaggctgttgaaaaagcggtggtgccgtatgaggaggtaaaaatttgcaattattatgctcttgtctgcgcgattatcaataatcgggagcttgtggatattgccaggagcaggtactggagcatggtcaggatggcggaggacagtgtcttcactgacgtcaccgacgatatctggtacgcaccatacgtgaagtccgcggcgaggtccggtcttgtcaaggggaagtccgagggagtcttcgctccggacgccaacatg

SEQ ID NO: 2255 - DNA, 7007 bp, Unknown
  16S sequences of unknown bacteria
ccctgccgttttcccttatggccgctgacgccgcagcgaggcgcatacgctgcccagacattcgctcagctcatgcgggaggatgctcatcgtatcgcaatgcgctgccagatgacgggccgccgccgcatgcagatacacgccggcgcaggcgctctcaaacgcctgtcttccctgcgcgtacagaccggcgatgatcccgcacagcacatcgccgctgccgcctttcgccaagccgtcattgccggtgatgttcactgcctgacgcgattcctgcacgatccaggtgaagtcatctttggccgcgacgcacagataaggatagcgctgtgccagcgtgagcgcgcattgacgcggatcgcggctgatctgcgaaagcgggatgccgctgagatattccagctcccgcagatgcggcgtcacgatgagcgcgctgtcgcgatgcgtcgggagcagcccgtgcatgcccgcctcatacagggcatcgccatcgaggatgcagggcaccccgctgtccagcaccagctgcacggcggcccgggtggagctgccccgtcccatgccgttgccgatcacgatgagatcgaacccgcgcagctgctcgggctgcggaagcgcgctgacggcgatctgcccgttctcatccatcgccagcggacgatacatcgcctcagggatggcagaggcgacgatgtcatgaatgcccgccgggatcatgcaggtgagcaggccggcaccggcacgcaggatcgcctgcgcgcacagccggggcgcaccgctcatgttcaggctgccggcgatgagcagcaccctgccatatgtgcccttgtgcgaatgaggcatgcgccgcggaagcatggcccgcacgcgctcatcatccagcacgatcgccggatccgcgcactggaccgccgccggcggcatgccgatggggcgcacttcgatctttccgcaccattcgcgctgcggaagcctcagcatcgcatccttcagacagacaaaggtgacggtcagctccgccttcaccgtatgggcgctcatccattccccgtccgcatgcatgccgctggggatatcgaccgcggccacaggcttcccgctctcgattaaccgatcggccagcgcggcgtccgctccgctcatctctctgctgattccggtgccgaacagcgcatccaccagcacatcgctgtccgcgatcacctcatccgcctgatccatcctcgcgatgcgcacgcccttctctgccgcgcgctctgcgtaaacggccgcgccaggggaaagctgtccatcacgggcacagatggtcagcgacatgccggcatccgccatcagctcgcccagcgcatagccgtctccgccattgttcccgcagccgcaaaagatgccataacggcatgtgcgcccataatgcgcacacagcgcatccagcatcgcctgcgctgccctctgcatcagttccgtctccgatatgccgtgcgcatggaccgcccgctgatccatcgcccgcatttccgccgctgttgcacacttcatccgatcactctcctgtccttattatataaagcgcatcagcgttttccaagcgccctgttctttttttcaacaaaccgttacaattcttgaaactgtgctataatatacctattgtccggaaagaagggaacgagatgaagaagacaatcgttttgggtgtctgcggagggatcgccgcgttcaaggcggcgcagctgacgagcgacctgatcaaagcaggctatgacgtggaggtcatcatgaccgagaatgccacacagttcgtggctccgctgacctttgaggccctgatcagccacaatgtggtcgtggatacattcgaaaaggtccagaaccgcagcatccatcacatctccctggccaagaaggcagacctgttcatcctggttccggccagtgccaacgtgatcgccaaggtggcgcacggcatcgcggatgacatgctcacgacgacctttctcgcctgcagccggcagaaggtcatctgtccggccatgaacacacagatgtatgaaaacccgatcacccagcgcaacctgcagctgtgccgggaatacggttatgatatcctggagccggcaagcggccatctggcctgcggcgacagcggcaaaggcaagctgtgcgatctcagcgtcatcatgaattatgtggaacgcttcttccaccgcggagatcagctgaagggacgccgcgtcctcatcaccgccggcccgacccaggaagcgctcgatccggtgcgttacctcactaaccactcatccggaaagatgggctatgcgctcgcgcaggcagcgctggacttgggggcagaggtcacgctcatcagcggtccggtgcagctgcagccgcccgcacaggcgcaggtgatccgcgtgaccaccgcagtggagatgttcgaagccgtgcgcgcgcactatgagacggcggacttcatcattaaggcagcagcggtcggcgattaccgtccgctgcacgtcagcgagcagaagatcaagaaggaaggcgacagcctgcgggtggaattcgtcaagaacccggatatcctcgcttatgtgggcacgcacaagcagcctcatcaggtgctgtgcggctttgccatggagacgcagaacctgctggaaaacgccatgggcaagctttccgccaaacactgcgacatgatcgtggccaatgacctgcacacagaaggcgcaggctttcagggcgacaccaacatcgccaccattctcgatcaggaaggcgcgcatccgtgcgcaaagatgagcaaatacgagctcggcatcaagatcctcgagcacatgctcacgctgaacagggggaaatgaacatgctgtttgtcatcgatatcggaaacaccaacatcacgatcggtctctatgaaggggaccggctgaagcatacataccgcctgacgacgaagatgaagcgcacgagcgatgagtacgggttcatgctgaccaacttcatgaatgacgcgggcgtcgtgagcagcgatgtcgaagatgtgatcatcgccagcgtcgtgcccaaggtcatgcattcgttccgcaactgcatccgcaaatatctgcacaaggaaccgatcatcatcggtcccggcgtgcgcaccggcatctccgtgcagatggagaaccccaaggccgtcggcgcagaccgcatcgtcgactgtgccggcgcctactatgtctatggcggaccggcgctgatcgtggatttcggcacggcgaccacctttgattatgtagatgaaaacggcgtgttcagctacggcgtcatcgccctgggcgtagagtccggcgccaacgcgctgtggtcgcagacggcacagctgccggaggtcgagatcaaatcgccagggacgatcctgaccaagaacacctccagcaacatgcaggccggtctgttctacggctttctcggccagaccgaatacatcatccgccagttcaagaaagagctgggccgcgaggacatcaaggtcatcgcgaccggcggcttaggcaagatcatctatcggcataccgatctgatcgacgtctatgaccgcgatctgaccttcaagggactcaagatcatctacgagcgctgcaaagagacaaagcgatgaacggaaggcttcggccttctttttttcgtggtacgaaaaaaagaaccgaacgccatgttcagttccgtttgattcatcgtttggcactgcggatccacttcttgaccttgctcatctccttggtgagcaccttgtagtccttcagcttccactcccaattcggggaacctaaggtgcccggacggttcatatgcccttctgccttcagccccaggatatcctgcaccggaatgatgacacagtccgcgtcacaatccagcgcgaaatggacgagcagatcgtggaaattgcgttcgcgatagtcgcggttatggaagaatcggcgcagcgcgatgcggcggttgtgcgtaaatttgccatacgcctcttccgccgtgtcattgtcatgcgtcccggtatagacgatgctgtttttggcggccggcttcttgagcagcttaggctccatgcgaaacagcagcacatccatgcccggcaggccgttggcatccttcagctccgtcacttccggacggatctccccgagatcttccgccaccagctcgatatccggcagacaagcgtagatgcgatcaaagaacgcctgctgcggcccttcgacccattcgccctcgatggcggtctcacaggaagcagggatcttccagtatgtgtcaaacgctcggaaatggtcgatccgcacgatatcatagcactcgttctgccacgccaaacggcgcacccagaactcatacttgtccttttccatctgtttccagtcatagatcggattgccccagcgctgcccgctctcagagaaataatccggaggtacgccggcgacatagctgggcgtgccatcttcttccagcaggaagcagtcgcggttcacccagacgtccacgctgtccagccccacatagaacgggatatcgcccatgatgcggatccccttctcatgcgcatggtcgcggatctccacccactgcgtgtaaaacatgtactgcaggaacttctcatagaagatatcgttcccatacggctccagatcgatgctgcggcgcttcggccattcccgcatctccaaaggccattccgtccacgccttcatcccgttcagcttcttgaacgtgatgaataccgcataatcctccagccactcacattccctgcagaagcagtcatactcctgctggaatgaagcgaagttctttttgaattcatagaatgccttgcggaaatacgtttccttgaaagcgcgcacttcgtcatagctgacgctctccttgaatttgttcagatttctgatgctgctctgctttaacagtccgatctcgctcagccgatcgatgttgatgaacaacggatctcccgcaaacgaggaaaacggctgatacggggaatttccatagcccagcgcctgcgtcggcagcagctgccagatcgtgaatcccgctctggcgatcatgtcgatgaacattctcgtcttccgtccgaaatcgccgattccctgatttcccggcagcgatgatacggcggccaggattcctgcacagcgttccaaatctctcaccctccttctgtttttattcaatgaaagtaaagcgttttcatattcaatatgatagcacaacttgatgctgatgaaaagagcgcgcaaaagaaaagagcacggttttcgtgactctattcttcgcggttgagcagcttcatatttttcaggtcatggatcatcaggcgggcgtcgcggtccagcttcttcatcttgcgatagagattgggatcctccacctgcctgagccgttcctcgagaaggttcacatagcactgcagctcctgaatgtctttctccagcttctcatcattgatccggcagaatttttccactttcttcttcacatgccacaccccattacatcaaagagtatagcatctttgagacagaaacgaaaaccggatgcataaaaaacccgaagggcgtcatcatcggccctccggctgtttccgttatccctggaccggatgtgcgtccagcatcgccagctgataatcgatcagatccttcagcagcttgatggagatgttgacctcctcctcggtcatctccttgatcacttgataattgtcctgcagcacatccttgcgcacattataatgctcgctcaaataatgcacccaggtctccgcgtccttgacctgctgcttcgtgatgatgccctcgctgatcaccacaccgctgaacgcattgcagcggatcggcatggaccatttgaccaggccggcatggcacgaatacatgcacaccttgtctgattgcagcgcattgcggtagttttcgctcgtgcactcctcgcagtgacgcagcgcggccgcgctcgtcttcaggcacttgcagaaataattcttttcggcagcgctgttgatgtcgtcttcatcttcgatcaggtagctgcgcagcccggtaatggcgcggtattctttcagcgcagtgatgatcgcttcctttgcattcattgaaagccctcccttttgtaaataaatatagcacaattcgacaaaaatcactataccttcaccatataatctgcatgttcctcacacgggcagtaaaaaagccgcggcaagcgcggcatgcttcagcttctgtctatcctgcgctgcatgatccatgccaggatcagcgcgcacccttccgcaaaggtgatcgtcagccagatgccgttttcctgaaacagcgcatagagcagcgccatgccgatgaaggcgaacagcgtgcctttgagcaaggcgagcaaagtggcgcatcgtccctgctcgatcgactggaaataatacatgatgaccgtattcagcgcagagaacggcagtgaggagaaatacagcacgatgccggctgcgcctaacgcgatcacggcacggtcatgattggcgaagaaggccgccagctgtgtcggaaagaacagacagagggcatagagcgcgagcgcaaagagcagcgaagagatcagcgcgatgcgcagcgtctgcttcacccggcgcatgtcgccggccccgtaattatgcgagatgatgggctgggccgcctggccaaaggccccgaacagccctttgagcacataagcgatgttggcgacgatggcatatgccgccaggaacacctcatcgctgacggccaggatcacggcgttgaacacgaagatgatcacgccggcgctcagctccagcacgccgctgcccgcgccgttgctcagcatgcgccgaaacagcgcgccgtccatcgcaaagcggcagaaatgcagctggttgcgcttcaggatgaaatgaaaggccgtgatgatcagcgtgatcatcggcgacagcgcagtggcggctgccgcgccgg

SEQ ID NO: 2256 - DNA, 13843 bp, Unknown
  16S sequences of unknown bacteria
tcttgctgcctcttcgatagcagttctgtgtgtgaatcctgctacagcttcagcagtatatgccgcttttactactttactcaatgtaactcctcctttaaatgtatatatcatcaatgagaaaccggcgaaggatcactccttcgtcggttttattaacttgttgctgttcagtttatcttaataatattagaattcgtcgcttgcgtcgcatttaagaactgcattaagagttgctgttgcgatagctgtgcagtcttcgtctgatacgtgttcaggttcgcagtgtgataaaccgtctttagttcttgcaaataacatagttgtaggtatcatgtatgcacagaactgagcatcgtgtccggcacctgataagatcttctgccatttagctcccatttcttccattgattcttctacgaatccaactaatctcttatcgaagtatacagtatctcttacccactgttcttcgatatctgatgtgcactggcaccaatcctgagctgccatttctttaagaatatccatacagtgttttcttacctctggatttggatgtcttacgtcaagtgagaattcagcttcatcgttgatgcaagtatggattccagggtgaacatagatttcacctgttgtatatacgaattcaggttcgcctttcttaactacttctgcattgtattcatcatatcttttgtgcatttcacataagaaagctgctgctgcataaagagcatcatgtctcttagccattgggaaggtacctgcatgagctgtaaatccatggaatcttactctgtagttgaacatacccattactaactgtacagcaccgatttcattgccgttgtcttccaggataggtccctgttcaaggtgtgcttcaaacattgcacagtatttgtcagggctgattctgttttctttaggacccttaaacttagttgcagctaaagcttcaccaaagtttgcatatggagattcgtccattggctttgaagccatcatattgtcatattcaaagttaacagcgagttcctttggaagatagtcgtggcagatgatacctgataccatcattgcaggcggatataatgaaccttcttcgtttgtccagatcatagctgttaacgggtgtttatgaggaatattctcagcaaccactgtttcaagaacttccatacctgtcataacgcctaagataccatcgtagttaccaccgtttttaactgagtcgcagtgtgaacccataacgattctcttagcatttggatctgaaccttcgattgttgcatacatgcaagctacgtcgtcgcactcaaccttggcaccgattgcttccattcttctcttgaattcttctcttgccatatgagcttctgctgaaagtgaatatctggtaattccaccatgtccagcatcaccgaactttgacattgttttgattttgtctgacattctttctaaactacacttatacataattcatcctccttgaatctatataatttaataacacaattcaaatccagtattgaaactggttacatttaaatactatcacattttataaaaaatgcaagtgccaaagataaactgtctttaacaatatgcgtattttaaaaggttttggatagaaattttaaaaaaaagttttttcagacaaaaaacaggctgctattttgaacaaatagcagccaatcttatagcaaactagtatatttttgttttatagctttaattcaagctttttttccggacagataaatgtgcataatccgcagccggtgcagtatctgtcattaacctcaactccgcctgcatttctggttattgcaccgtacatacacgccgcctcgcacctgcggcactctgtttcacaaggtatatcatctatattgcagattacaggctcggctttcatttcatcgaaagatttcattttttcgagggccagtcctcttatctgctccacatctgagatgtttttttcctctgcccacatttcaagctctctgcttatctctcttatcttctcgggaccgtttatcataaccgctgttcctatctgtacggcagaggctcccagcattatatattcaagcacattcctgtaattttcaatgcctccgataccgcacaccggcacatctacggcctgtgcaatagacgctaccgcggcaagtcctataggtcttataggcgctcccgaatagcctccgtaggtaggaagcataggtcttgcattttctatatcaacccccagtatgcatctgatggtgttgatagcgcttatggcagcggcgcccgcctcttttgcggcctttgcaactgccgttatgttggttgcagtctgtgaaagcttgaccattacaggtatttttacggtcgatacaacctcctttgttatttcaaacacaacatctgcgtgagaggccgcaacctctaaagattctcccataggattggaaatgcttatttctatggcgtcggctccgaagcgctccattttggcagcaagataagcaacctcagacggagtatgagccgacacactggcaattacaatgccgccgccgcttttggcaatctgcatttctctctcccagccctctacctgtatgtcactgtacagtcttatgttctgcgcgcctttgccgtcatatgcaattcggggacttacatccattatggcatcgcttactatactctcggttataactgctcccgcgccggcttcgatggcctttctgatgctgtgtccgtctttgttccacggacctgcagctacgatcagggggtttttcatattaaggttcaaaaagtcggttttcatcagaacatttctcctattctttctttgtgtccgcacgattttcttattttgagcttaggcagaagaagtatttcttttttggtactgccaaaggcatcgtcctctccctctatgaagtcaaacagaagtcttgctcccataactcccattttgtggagaggtttttccattgtagtaagcttaggtgtaacaaggtttgacattctgatgttgtcaaagcccaccaacgctatatcggaaggtattgaaagtccgctgtccgctgccgcatcaatcactccgaaagcaagggtatcgcttgtcgcaagaattgcttcgggacgctctttcatctcaaagaatttcctggctcctatatacccgccctctattgtattcggagcatacactatatgctcgggtttcagatcaagtccgaaatcaactatggcctgccgaaatccctccagtttatgtctgttttctgcaagtggcgtcctaccgcagagcattcctattgatttatagcctatgttcacaaaatgttcaactactcttgcagccgcatcggtactgtctattctgaccatatgtacatttgaaacatcactgttttcacctattacaacagacgggattttgttgtcctcaagtattttgaagtccttttcctcaaggtaaggatgaatcatcactatgccgtctatatgtctgtgaacaagctgctgcatatatcttctttctttttcgatatcgttttcggcattgcacataagaatagtatatcccttgctgtgagccacgtcctcaacacctcttgcaacctctataggcgcgggattgagtatattgggaatcatcagcgcaatggagcctgttttgttgaaattaagccctcttgcaaaccagtttggagtatactcctcttctctgattatgtcttcgattttttttcgggttgcttctgccacagtttcggggtggttcataactcttgataccgtagctacggaaacacctgccttttcggctatatgacgaatattcatatcttattcctccaggagatccgggtcatgaaaatccgatcctcttgttattttaagattgtatttattcgcaagcgatacaaaacgctgcgcttcatcatccgtatgtttcggataatagcactctactccctcaagtccctgtgatttaagccttgctatgagcctgtccatattgtcaaagaattcatcggagcccttttctccaagccctcttgccactcccggatgagcaagcaccggaattcctcccgctcctatgataagccttattatctcatctgttgatgcaactttccttttgatggcgcgaagtctttctgatttgaataccttttcggtaaaggcgtctttaatatcatctatatatcccttgtttacaagggctcttgcaaatataggcttgcctatgaagtcctgcccctctctcattttaaggtctgctcttgtcagaggatatcccatatccgcaagttctttgataatcttctcatttcgttcttctctccacgctctgatatcctctattctatccagcataggcctgttatgagtgtctatattatatcccagcatatgaagacctatattctcctctgccgtccttgtcgaaaactcaattcccggaacaacttcaatgccaagtttcttacccgcagctataccctctgcaactccgcccacgccgtcatggtctgttatggctatgctttcgtaacccaaattcttaaatctggttacaacctccgcaggcgacagactgccgtccgaatagtatgtatgaatatggtaatccactttttcctgtctgttaaaaatcatatcatcaaaagctcctttctgatttcatctgcggcagcttctcctttgactgttctgattatctcaagagcaaactccatagctgtccccggaccctgcgatgtaattatattcccgtcggtctgaacacgagaagaagaaacttctgcatctcccagatgctcctccatacccggatagattacggccttttttcctgaaagtattccgcagcctgcaaataccataggcgctgcacatattgccgcaaggcgtttgcctgatgcgttgaatgatttaatcatatcagtaaggccgctgtgctgtgccatatggagagttcccggcatacctcccggaagaactattatatcgcatttatcgtagtcggcttcttcaaaggtggtatctgtttctatgacgatgccgtgagcgccggccacccgcgttttgcctgtgatagaaacagaaacagcatcaatgctgcttcttctgagtaaatctataattgtaacgaattctatttcttctgtgccttcggcaaaatgaatatatatcatctgaaatatctcctctcgttaaatatatctcttgatttggtgcaaagccatgtaacatacataaccgcaagtgacactataacgcagccagctgtaataaccaacgccgcattctttaatatctgagtgccgagtatctgtgaaagcacagttccctgcggtattcccagcactgtatgatttacaaagcctgtaaccggaggaataaatccgtatactaaaacgaccagtataattccaagcattacagccatggaccatataaatttcctgcggtaaagagctttggtatcatatcctcccttgacaagcacaaggaatatcatcacacttgctataaagctcataattcccagtaccaccgtaatattatcaaacagctttaccctgtcaagaataccatagtcgtcatccgtaaagttggcagccttgcctatataatagtcgtaaagctcgtttgtcttgtttacggcatagaagctgtctgcgcttcctttcatatagtccgaaatctgctgagccatctccgcaggctctacaaatatgcctgcctcctccagagtctgaagcggcagctcctctccatcttcgagtgcctgctttgcttcaatggtcttgttgaatttccattcatacatatcaggtactctggttataacgtttaaaaccagtgaaaatataaacaggggtatcagtgctatcagaagcgaagcataccatctgctcggtttttttctctgatatccgtcaggtacgtaatacatatactctcctaatcatctattctaattattgttgcgcccagtttgcggaatttctccacgaagttctcataacctctctcaatgtgatatatctccgcaatctcagtagtgccctctgcaacaaggcccgcaagcaccatggctgcgcctgctctgaggtcggttgatatgacctgcgctccctgcagcggtctgccgccgtatataatcgcgcttctgccgtctattttgatgttggcgcccatacggttaagctccgcaacgtgcataaatctgttttcgaatatgttttcgattacaacgctggaaccctccactgttgtaagcagcgccataaacggcgactgtatatccgtaggaaatcccggatacggcattgtttttatgttagttgaaacaagagggttgacattgcccttaacaagcagcccctcgtctgttttttcgactacgactccacattctatcagctttgccgtaattgccttgacgtgatcgggcacggcgtttttaatcagtatctcgcctctggtgatagctgccgcaaccataaatgtgcctgtttcaattctgtctggtataattccgtgcttgcagcctccaagcttctcaacaccctcgattttgatggtctctgtgcctgcgcccttgactcttgctcccattttgttgaggaaatttgcaaggtcaacaatttcgggctcctcggccgcattttcgattatagtggtaccctcggcaagcactgccgccatcattatgttctcggtagcgcccacgcttgggaagtcaagatatatagacgctccctgcagtctgtcgcaggacatctccacaaaggattctatttcgttgtttattatttcggcacccatagcctgaaagcccttgagatgaagctccaccggtcttgctcctattgtgcagccgcccggcatatatactcttgcgtgtcctgttcttgcaagcagaggtcctgccacaagaaatgacgctctcatttttttgacaagctcaaaaggtgcttcatatgtgttgatattcggtgtgtatatatttaaagtgtttgtatctgcctttttgacaacagcgccgatatgggtaagaagctgtgtcagcacgtccacatctctaagcgcaggcacatcaaacagcgtgcattcttcttcagaaagaagtgccgccgccattattggcaggacagcattctttgctccgcttatttcaacctctccgctgagaggattgctcttttgtacaagatatttagccaatgttttcctccagaatattattgtcttatatagtataccattttttcaccgtttttcaatggcagatatgcggcaaaaaataaagatggcccgcttttaaggcgagccctgaaatactataacgattttaattcatcgatacagctctggcatacattcttgtcgtgtattctatgtacatcatcgccgcttccgcagaatatgcacgcaggctgatatttctttaaaataatctgatcttcgtgaacgtagatttcaagaggatcctttacatcgatacctaaagttcttctgagttcgattggaagtacaattcttcccagttcgtcaacttttcttacaatacctgtagctttcatagtgttctcctttctgtttaaacagtgttactccactgtactatcgccctttgtaaaaaagcctttaatagtcgcaatggaattaacaataacgcttatggcgtttactgcattttgattgcctttaagtgtttcagagatgtttgcaactgattctgatacaacccctatgatattatcaacttccctggtcttgtccgatattgccgaggataccacgttgacatcttcgagtatgctgttgacgcttttgagtgtcttaacaagctttactgctgccacacacagtattaccagcaatactatacctgcaagtaccagaagaaaatgtcctacactttccaggttcagagtaatctgcataacaatacctccttatttttgtcctgtccctattatgtaacaagtggaaaataattgcaacatttttttgaaaaaacatcatatatttttttgaggtgataattttgatgaactatatatggtcggcaatgataatcacaggaattatttttgcctgcataaacggacagatccctgttttttgtgacggtcttatgcaaagctgcaccgatgccatacagtttataataagcatcgcgggagttatggctctgtggaccgggcttatgaatattgccgataaatcaggccttatagcccttattgcaaaaaaactccagcccctgatgcgatttatatttcccgaagaaaaaaatcagaaaacaatcgctatgatggttatgagcttcattgcaaatatcttcggcgccggaaacagcgcaacggtgttttcgcttaagtcgatggaaatgctcgatgccgaaaacggccgcagtccgtatgccagcaacacaatgtgcatgtttattgccgtaagcaccactatgatacagcttgtgcctgtgacagtggtaaaggtgcgcactgatttaggctcacaggaccccggaagcataataatcccatcgattgtcgcaggccttgtttcaatggctgtcactatattaattgccaaactgttcgaaaggaaatcaaaaaatgtcagcggtctttagcacaatttcaggattttttattcctgctataattattgtcattctgtcctatggtttatacaaaaaaactccgctttatgatgtgttcattgacggagcaaaggacggtcttaaaacagttgtcgaaataattccgttcatacttgccgtatttgtcggaattacggctctgacctcgtcaggcgtcatggactggctgcagaaaatttccgcgccgctgtttaacattattaaaattccggaggagctgatttccctgattctgcttcgctcggtatcgggaagcggctcccttgctgtggcgcagaacataatgcaggtttacggcactgacaatctgataggccgcagcgcctccgtaatggtcggaagctgtgaaactattttttatgttctcgcgctgtattttggtgttacctccgtaaaaaacatgcgctatgcatttcacgtcggtataataggatatatcgtgtcaattctggcttcggtatatatctgtatgattatctaagccctctcatatatctgctgtatttcgtctgtatagctgccgtcaccgttatatacatacagatccggaagcagcctaagctccctgcctgcatttttgatgcagtgtataagcactatattggcagcctgccccgatttgggacatacaaatctcacagtcttgggctccagtctgtactgccttgaataatacataatatccacaagccttgagggtctgtggaccataaaaaattcgccgcgctcctcaagcagaaatgcagcggcggctataaagtcctccaaccctgcataaacctcgtgacgcgctatggttttggcgcttatgtcatttacaattgcgcttccctgctccatatacggcggatttgaggtagccgtatcaaagcagcctttaaggctttcgtcaaggttctttacattgcagcaaatcatctcaagtctgtcatcaagaccgttaagtctgacattgcgaattgctctctcatacgagtcctgctgtatctcaactccgcatattttctctgcggaggtcttgtgactgagtatgaccggaattatgcccgtacctgtgccgagatctatgattgctaattttttctttgcgatacttgccgcaaaatcggccagcagcacagcatccactccgtagcagaaatcctgcggcttttgtatcagcttcagtcctccgaaacctatttcatcaagtctttcaccgtctctgatatccattgctaatccttaatcagttttttgatttcagctaaggtttcggcatccatatcgtcatctattatatcatcattacgttttttacggttgccgtgtcttctgatttcctctttggtataggtatatatatcgttgctgagtttttcctccttgtctcctgaggcttcttcctgaacaagccttacctttattttgttttcgagtatgcttgtatcgacaacaactgcattgccctctttggtgcgtattctctcgcccacatcaggcataccttttttcatttcactgtagacatcgttttcatatttcaggcagcacataagtctgccgcacacacctgatatcttggcagggttaagcgataaattctgcacctttgccattttgatggataccgggtggaaatccgagagccagcttgcgcagcaaaggtccttgccgcagcagcctatgcctcctagcattttggctacatctctgacacctatctgacgcagctctattctcattttaaatacgcctgcaaggtcttttaccagttctctgaaatctactcttccgtctgccgtaaagtagaatataaccttgctgttgtcaaatgtatattcaacgtctacaagcttcatatcaagcccgtgtttttcgactttttcctgacatatattaagagttctctcttttttggcgagattttcttcgtgttttttgcagtcgtttttgtctgcaatccttataacctgtttgagcggagtcacgatttctttttcggaaacctctattatgtcacttgaagccgttccgaattccgtacctctggcagtctcgacaataacattgtcctcctcgtgtatatcgaaatcgcccgggtcaaaataataaatcttaccggcatttctgaatttgacaccaactacttttaccattatctatcctccgattttaattatcatttctttcagggcataagaaatattcatattcttcaggattttgcgtctggcctcctctatggccgaaatactgctgtaaatgctgccgctgctgtatttcacgctgccctttataataaaatccctgtatatcttctccaggcagtcaagcactgccatggtttcacgcctgtcctttgcaagtttttcggcataggctttaagaacataaaacggctcttcctcatatatcattgtttcaagctctgccgctctgctcataactcccgcatctgccctgcgccctgtgctttccagtctgtaaaccgcacatcttgacagtattgtcgggagaaaattctctatattatccgccagcagaattatcacggttccctcaggaggctcctccagagttttaaggagtctgttctgagcccatctggtcatagtatccgcattttctatcacggctatgtttctgctgcctgcaaagggcttgtttttgagtttttcctggagtttttctatgtcctcgtcctttacgctgttttcaggagaaatgataaacaggtcctcataattgccattatctatcttatggcagacaacgcactctccgcagccgccgctgtcacacaaaactgattttacaaagttcattgcaaatgcggtcttgtctacggtataatcaccttcaaaaatatatgcgtgtgatatattgccgtttgatatggcgcgattaagcctctcggccgctctgctgccaagtccgtcacttatcatcaataagcctttccagatatgttctgatttcatcaaaaatatcttcaatacctcccgatgcatctatgcctacaattctgtccgcataggttttttcgagttcctcatagccgttatatactcttctgtggaagtcaagcttttcgagttccagcctgtcctcctgtcccggtacaagccttcccttgcccacctcggggtcgagtttcagcaggaatgtgatatccgggatacagtcctcaacagcatagctgttgataatctttacggcttctccaaggtttctgccatacccctggtatgcaatagatgagtctacaaatctgtcacatattactgtaattccctctgccagcgccggttttatgacctgctgcacatgctgggttctggaggctgcataaagcatggcctctgtcattgcgtgcatctcggagttgttcctgtcaagaataagctcacggattttctctccgattgcagttcctcccggctctctggtaagcagaacgctcatacctcttgcctcaaggaattcttttactttgtttatctgtgttgatttgccggagccgtctccgccctcaaaggtaataaataaatttcctgtcattatttcacccgcctggatttgccgataacttcttccattgatttagtaaaaagtatcagagccagatatcccacaggtatgcagagcattattgcaagcagtattctaaaaaatatcataaagctcctcccttcgtacattatccgctctttttacagagccaatgtgcttattatatcataaaatgcagtgaacctctacctcaaagtaaaaccggcgcctaaaaaactttcacgcgagtttcagttctacaaaaaaacaggcaatccaccttactacagtagattgcctgcataatgcccatttacatatcaaattttaaaacatctatagtttatctatttcctctgtagataaacctgtatactttgaaatttcatcaataggcttattatcgttcttcatggccctggccatctcaatagcttttgaagctttgccatcgtcaaaaccctcacgtttcataacctctccgtattcctctaccgttattcccttaagcataccctcgacctccgttgcatacttattaataaaatccacaagaatacctgctctctttgctctctttaccgcagcagctacagcatcttcaaggtccatacctttgtcaagattttcatttacatacgatatgaacaggctatattccctaagtgtcttgcttcttttcagtatttccttattctcagaataacatatattatatacttttaccacaacttctatcgagttttccggcgcattttctttgtagtggtctgacagcctgaaagtctccacttccggtgcacccggctttcctaaataaaaaacatagaatacaggagccggcatcattactttccttgttccgtatatttcactcccaaacatcagggaggcttaacccagcgaagtatgagctgatggtaagtcccctgtcaggagtgcaacgctttagcgtgtggcactctacggcacgtttgcagtcggttcatagccagctaaagctggtgaaccgttgcataaggagtcccatcaatctgctttcgcatattgtggcaactccattatctatgttttcaagagcctcctttcccatctgctcctcacttaccgcgttgtagagctccagcattttctctttgtcgttaaagagagttctgaacataccgtctttaaattctctgtttactttagctttttctgctttcatctgtttatcctccgttttcatattttttagaaagcaaaaaacgcacaataaaaagccgtttaagctgaaaatcaattcagcctaaacggcttatccgtgcgtctttatattttttctatgctaccattttactacaccccgtttttacagtcaattccttttttatttttttctgtaatttcattaatacgttgatatttaaaccttcacagctccccacttgacaaaaaacaggatttaaaagcagaaaaagtttttatcttaagcacctgcgaaaacaggcaattcaccattacagtgaactgcctgtcaaacaccttaattcagttgttttaatattttaagatacatactaagatatatcccgttaaatcacctgattaatgtac

SEQ ID NO: 2257 - DNA, 6930 bp, Unknown
  16S sequences of unknown bacteria
tttcattcgtttttttgcgaaaccgagtgtcagtgtctgctcttcttcgagatgaagagaacagcggcggaagccatcactgccatgacagcgacagaaaggctgtcagcggtggaaggagaaccgctgtcgccggaagcggcaggctccgcgggagcgggaatggttatcgttgtggatacggcgaccgcgtccggaccttcgtccgcgatgtagagcttttcgttagcgaagccgatctggctgaacttggtgaccgagtcatagtttatcgtcttgacggcggtgagatcggactggttgaggatgacgacgacggagctttccttgttcatcgtgcagaccgcgaggtattcgccgacctggcagatgccgaagcactcttcgacggcgcccttggcgaggatgttcgagcccttagcgtcgagcttgaagacggtgtcgcccttgctgcccgcgccggtgttacagcagacgtagatgttgccagcggcgtcgacggtgaggttgttggcgtcggtgatgccgaaaccgccgagctcaatcatgccgttgttgccgaaagctgcgttcgggacggggttcttgacgtcggtgacgtcgtagcagtacatacggtctgtgtcatagttggtgatgaagtataagtagtattttccgtcgatctgacgtgcgtaagcgccgttgacgccgatcttgccgtcgatgtcgatcttaacccacttctgctcggcgagacccttttcggtgcagatcgagaagtagacggcgccgttgttcgcggcgttcgcgatacccatgtagacgtagccgcggtcgtcggtgccgattgcctttatgtacgcgccgttgtcttccttgaaggtgtacttggtgacttccttaccggtcgaggcatcgaactggtagacggtcggtgtgccgctgttgaggaagccgcaatagtaatacttgccgttcgggtcaattccgaacgcgcggagctgcacggcgtcgagggtaccctgcgggtaggacgcgaattcgctgattttgacattgtcaaaaatgtcgtcgtaggaacccgcgaaagcggaaacggacaggagcagtgcggtgactaccgcggtgatgatgatgagcgctgattttttcatggtattcctccggataaaaatattttgaaagttcccattctcaggttgactttctcttcacatatattttacacgagcttttcttttttgtcaagtccttttcgcaattttcccaattctttttcaagtaaatagttctacaatcagtgtttttcactattgcaattacatattatggtttttgtgtgttttcctgtaagtctgattgtataaagtttttcagagggaggtgcaggagggggcgcttttttcaaaaagcgccccctcctgcgaagcgaaggttatatcgcgtacttcttcccgaagttttcgtattcggatttgtattccgtgttcgaagggtctttcatctcggagaggaatttgtgagtctcaaatgactgttcagccgacttgatgaggcaggcggcgaggtttgagcagtggtccgagacgcgttcgtagtttgtcagtatgtcgcagagaatgaatccgagttctattgtgcagcgtccgtcgcggaggcggtctatgtggcgtgactttatttcgtcgcgaagaccgtctattacctgttcgagcggttcgatgtgagaggcagcttcgaggtcgccggtgatgactgccttttgtgtgcggtcgaggatttcgtttatcgcggcggagatgacgtcgagttcgtgcattgcctcgtcggagaagctgatgtgcttttcgtgcatttccttcgcggcgtcgactatgtttacggcgtggtcgctgattcgttcgtagtcgcctatgtcgtggaggaggcgggtggcggttttcgagtcggcgagggatagttcgcggctcgagagcttgacgaggtaggtgccgaggcggtcttcgaagacgtctgcctgttcttcttcgtttctgactttttcggcttctttttcgttgtagttgccgacgagcttcatcgcgcgtttgatggctttgaaggagacttcggacatctggttcgcgacgcctgtgcattgttcaagcgcgaaggcaggggtggcaaggaagcggtcgtcgagcatgacggcggtcttttcgacagcgtgctctgctccggcgtcctcggcgtccttcgggttgtcgcggatggtgaggcaggcgagcttttcgagcttcttgctgaacggaaggaggacgagggtcgttatgacgttgaacgcggtgtggatgaccgcgatgccctgctcggttatcatttcgtccgcgaacgggaagccgactatcgcgtcgatcgcgtagtagccggtgaggaacaggagcgttccgatgaggttgaagtagaggtggacgcaagccgcgcgcttgccgttcttacatgcgcctatcgccgagatcatcgccgtgacgcaggttccgatgttctgtcccatgatgatcggcacggcggtcgagtacgggagcattccggtcgacgagagcgcctgaaggataccgaccgacgcggacgaggactgaatgattccggtgagcacagctccggcgataataccgaggaccgggttgttgaagatgagcaggatccgcccgaactcaggcatatccgcgagcggcttgaccgccgaggacatcgcgctcataccgtacatgagtatcgcgaagccgacgagtatcgagccgatctcgcgcttcttgccgttcttgcacatcatgatcatgacgacgccgatgagcgctatcaccggcgagaaggactccggcttgagcatacgcatgacgaccgagtcgccctgtatgcccgacagcgagagtatccacgccgtgaccgtcgttccgacgttcgcgcccatgatgacgccgaccgcctgaccgagcttcattatgcccgagttgacgaagccgactaccatgaccgtagtggcgctcgaggactgaatgaccgccgtgaccgcgacgccgagcagaacgccctttatcgggttgtcggtcatcttttcgagcagcttctcgagctttccgcccgacgccttctcaagaccgctgcccatatactgcattccgaagaggaagagcgcgagccctccgaaaagtgataataccgagaaaatgtccatattttttcctttcacctgtcagtgttttgtttcgcttttttgattgacaatctatgtgaaccgggaattttccggtaattttcagaggttttcgctgcacgtgtcgaagaagatgaccctgacggtcgttccctctccgacgacgctttcgacctcgagcttcgctccgtgtctctccgcgacgtgcttgactatcgcgagaccgagaccggtgccacccgtctccttcgagcgggatttatcaacgcggtagaagcgctcgaagacgcgcccgatgtgctccttcgcgatgccgattccggtgtccgagacgctgaggacagcgacggcgccgctcggacagccgacggggtcgatatctatcttcaccctgacgctgccgcccgggcggttatagcgtatcgcgttgtcgattaaattgtagacaagctccgagagctcgctcgcgctgcccatcagctcgcagtgactgccatcgagcgacagggtgaccttgtgccgctctgcgcttatctcgaggacgtccatgcactcctcggcgaccgagtagagctcgaccggctcgaagccctctccgtcggtctcctcgtcgagctgtgacagctttattatgtcgcttatcagggtcagcatacgcgcgctctcgcgccttatccgtcctgcgaaaagcttcgcgtcctcgcccgccgccattcccgtctcgatgagctccgcgtagccggagatggaggtcagcggcgtcttcagctcgtgcgaaacgttcgccgtgaactcctgctttatccgctcgatctcgctgcgctcggttatgtcgagtatcagcgcgattcgtccgacctgctcggcgttcgacacgacatggttcacatggagctggaggcatctgccgtcgaggctcacgttcatcgagtccgcgcgctcaatgcactcgcagatctcggacgacgggcagacctctctgagtggcttgccgaccgcctcggagcggctcatcggtgatccgatcagtccgcacgcgctctcgttgaccattatgacaccgagcgagttgtcgaggatcagaagtccctcgtccatattgttgattattgtcgcgagacggttcttctctttcccgacccgcgcgagctgacgctttatttccttctgctggagacgtatcttctcaacgagcggtctgaactcggggtatattctatcgtcaaccgtagcgcccggcgtgatatccggcttgtccgggtcggcgaggtccgccgcgagcatcctgaccggcgcggttattttcgtggtcagctttccggacagtatcgccgccgcgatgataagcccgccgccgagcagaagcgccgaaacgccggaagttatcagcaccggggccatccggtcgttcggcaccgaaaggcgcagaacatcaccgtcatcgagccgcctcgcgtaatagaacagtgtctcgccgaaagtccctgagctgcgtttcccgttcgccgtgccgtttttctgcgcgtcgacaaactctggtctgtccgcgtgcgattccatcgaggcgggatcggcgtccgtatcatatataaccgttccgtcggcagcaataagcgtgaccctgccgccgatcttctccggcacgagcgccgtcagcgcggaatttccggcgtcgtcgatcatcgccgagatgagcgccgcctcgttcgcgagctcgctgtacacctgcctgtccgcgaagctgataagcgccgtcagcgccgcaagcatcgtcaatagtatagacagcgccccgaccgacagaagcgacagaaatatctttctctccatgacagcccgccgttcagtcgccgatcatatatccgaccgagcggatggtcttgatatacttccccgcgtcgccgagcttctgcctgagcgtcttgatgtgcatatcgaccgtgcgcgactcgccctcgtaatcgaagccccagacctcggagagcagcctgtcgcgcgccatgacgatgttcgcgttgagcatgaggtatttgagcagctcgtattccttgtatgtcagttcgatctcctctccggaaatcgtgacttttcttgacgagtcgtccatgcggatgtcgcggaactctattatctgcgagtcctgaccctttgagccctcgttctgctccgcgcgtctgatgagcgccttcacacgggagacaagctccattatgccgaacggcttcgagagataatcgtccgcgcccatgtcgagaccgcgcaccttatcgagctcggtcgtcttcgcggtgaccatcattatcggaatgcgcttcgtcctctcgtcgctccgtatcgccctgagcagcgcgagcccgtcctcaccgggcagcattatatcaagcagtatcagcctcggaagctccgtcgccagcgccgcgcgcagttcgtcgccgcacgcgaagcccttcacgtcgtatccgctgttcttgagagcgtagctctccatctcccgtatgttctcgtcgtcttcgacaatatagatcacgttcatatcctcccgcgtgagtccggcgccaccgatgccgccttattaaaacatcatcacaagttattccatcatatattctatcgcatacttgtaaacccacggcgcgtgaattgtaaagtccgggtaaattatgtcggaacacgttttttttcgcgcagtacttgacatatgggcaaaaccggattataatattagtatatactttgaaaggttcattttttcatcatgatagaattattcgattcgacactacgcgacggcgcgcagggcgaggggatttcttactcagtgcgcgacaagctgcggatacttcagacgctcgacgagttcggcatcgattatattgaagccggaaaccccggctcaaacccgaaggacgctgagttcttcacactcgccgcgaagacgccgctcaaaaacgcgagactggcggcgttcggctcgactcacagacggaacgtccttccgggggatgacaggtcgctcgcgagtcttctcgcgtctggcgcgcctgtcgcggtcatcttcggaaaatcgcacctgctccacgctgagaaggtgctcggagcgaccggggacgagaatcttgaactcatcagctcgacgatagaatacctgaagccccgtcttgatgagatcatctttgacgcggagcacttctatgacggctacgactacgaccccgagtacgcgatgaagacaatacaggcggcagtcggcgccggagcggactgcgtcaccctctgcgacacgaacggcggtatgcttcctgacagaatatacgagataacctcgaaggtgcgtgagcgcttcccctccctgaagatcggcatacactcgcacgacgacgccgggctcgccgtggcggacgcgctcgcggctgttaaggcgggagcgtcgctcgttcagggaaccttcaccggaatcggcgagaggtgcggcaactgcgacctcagcgtcatgataccagaccttgtcttcaagtgcgggctgtcctgcgggcataacggaacgcagctcccgacgctgatggagacggcgcggaggatctcggacatttcaaacgtcgcgacccgtccgtcaaagccgtacaccggtcgctccgcgttcgctcacaagggcggaatgcatatcgacgcgatggagaagctcgagggcgtgtatgagcacatcgacccgtcgctcgtcggcaacaaacgccgactgctcctctcggaggtcgccg

SEQ ID NO: 2258 - DNA, 15778 bp, Unknown
  16S sequences of unknown bacteria
gcaaatcaccgtaaccggtgatttgccttgcattttttaatcttctatattaaatatgcttcacagcttagccgtagcggtgctaagaatttgcaatgaaattatcaaacagttaaatttaatactttagggttttctaaagaaaattacacttttaaggtttagttttattgcaactcttagcaaccgcaaacaacctacagctaaacaattaaatatcagagagtttaacgctatctcttaaaaagcgtggtttcgtcagccgacgcattaaagtgacggggcaaatatgggtattttcgcttataccctctaaaatttggttgtttaatatggctgtcctaagtgtgtgaagaaagtgcaaaagcacacgtaaaacgtgaaatgcacgataggagacgaaaaaggcttcagcctaggactgttggtgatcgtccaccgcagttcgcgatcttttgtgtaatgcaatcaaacggcgtaagcaaatgtgtagtgagaaaaataaaaattggtggcacccaaatttaaggtaagaaagtggtgttatcttttggatacgatttcgctattgcttcttctctcccacgcttcacagcgtgaaacttgcaattcgctttcgagttcgtcggtaactacgcctcagcggacttccaccgcagagcattgatatgcccgtcataccaaaaaagaggcacggattttaccccgtgcctctttcaacttaaaattcagagttttccggtagtaaaacggtctgccggctcttccggtattttaatgccgtaactcctgtttttgttttaaagattttcataaaatgcagttcatccgaaaagccgcaggaaaaagcgacatccgcaaccggcaaatcagttgtttccaaaagctcacaggcatgcgctattcgttttccggttacatagcttataagggtcgttccgtattctctcttaaaaagccgcaacagatgtgcatggcttataccggagtctctgcaaaggctttctatagagaaaaactgtgaaagacagttgcagtcaatagtttcttttatgctttttatactgcccgacggcattcgggacgcacatatgtccattattttataaaacgacgaaagcagaccgaaatattcgtttggtttttccataagtgactcaaacaggctctttaatattccgtcggttatttttcggtgcctgtttttaagcgtgaatacattttccgaaaagccgactaactcaccgtagtgtccggcggcgtcaccgttcagcgaaaaccaaacgtactcccacgggtcggcagaatcggggtaatacctcatttttacatttggcggaataaaaaacatatccccgctgctgagctcaaatttcatttcttcaacctcaagcgtaccgctgccggaaataataaaatgccatgtgaaaaagggttgtattctgaaatgcttttccggcttagttactttaaaattatcatacccggctcccaaaaccgtattatctccgatattattcgttattccgaaatatgacggtattctgataaaatcccacatataaaacacctctttatagagcataacacaaggacgaagaaaagtaaatgataaaaaaagacagttttatgttcttttttaacattgtgttttttctccgtttggggtaatatactcaaaaaggagtgttttatatggcaaaaataaaggcttgcgttgcggggcttgggaaccgcggctatgggttgatatgtgatgtgcttttgaagaatacggatattgaaatagtttccgtatgcgatatttatgaagaccgggtggcgcgcgctgcccaaaaaatcggggaatacggcaacgaacccgagggctttaccgattataagcaggcactttcggttaaggggattaatgccgtttttatattcagcgattggagtacccacacggaaattgccgtttacgctatgaaaaagggcgttgccgttgcaagcgaggttgggtgcgaatatacgcttgaaaactgccaaagacttgtaagaacaagggaagaaaccggaaccccctatatgtttgttgaaaactgctgctggggtaaagaagagctccttgcaacctcaatggcacgaaaaaatgttttcggaacagtagtgcattgtgcgggcgcttatgcgcacgatctgcgcaatgagatagcctacggccatgtcagacgtcactatcgctttgataactaccttaaccgctgctgcgataactacccgacgcatgagctgggtcccattgcaaagctgcttgatattaaccgcggcaacaggataatgaccgtttcctcctttgcctcaaaaagcgcgggacttagcgaatatattaaaacccgcgatgacgcaaccgaagaaatgaaagccgctcattttgcgcagggtgatattattaccaccgttttgacctgctcgcggggcgaaacaattcttttgcggcttgacactacgctgccgcgttcctacagccgcgattttacggttcgcggtacaaagggaatgtatatgcaggatacaaactcggtatttcttgacggcgacgaagaatcgtttgagccggtgaaatattacgaaaaggcgcttaataacgccgttaaatttgaaggtgaatacttacccgaaatttggaaaaacgttaccgaggaaacgctgaaagcgggtcacggcggaatggattggtttgcctacaaagcctttaccgacgcgcttataaacggtgatgatatgccggtagacgtgtacgacgccgccacatggcaggcggtggcggtgctttcggaaatgtcaataaagcagggcggcgcaccgcagataatgcccgattttacaaacgggaaatggtttaaacgcccgagaaaggacgtttgcagactgtaatatcgaatcgaaatgaggactcggattaaccgggtcttcttttttatgcgaaaataattgaaaaaatacatgctatgtattataatataaaggaatattttttataaggagaaacaacagtggcttttccgcttgaaaacataagaaatttctgcatagtggcgcatatagaccacggcaaatcgacccttgcagacagacttttggagctgacgcaatcggtagccgagcgcgatatggaggaacagatacttgacagcatggacttagagcgcgagcgcggcattaccattaaggctcacgccgtaaccctttattataaggcaaaggacggcagggagtatgagctgaatcttatagatactccgggacatgttgactttaactatgaggtttcacgttcgcttgcggcgtgcgagggtgcggtgcttgtggtggacgcgtcgcagggaatcgaggcgcagacccttgccaacacctatttggcggtggatcacgggctggagcttttgccggttataaacaagattgatctgccctccgcagagccggagcggatcaaaaaggaaattgaggatgttataggcattcccgcagaggacgcacccatgatatcagccaaaacagggctcaatgtcgaagaggtgctggagcgcatcgttaccgatattccggctcccaagggcgacagatccgcaccgcttaaggcgctcgtattcgattcctattacgacccgtacaagggtgttgtggtttatttcagggtaataagcggcaggcttaaaacaggggataaaattaaaatgatggcgaccggcgccgattttgatacggttgaaataggcagaaagcgcgcaacctatatggagccgtgcgatacgcttgaagcgggcgaggtaggctatcttaccgcgtcaatcaaaacggtggacgaggcgcgtgtgggcgataccgtgacccttgccgaaaacccggcggacgctccgcttgagggttacagaaaggtgaatcccgtagttttctgcggaatttacccggcggacggcgcaaagtaccccgaccttcgcgaagcgcttgaaaaattgagccttaacgatgcgtcgctgcttttcgagcccgaaagctcaaaggcgctcggcttcggcttccgctgcggctttttggggcttttgcatatggaaatcatcgaggaacggctcgaacgtgagtataatctcgatcttgttaccaccgcgccgagcgttgagtataaattcctgcttacaaacggtgagaccgtaacggtggataaccccacaaactaccccgacccggcagttatagccgaggcgcttgagcctgtggcggatgtgcatatatacagcccgagcgaatatgtcggcgcgataatgcagctttgcgaggagcgccgaggagtgtataccgatatgaagtacatgggcgacagggtggatattcactatgtaatgcctatgggcgaaattgtttacgatttctttgacgcgctgaaatcccgcacaaagggctacgcaagctacgattacgaggcaaaggactatgaaaaatcaaagctggtaaagctggatgttatgcttgcgggcgatgtggtggatgcactgtcctttatagtccattcggataacgcatacaataaagcccgccgcattgccgaaaaactgaaggattacattccgcgccagcttttcgaggtgcctatacaggtggcggtgtccggcaagataatcgcgcgcgaaacggttaaggcactcagaaaggatgttcttgcaaagtgctacggcggcgatattacccgaaagaaaaagctgcttgaaaagcagaaggagggtaaaaaacgcatgcgccgcttaggctctgtggaggttccgcaggaggcgtttatggcggtattaaagcttgacgaataaggagaatataaaaaatgacaagagcggaaagacataaggcaatagtaaagcgcagaattttcattgccgtttgcgtttgcattttggcagcgctgattttactgatagcgtttgttataaagtcggcgttcggcggcaaaaagactgatggctcggatgtttcgcaagggggcagcagcgcagcgggcgaaatcgtatccgatgtatcgagcgaagatccaacgccgagctaccctgcaacagggcctaacggcttggacgcaaactatgagcagcttttgcttgtaaacgcacagaatccgctgcccgagaattacgattacgagggcagccttaccgaaattcccacaaaatatataaacggtatgctgaagcagatagataaaaatgtatggccgtatatgcaggcgatgatagacgcccaacgcgcgacccaaaccgattcgaagaactggctctatgtccgttcaccgtaccgttcgtataagacccaaaaaatgcttttcgataatgaaaccaaaaagtggcttaaagatgggctttcaagcgaggaagcggaagcaaaggcggcaacggtagtgacgagacccggcaccagcgagcacaacacaggcttttccgccgatttcaatattgcggaggacagctttgaaagcacgcctatgttcacctggatgcaggagcacgctgcggattacggctttgttctgcgttttccgaaggataagcaggaaaaaaccggtatagtttatgaatcctggcattaccgctttgtgggcataaacaatgccaaggaaatgaacaggctgaatatgtgccttgaagaatatgttgagtatgtgaacagcaaaaagaaataaaacaaaattcgacaaaaaataaaaaaggtctttacaaccgaagaaaagtgtggtatagtaattttcagtgaatcctttaagacggtacagagataccggcaaggctgaaaaagaaggcattttatgcctgtgtttgctgtgcttcagcgccttgccgtgtgcagggcgcttttttaatgcttttttgatggagtgttgagaaatggaaaaattcaaggcaactcttatggacgaggcagcggtggcgcgtgcgctcaaacgcatttcccacgaaattctcgaaaaaaacaacggcaccgaaaacctctgcataatcggaataaagcgcagaggtacagcgcttgcgaaaatactgtctgataatattttcgcaatagagggagtaagagtacctacaggcgagcttgacataaccttttaccgcgatgatcttaccgcaatatcgccagaccccgttatccaccctaccgagcttgatttttccgtagccgataaaaaggtgattctggttgacgatgtgctttacaccggcagaacggtgcgcgcggcgcttgacgcgcttatgagccacggcagagcggcggcggtgcagcttgcggtgctggttgacaggggacacagggagctgccgatacgcggcgactatgtcggtaaaaatgtcccgacctccaaaaacgaggtcattgcggttaaaattccgccgtatgacgacatgaccgcggcggagctttacgaggtataaacggttcataccgtgtatataaaaaatgcggcgggattcgtaaggggctcggcgctgaaaaacggaggaagaaaaatatgaaactcatttatgatgttaaggacaagccgagcttcggcaaggtcgtaattttcgcactgcagcagctgcttgcgattcttgcggcaacaattgccgttccgactattgtgcagaacgggatgtcgcaatcggcggcacttttcggtgcgggtatcggaacactcgtatatcttttgttaaccaaattcagaagcccggtatttttaggctcatcattcgcgtttataggctcaatgcttgcggcgttcgcaggcgctgtatcggctgaggcgggacatgccggattgatcatcggtgctgcctttgcgggaatcgtttatgttataattgcaattatagttaaatttgtcggcgtcggttggatcaataaattgatgcctgcagtggttatcgggcctaccgtttcgataatcggcttatctcttgcggtaaatgcggtaagcgatataacaaagggcaaggtgcttgacgctgaaggtaattccgctgcaaacccgcttatctgcctgctttgcggacttattacccttttggttgtaaccatctgctcggtttacggcaagaaaatggtgaagcttatacccttcatcatcggtatacttgcgggatatgccgccgccgcgatcttcacggttatcggaattgcgaccgataatacgtcactgcagataatcaactttgaagtcttcagaaatatgggcattgtttccgttctcgatttcaccttccttgaggcggcaaagggcttcggaaagattgacggtcagtacatagcgaccgttgcggtagcgtatgtaccggttgccttcgttgtattcgcagagcacattgccgaccataagaatctctcctccgtaattgaaaaggatctgcttgaggaacccggacttcacagaactcttctcggcgacggcgtaggctctgtcgcaggagctttgttcggcggctgcccgaacacaacctacggcgaatcggtaggctgcgttgcaataacgggaaatgcttctgtcgtaaccattttcgcaactgcggtgatggcaataataatctccttcttcggaccgttcgtaaccttcctctccacaattccgaactgcgtaatgggcggtgtatgcgttaccctgtacggattcattgcggtatccggtcttaagatgatacaggaggttgaccttaacgacaacagaaacctctttgtggtggccgtaatccttatttgcggaatcggcggacttaccgtatcgttcggaaagatcacaatcacatctattgcctgcgcgcttatactcggaataatcacaaatgttattctcggcagaaaaaagaaagctgaataattgatttcaatacaaatcccctcaacatcaagcaatagatgtcggggggattttcttatgcttatgttcggttttcaatcaatcagccctgaaatgcgttagacttatctttcgtcgataggcttgtagtctctgtggggctgtacgctcatatacgcggggcggataatttttccggcgttcagcagttcttcgattcggtgagcgctccaacctgctatgcgcgctattgcgaacaggggcgtgtagagctcgtgcggcagtcctaacatatcgtaaacaaagccgctgtagaaatccacatttacgctgacgcctttatacatctttctctctccggcaatgatttcgggcgcaagccgttcaaccgcagaataaagtccgtattcgcggtcaagtcccttttcctccgaaagggatttgacaaagcctttgaagacctcggctctcgggtccgaaacggagtataccgcgtgacctacgccgtaaataagaccggtcttgtcaaacgcttccttgtgaagtatttttttaagataggcagatatctcctcttcgtcattccagtccttcacattttcctttatatcgttgaacatcgcgcaaaccttaatgttagctccgccgtgcttcgggcctttgagcgagccgagcgccgccgcgattgcggaatatgtgtctgttcccgaggacgatacgacatgcgtggtaaaggttgagttattaccgccgccgtgctctgcgtgaagtaccaatgctgcgtcaagcaccttggcttcaagcggggtatacttaccgtcgatcctcagcatataaagtatgttttccgcggtggaaagctcggcgcgcggctcgtgaatgaaaaagctgttgctgccgcgaagataataatcgtacgaatgataaccgtatacagaaagcagcggaaaccttgcaataagctgcaggcattggcgcagcacattcggaaccgaggtatcctcggcgtttgcgtcataggaataaagcgtcaaaacgctgcgcgccagggaattcatcatattggcggagggggctttcatgataatgtcccgcacaaaggagcccggcagggttcggtatgaggaaagaagcgcacagaagtctgtcagctgctccttcttcggcagctgcccgaaaagcagcagataaactatttcctcaaagccgaagcgaccgtcctttataaagcccgcaaccagctgctcaacatcatagcctctgtaataaagcttgccgcggcagggaacctcctcaccgttcactgtttttttggaaactatttcggatatttcggtaagccccgtaagcacgcccttaccgtttaaatcgcgcagccccctgtttaccttatgttcgatgtacagctgcggttcgattctgcaattgcctgtgcaaagctcggagtagttgagtatctcgggcgttatgtcgtttcccgagtagccgttatttccgttcataccatcacttccttaattcttatttgatatgtttattttactataaaaacctaaaataaattttaactgcgtgttaattttgaagccgccgtgcgtgatttctcttgattttcgggctgtacgacgctataattaaaacggatttaattgtgctgtcggcacagggggatgattcggtgataaaggaaaagcttttaaatgtatttctggaggaaaatacgctttcggcgctgacaaaggcggtgagcaccgagcttgaatgtcctgtaattgtggtggatgacgcttatcacatcgccgcaagctgtgctgcgggcgaatatgacgaccctgtataccgtgtggcggtaagccacggcgagctggctcttgaggattgcgccgcaatttcggcgcactgcggggaagacgatttcagcgttgagatgaacggcagaaaataccgcgttattcagcttgaaagccgcggcacggtacatggatatatgcttatgctttatgcgccgaaagtatgccctttcagcgatgatgaaatacacttcatatccgcgcttgtttcaaagcagctgttttttgaacgcgggcagactgcggacggaacagccgaggaaatactttcggcgctttttgacggagaattttccgatgaggagcattttaaaatccgcgcgcaggctacctatctttcaaatttcaaccccgagcggcttgcgctgatagacctgcggcactgcactcccgcagccgccgcgtttttacaagctcagatggcaagcgaatttcacgcatctcacccgtttgtgtataaggataaaacaataatgtttttgcacggcgatcacagtatgaaaaggctgtctgaggcggcagagcaaaacggaatcgaaatagcggtctcggcacggctgaacggcattttttccgcagcgcgcctgtatcgggagacgcttgaagcgcttgattatcttaacgaaaaggggaaaagcggtttgtcggtctttgcggaggattatgcacagcttctgtttttgcgttcggcactgcgaaagggaaccgtgtttgacagccgcgtttcggaaatggctgaatacgacagagtcaactcgggcgagctgtgccttacgctttatacatatctttgctgcggtcattcacttaaggagacctgcgagcggctttacacccataaaaacaccgtgctttacagggttcggcgcataaaggaaaatttcgggatagatacggataacccggatctttgcttcgggtttcttgcgcaggcggcgcttgagcttgtaaaatcggggcaggatgagctgtttataagaaatgaggcacataataatgcggagtgatttaccgcatgcggtttattttatcgcgaccgcctgttttccaagctcgcaataccttttttcggtaagctttttatcatatttgaccgttttcccgacgaacggatcgttgaggtagcagtattcgccgtcgaagccgataagcagcatgcagtgctcgtttgcgggccaactgaaggtgctgccgtcaccgagcgtccatttttccgcggggtagacctcctgcattgaaatcgagacccaaattatcaccggcacattttttgaaacatatttttcgcacagctcattaagggaagaaccggaggcgtctgcaacggcatcgtcgtttccgatatacgccttaagcgccttttctattacgggtgcaaagcagccgtagctgccggcggagcgcggcgagcctacaaagctttctttgggatccggaccgtaattcacgccgtttatattcttgaattcattgctttgcggcagatattcgtcaataaagcgtgaagcggatatattatagcccgcatacctcagcgccataacggtgcttacggtttcgcagccggtgggataatcgggcagctgggaaaaaaccggaacatttttgattatatggccctctgatgtcttgatatcagacgaatccgattcagagcctgccgcagttttgacggtttgtttgtcaatacccgtaatatcgtaaagcccgaaggaaaagacttcatcttcacggcatacggtcaaaatacggttgtattcatctgccgagcagtcggtaaagcagccctttgcggtaatttcgcgaaggatgtttgtatttttttcataaattcgcagaatatcggtgctttcacccgaaagctttgttacaactccgaagggtataacattaataggtgtttcattcttgctgaggcacgtaagcttttcggttgtttcggtatgcctgccattaacataaaaaagccgtgcgcccgaagcgaagccgataccgccgtcctttgtgacaagcgaaaggtcggaagaatcgaatgcggttatcagcagcttctttttaacgccgaccgaaagcatacagccgctgccggagcggatgtaaaacgagccgtttccatagcctgccgcttcgaccttttctatgaatttcccggcaacgtaggttttgccgcccgaaaactcataaaggcgtatttcacaggtcccggggtcggcatacatcaaatatttaccgtcggagcttacatatgaagcggcaaaaaacttggcatcggtcggtatttcggtacggaaggtctcttcaccgtcaaacccgaaaaagcggacggatttattccgttcatccaccgcaaaaaaaccgttttcaaggctgccggtgctccatgtgccgtttccgagcactactcttgcgacctccttttgctctgccagtgaaaaaaccgacacggaaatatcggcggtatcaagcccgggatttatgaaatcaatcttcgcataatcgccgttaagctcgacatttgcggtttccgcttcagcagtcaggctgaattcggcgcttctgattttaggctttttaccgggcgagcaggcggtaaaggatgtgcacacaattgccgcgcacaaaatggacggtatgattttattaaatttcattgtcaacctcaaattaaacaagcgttaagactattatagaatggcagcctcgatttgtcaaatacgagctttcgcttttaacccattgccccttagcggaatattatatagaagagttattacacacagggggacatatactatgggtcttaccaaaagctcggtcggggtcggcgcggtcgattcgggccttgaaataaaaaaacagtccgaaacggacaaaataatagcccttgcgggcaacccgaatgtcggtaaaagcactgttttcaatgcgcttacggggcttaatcagcataccggcaactggccggggaaaaccgtaaggagcgcgcagggcttttgccgaacaaggaagcggggctatgttttggtggatattcccggaacatattcgcttatggcacattcggcagaggaggaggtcgcacggaatttcatctgcttcggcgagccggacgcggtggtcgtggtgtgcgacgccacaagccttgaaagaaacttaaaccttgttttgcaaactatcgagatttcaaaaagcgttacagtctgtgtaaatttaatggacgaggcaaaaaaacgcggcattgaaatcgatttgaaagggctgtcggaattgctcggcgttcctgtagtgggcacggcggcacgcaataaaaaaactctttcggatctgacgaacgcactcgacggcattacggcggcgggcacacgcggctttcgggtgcgttaccccgagcctgtggaaaaggcgattgccgcaatcatgcccgaagccgaaagactgtcatacggcagacttgacagccgctggctttctttaaggctgctagaccgcgacccatcgctcataaaggagataaacgcttatttcggtgaggattttttaaaaagccccgcgcttttctcagctgtaaaaaacgcggagggcatactttgcgaaaacggcataacgcataatgagcttaaggatattacggtttcggcgctgatgtctgcggcagaggagattgcggcggcgacggttaaatataaaaagggaaaatacagcctgcgcgacagaagacttgataaaatatttaccggaaaattcacggcgcttcccgtaacggcggcgctgcttgccgttattttttggctgactattgtaggcgccaactatccgtccgagcttttgtcttcgtttttttcctatttggagggtaagctgttgtatggacttacctccataggcataccgaatgccgtgaaaaacgccgttgttttcggaatatggcgggttacggcaaccgtggtttcggtaatgctgccgcctatggcgatattttttccttttttcactctgcttgaggattcgggctatctgccccgcatagcctataattcggataagccctttaagcgctgcggctcatgcggaaagcaggcgcttaccgtttgcatgggcttcggctgcaatgcggcgggggttgtgggctgcaggataatagattcaccgagggaacggctgcttgcgatgcttacaaataatttcgttccctgcaacggcagatttcccatgcttatatcggttataacaatgttttttataggcgtatcgggcggagggtcttcttttcttgcggcaatttttttaacttcatttataattttaagcataggcgtttccatggctttgacaaaaatactttcaaaaaccgttttaaaggggcttccgtcctcgtatactctggagctgccgccctacagaagaccgcagataggcagggtaatagtccgctcggtttttgaccgcaccctctttgttttggggcgtgccgtcgccgttgccgcacctgcgggacttataatttggcttgcggcgaatataagcataaacggagcgaatgttttaagcgtctgcgcagcgttgcttgaccccataggcaaaataatggggcttgacggggtgatactgcttgcctttatcctgggcttccccgccaacgaaacggtgatacccataataatcatgacctatgccgcgagcggtacaatcgtcggcgcgggcaatttatcggaaacccttgctcttttcttatcaaacggctggagcgttcgcacggcggtctgctttataattttcacacttatgcattggccatgctcaacgaccctgcttacgataaaaaaggagaccggcagccttaaatggacggtgctggcgttcctgctgcccaccgccgcaggtgtgcttttgtgtattgcggcaaatcttatttttaagcttttgtagggggattactcacccatattaagaaataaatgtttctgcacagactatcggctcccttgtgtaaagggagctgccgcggatagcggctgagggattgttacagacagcggattttattctttgcccggatttataatgcgcttattattttttacggcataattataagcaatttcagtgccgcttttgcgtgatttcggggcggcggctttatcaaaataaataatacaaaattcacttttatctatcatttcgcagttacgctctatatacaccgattttcctgaatttaacagcttttcgggatagtaagtgtattcgtatctttctgaaagatattccttatagctgttgtctgtgtaggggtattccgcccgcacatagacacgttttatgtgaggaaatttttctttgatttttgtgacaatctcatagcatatgtcgttaaatcggcttttgctgccaaaaagaaaggtatcgacattttctgccttaatcaggttttcaacgacgctgcttaaccttaatcttaaacctttcgtatcctttgtttctctgtgacctataaaacagcaggtattttcttttgccatacgcttcacctcaaaattattattattcaattattatacattattattgacttaaagtaaataaatctgcagttgtatatgataataattctttttctttttcggtaaaatatatatgtgcaaaggaaaagaggaattaaaatgaaaacagactttcccgacaaatatataactctcggtttgaaaattgcatattacagaagaaaagcgggttatacacaggagtatttggcagagcttataggaaaaagcgtaagctttatcgggcaagtagagggaacgggtacggtttgcggtatttctttggaaacactgtttaagatttcggaggtattaaatgtaccgccttcaaagctcttggaagaggattaataatcttaacgcatgaaaatttaaacggataataaaagcacccccgctgctgtcgttcggtttgacagcggcgggggtgtaatgctttatgcttatttcatgcctgctgaacaattcaaaagtaccttaacccgagcatgtcggtgtaaacttttgaattgttcaggtgcaaggtttttgcgcaattttgcgaaaaa

SEQ ID NO: 2259 - DNA, 2828 bp, Unknown
  16S sequences of unknown bacteria
cctgcaagttgggtgagactccaaacacgcaagctttgcgcagcgcgtttggtcaagtcgaacccatgcagcgctgtggaatttccacgcgcagcgtgggaattatgcgcgcagcagggggcaatcccctcaaacgcgagcccagcgtagcggtaagcaagcgtcaaaatcttaagcgagagtcaaaatctctgattttgttacgcaagcttacacagcgtgctgattttattgctcaagtttatacagcggagttgcgtttgactttattctcgcggcaggtcgatcactgtggcggtatgaccggtccaggggagaaagcgatccaagacggtggcggtctccaggcggagggtgctggtgttgatgcatggatgtgcgccgagccaggggtcagacgcgacctcccggtcgatatagacatgcagggctttttcccggtcgttcatcaggcccagaatgctgacagagccgggggtgatatccagatagtgcagcattgcatcggcatcggcaaaggagagacggctgacgccaatcagcttggagaagaccttcgtctggaagggcttatccccgggcagcagcagaaggtaaaattccgtcttctgccggttgcagagaaagagattcttgcagatcttcgcgcccaggcagccctcaatggcaaggcaggcgtcgatggtatccgcgtggggatgatcgacccggtcgtaggcgattccaagcgcatccagcgcgtcgtagcagcggagctccttttccggacggccggtcgcgtcggccgggcggccgtggtatcgttccatgcgttatccctccccgcgctgctgcagcgcctcggccagctccaagccgggattgcgcttgatggtaaagtcgatggcccagtaggacgtaaagaccagcaggcggttgccgcggtaatcctccagcagttcgacgtcgctggagaggttgaggtcctgcatattctgcaccgggcaggcggtgatgaaccgcagctcttcatagggcagatggtccatccgcagctccacgccgtactcgctgcgcatccggtactggaagacatcaaactgcagcgtaccgacgacgccgacgatgacctcctccataccggtattcggcaccttgaagatctgaatggcgccttcttgcgcgatctgttcggtgcccttgataaactgcttgcgtttcatcgtatccttcggcgagacgcggcagaaatgctccggggcaaaggtcgggatgccggagaagcggaatttctgccccgggacggtgatggtatcgccgatggagaagatgcccgggtcgaacacgccgatgatatccccagcgtaggcctcgtcgacgatctcccgctcctgggccatcagctgttgcggctgcgacaggcgcattttcttgccgccttggacatggtaatactcccggtcccgctcgaatttgccggagcagatgcgcaggaaggccagtcggtcccggtgggccttgttcatattggcttgaattttaaagacgaaggcggaaaactccggctggaagacgtcgatcgtcccgcagtcggcggttcttgccagaggcgggggggtcaggcgcaggaattcctccaaaaacggctcgacgccgaaattcgtcagcgcggagccgaagaacacggggctcaggctgccggcccggacctcttccatggaaaattcccggcccgcgccgaggagctcgatctcctccatcagctgctcgtgccgggcctggccgatcatgtcaccgaccttcgggtcggctagcttgatctccagcttgtcggcccggttcttgccggagacgccggagaagaatagcagctgaccgttgtgccggtcatagacgccctgaaactccttgccggagccgatgggccagttcatggcgtaggtctcaatgccaagctcccgctctaattcgtccagaaggtcgaaggggtccttggcgtcgcggtccattttgtttacaaaggtaaagatcgggatatgccgcatggcgcagaccttgaacagcttgcgggtctgcgcttcgacgcccttgctgccgtcaatgaccatgacagcggcgtcggcggccatcagggtccggtaggtatcctcggagaagtcctggtggcccggggtatcaaggatattgatgcagaagcctgcgtattgaaactgcatgacggacgatgtgaccgaaatgccgcgctgcttttcaatttccatccagtcggacacggcggcccgactgttcttcttgcccttgaccgcgcccgcctgggcaatggcgccgccgtacagcaaaaacttttctgtcagcgtcgttttgccggcgtcggggtgcgagatgatcgcaaaggtccggcggcggctgatttcctctctcaggcccatagtggttcctcccatcgtaatacacggcggcgcggcgtttcgcgtgcgctgccagaggtgtattttaccacaaatatgcccaaaacacaagcaattccaaccgcctcctgtcaaaagaaggaaaaaccgccgccaaatcccggccgcggcagaaaacagcgggaaattcccggggaaaacggttcttctcccggaaattccaatttacaaattcgatttgccgtgttaaaatagaagctgtaaaattaaaatactttaggaggtatttaatttggcaagaaagaaacttacaatggacggcaataccgccgccgcacatgtcagctatgccttcaccgaggtagccggcatttatcccatcaccccctccagccccatggccgactatgtcgatcagtggtccgctgctggccgtgaaaa

SEQ ID NO: 2260 - DNA, 2439 bp, Unknown
  16S sequences of unknown bacteria
tgtgcctgtgtcttttcgccgcggctttgcccgtttgcgccgagcaaagctctttcccgaaatacacatatgacaacagttttcttttgacggtcgagtcatccgaaaacaaggtttacaccttggaggattttcccgatatttcggccgactgtgtttttactgcctcaaagcggcttgagtcaaaaaccggtcccttcacctatgttctcatgttcgtttttggcaccgatgccgaaaataaaatcgaaagtgcgatgaacaagtacggtgaaaaggcaaaaaggaactattatgcaaaggattatgccgaaaaaagctcctacataaccctttcggacagcgagatttatcttgcggtcggtcaaaacgggaaaatttccgtcaccgatttctttatcgataaaaacgaaaccgaccttgcgggcggaatcgattttgtttgcgaccccgaaatttacggttcggaggattttgaccgttctgttcttgcccgctacggtattaaatcggcaactaccggggttgcagaatatgacgaaaccatcaccgaatacggtccttgccacgattttaagaaaaatcaggaggtttttttgagtatgtttaatacgggaagggtggacgataatgtcgatattatcgacgccgccgatcggctgagcaaggcggagggtatatattccgtgcagcccttcttcagaaacgacagaatcgaaaaggacgcgcctctttcttcttcaaacaccgaatggtgtttcggcgacgggtcggaaaacggtgattatattgaactttcggacaatgttatttcgggaaaaggcacctttgccgaattcaccggcgtaaagccgggtacgtcggttttgaaacttgaatccaagtacagagagaatgtgaccgaaagctcctgcaccgttcatgtatatctcggcggagacgtaaaccaaaacggagaggtcaccgtgaccgacgcactgcttgccctgcagagcacggtgggaaaggttgagctttcaaaagtccagaccctttcgggcgacatgaacggcgacggaaaaatctctgtggacgacgcccttgtgattcttcaaatgacggttggaaaatagagtttgtgacatcatgtcaaatgtaccgaacgaatgtgtttgtgtttatgatgtggaattttgactttgttaatgaggagctgttatgaaaaaatttgtcgcattgattactgctttgtgcatggcggcggtgccgctttcagcggccgccgacggagacccaatcgaggaaagctttgaaaacagcgtgatttacagcgtttatgacagcgaaaaacgagcctttgcgcccgacgattttgaaaatgtaaagtgcgaaaaggccgaaatcataagcatggagaaaaacgacgacggcacatatgattacaagcttcttttgacggtgggtataaatatgaccttatatgcaatttcgacggcgattttgatgaagttgttaccgaactttcacaatattccgacatctattcggtgtcgagaaacatttatgccgacgattattttaagggtgaactcggtcttaaattcaacaaggatgaaatttttgtgccgctcgggggaacggccgaccaattttacaccgttaaacaggaaattatgcccgagcttttgactccctatgccgtcgagatagcagtcgacccgcaaaagctcgatctttcgtcgctttccgaggagcagctctcggctcttgacatcaccgatatgttctatcccgaggaaacgggttttgaattttatcaaaacagagaatacaaggtcgcccgttatgacaacacggttataaagggaggaaaaagcgaaagcgggaaatatttcctttatgtgggcttgaaaaacgaaatttacaaccaagagatgttaaaaaaatatatcaaagacggcaaatttgactttcccgcatacatcgacagattggttaaaaacgacggcgttaaggccgccgagatactttatgacgaccgaaagctcggaaatgattttataaccgaatattgggaagtgtccgatgaaaatattgtttccatgacgctgtcgggcggaaagccctcggtggagggccgcgacgatattttctatgagcagacggcgactcttaagggtctcaaggtcggagatacttccggaacggttgtcagagacatcatacatcgattcggtattcacgtttatctgcccatggacgttaacgttgacgggcgggtgtcggtgactgacgctttgacggttcttcaaaattcggtgggaaaaatcgaaattgagcccgagacggtgccctattatgcggcggacgccgacggtgacggccgcatatcggtgaccgacgcgctgattgttttgcagagcacggttgagccgcaggcgggttaataaaagcaggctt

SEQ ID NO: 2261 - DNA, 10400 bp, Unknown
  16S sequences of unknown bacteria
ctatttcatcgcatacccttcgtcatacgggatgtaccagactgggtgagaataacgtcaatcccaaagttatgcagtatgtgatgggccattcagatgcacagattacaatgaatgtctataatcatattgcagaaaagtctcatgtggagaacgagatgtccaaaatgaacctgccagaaaccgtacctgctgtggtataaaccataagtcgttgtcgtaaaatgtggtaagaaaatcagacgaatatatttttccaagaatttgtcgtaaaaatgtggtcaaatcaagaaaatcgagtgcgaaagcaagtgaaaaatccctgtgaagcccgtaaaatcaaggcttcacaaaatcttcacaaaataattagcactcacctcttgacagtgctaacaactggtgctatagtacacatagaacaaagaaatagacatcagtatgtcagatttataatttggcatcagctatgcgaggcgaggaggcgagcatatgaacattcagaaatttacacagaaatctgtggaagcagtcaataatctggaaaagactgccatggaatatggcaatcaggagattgagcaggaacatctgatgtattgtcttctgactcaggaggagagcctgatctccagactgatttccaagatggatatagattctacgttgtttaaggaacaggtggagcaggcactgaaccggagagtgaaagtatccggtggtcagccttacgtgggtcagtacctgaataaagccttgatcagtgcagaagatgaagcaaagcggatgggtgatgagtacgtgtccgtggagcatctgtttctgtcattactggacaatccgagtccttccatgaaggatctgttccgggaaagcggtattaccaaagatcgttttctgaaggcattgtccagcgtccgcggcaatcagcgtgtgaccagcgacaatccggaagcaacttatgacacattgaacaaatatggtacagagctggtagcgcgtgccagagagcagaagcttgatccggtgatcggacgtgatgcggagatccggaatgtgatccgtattctgtcccgtaagaccaagaataacccggtgctgatcggtgaacctggtgttggtaagacagctgttgtagaaggactggcacagcgtatcgtccgtggtgatgtaccggaaggattgaagaataagaagattttttcactggatatgggtgctctggtggcaggagccaaatacagaggtgaatttgaagagcgtctgaaagcagttctggaagaggtcagaaagagcgaaggacagattattctgtttattgatgagctgcatctgatcgtgggagcaggcaagaccgatggtgccatggatgcgggtaatatgctgaaacctctgcttgcaagaggggaactgcattgtatcggtgcgaccactcttgatgagtaccgtcagtatattgagaaggatgcggcactggaacgtcgtttccagcaggtactggtggatgagccgtctgtggaagatacgatttctatccttcgtggtctgaaagaccgttacgaagtattccatggagtgaagatcacagactcagccctggtggcagcagcaaccctgtcccatcgttatatttccgagcgttttctgccggataaagccattgacctggtggatgaggcttgcgcactgatcaagaccgagctggattccatgccgacggagctggatgagcttcgtagaaaagttcttcagatggagattgaggaagccgctctgaaaaaagagactgacagactcagtcaggacagactgcagacgttgcagaaggaactggctgacttaagagatgaatttaataataagaaagcacagtgggatgatgagaagaaatccgtggagaatctgtccaagatccgtgaagagatcgaggatgtgaaccgtcagatccaggctgcccagcagggctatgatctggaaaaggctgcacagcttcaatatggacgtctgccgcagttgcagaagcagttggaggaagaggaggagaaggttaagaataaagacctgtctctggttcatgagagcgtgaccgacgaagagattgccagaatcatttcccgttggaccggcattccggtggcaaagctgaccgagagtgagagaaataagaccctgcatctggatgaagaactccataagagagtcatcggacaggatgaaggtgtacagaaagttacagatgcgatcattcgttccaaagcaggtatcaaggatccgaccaagccgattggatcattcctgttccttggaccaactggtgtaggtaagacggagcttgcaaaagcactggctgccagtctgtttgatgatgaacagaatatggtgcgtatcgatatgagtgaatatatggagaaatactccgtatcccgtctgatcggagcaccgcctggatatgtaggatacgaggaaggtggtcagctgacagaggctgtcagaagacgtccgtactcggttgtgctctttgatgagattgagaaggctcacccggatgtattcaatgtactgctgcaggtattggatgatggtcgtattaccgattcccagggaagaactgtggacttcaagaacacgattctgatcatgacctccaacattggttccagctatctgctggaaggcattgacgagaaaggcgatatccgtccggagtgtgagaaacaggtaatgggtgacttgagagctcacttcagaccagagtttctgaaccgtctggatgagatcatcctgttcaaaccgctgacgaaggataacatcggacatattgtggatctgatgatggcagatgtgaacaagagattggaggacaaagaacttcagatcgagcttacagatgcagccaaggcttacattgtagagaacggatatgatccggtctatggtgcccgtccgttgaagagattccttcagaagaatgtggagactatggcggcaagatatattcttggcggagacgtccatgcaggcagtgtgatggtcgttgacagagatggcgatggtcttaccatccgaacaaaataaattaaaataaaggctcctgtctggcaaatataatttgccgggcgggagctttttgcgtctcataaaaccaaatttccgcgcataggatacaactaggaaaagtgcacttttttcaaatggttatggtatactggaagcaagactatacaggggtcgaaaaggagaagaatattatggcaaagtatgtaatggcactggatgcgggcacaaccagcaatcgttgtatcctgtttgacaagaaaggaaccatgtgcagcgtggcgcagagagaattcaaacagtattttccaaagccgggctgggtagagcatgatgcagacgagatctgggcaagcatgcttggcgtagccgtggaagcgatgagcaggatcggagctactgcacaggacatcgcggcaatcggtatcaccaatcagcgtgagacctccattgtgtgggataaaaatacaggagaaccggtctatcatgccatcgtatggcagtgccgcagaacttctgagtattgtgattctctgaaggagaaggggctgacggagaaattccgcagaaagacaggccttgtgatcgatgcatatttctcaggaaccaaggtgaaatggattctggacaatgtgccgggagccagagaacgggcagaaaaaggggagctgctgtttggtacggtggagacctggctgatctggaagctgaccaaaggtgctgttcatgtgacggattattccaacgcatccagaactatgctgttcaatatcaatacccttcagtgggatgaagaaatactgaaagagctggatattccggcgagcatgcttccggaggcaaagccttccagctgtatctacggaaagaccgagtcctcattttttggtggagagatccctattgcgggcgcggcaggagatcagcaggcggcattgttcggtcagacctgttttgaaccgggcgaggcaaagaatacttatggaacgggctgctttatgttgatgaatacaggtgaaaaaccggtattttccgataacggactggtcaccacaattgcatggggactggacggaaaagttcattatgcactggaaggttctatctttgtggcaggggcagcgatccagtggctgcgggatgaattgaagatcattgattcctcaccggattcggaatatatggcacagaaagtaccggataccaatggctgttatgtggttccggcatttaccggactaggtgctccgtactgggatcagtatgcaagaggaacgatcgtgggtattactcgtggcgtcaataagtaccatattatacgggcaacactggaatctctggcttatcaggtcaacgatgttctggttgccatggaggcagattcgggcatccgtctggcagcattgaaggtggacggaggtgcaagtgccaataatttcctcatgcagacgcaggcagacattattcaagcaccggtgaaccgtccacagtgtgtggagactacggcgatgggagctgcttacctggcaggtctggcagtgggatactggtctgataaagaagaagttatcaagaactgggccatcgatcagatctttgagccgaagatcagtgaggaagaacgcaagaagaagctgaagggctggaagaaagcagtaaaatatgcctacggctgggcaaaagaggactaagaagataacgttgcaggaatgttcctgagggagcagaatataccatccgataagaacgagaagtgttgtggaaaatgaataaggaggagttctatgttaccctatatctctgaatttcttggaacaatgctgctgatcattcttggcgatggcgttgttgctaacgttacgctcaataaatccggcatgaagggtgccggaagtattcagatcacctttgcatgggggcttgcagtcatgatccctgcatgcatttttggggcggcttccggcgcatccttcaatccggcgctgacactggcacttgccatggacggaagctttgcgtggagcatggtgccaggctatattcttgcacagtttgccggtgcgtttgtgggagcagttattgtatatctgttgtttaaggcacagtttgatgctaccaaggaagcaggaaccaagctgggtgtattctgtactgcaccatcggttcccaataccgggcttaacatgttcagcgaagcagtgggaacctttgtgcttgtatttgccatcaaagggatggcaaatgtgccgggacttacagacggacttggaaaattcattgtatttggaatcatcgtgtctatcggtatgtctctgggcggactgaccggttatgctatcaatccggcgagggacttaggaccgagatttgctcatacggtactgccgatccatgagaaaggcagttccaactggggatacgcaattgttccactgttgggaccgatcctgggtgcactggcagcagtggcactttacggagcaattccgtggtaaccatgtacgatgtggtgatcattggcagcggcgtgtcggggacagcctcggcacgggagctgtcccggtacgaaggaaagatctgtgtagtggagaaggaagaggatgtgtgctgtggaacctctaaggccaacagtgccattattcatgccggatacgatgcacaggaaggttcgctcatggcaaagcttaatgtgcggggcaatgagctgatgggaaagctgtcagaagatctggatatattatttgagcggatcgggtcgctggtagtctgtctttcggaggaagacatgccgggactgaaggctctctatgaccgtgggattgccaacggggtcaaggatctgcgtatcctggaccggaaagaagttcatgagatggagccgaatctgacagcggaagtgtgtgcagcactgtatgcaccaacggcaggcattgtgtgtccctttggcctcaatctggcactggcagagaatgcctgtgaaaatggggtggaatttaagtttaacacagaagtcaaagggattcgaaggctggaatatggatgggagcttctgacagaccggggaaatatcagaacccgggcggtggtcaacgcagcgggtgtctatgcagattattttcataacatggtcagtgagcgcaagatccatattacacccagacgcggtgaatactgtctgctggataagacagccggtgagcatgtgaagcataccatctttgcacttcctggaaaatatggcaaaggcattctggtgtcaccgacagttcatggaaatctcttactgggtccgacagcactggatattgaggatcgggaaggaaccaataccagcactgccgggctttcggaagttattaagaaggctgccctcaatgtgaaggatctgccttttggacaggtgatcacatcttttgcgggacttcgggcacatgaagacggacacgaatttatcatcggggaagtggacggcgcagatggattctttgactgcgcgggcgtggaatctccggggctgaccagctgtcctgccatcggagagctggtggcggagcaggtgagccggaaattaagattaaagaaaaagaaacattttattgcgaagagaaaaggtatcttccattcggattccttatctattgaagaaagaaatgcgctgatccgtgaaaatcctgcctatggaacgattatctgccggtgtgagcggatcacggaaggtgagatcctggatgccattcacagacctttaggagcaagatccgtggacggtgtgaagcggcggaccagagctggcatgggccggtgtcagggcggcttttgtggaccgaaagtcatggagatcctctgccgggagctgggagaagatatgcagcagatcaccaaagcaggcggagcatcctatatggtgaaaggctgctgcaaagatgcatttgaggatgcttatgacattgtcatcattggcggtggtccggcaggactggcagcagccatctcagctcgggagcaggggatggaacgcattctgatcctggagcgtgacagggaattgggaggcatcctgaatcaatgtattcataatggattcggactccatatttttcatgaagaactgaccgggccggaatatgctcagaggtatattgatctggtgcaggaaaaacagatcgaatatcggctggatactatggtactggagattggagcagacaaaaaagtcacggccatgaacaagaaggatgggttgtttgtcatccaggcaagagcggtgatccttgccatgggatgcagggaacggccacgtggagctctgaatattccgggctttcgtccggcgggaatctattccgcgggaactgcgcagaggctcatcaatgtggaaggagtcatgccgggacatgaggtggtgatccttggttccggtgatattggtctgatcatggcaaggagacttacactggaaggcgcacatgtgaagctggtggcggagcttatgccaaagtccggtggattacagagaaatattgtccagtgtctggaagattttgatattccattaaaattacggcatacagtgactgaaatccatggaaaagagcggctgactggtgtgaccctggcacaggtggatgagaaaggaacacccatagagggaacagaggaggagatttcctgtgatacattgctgctggctgtggggctgatcccggaaaatgagctgtccagagaggcagggattcagattgatccgaagacgaaaggaccggtagtaaatgagatgctggagaccagccttgaaggagtcttcgcctgtggtaatgtgctgcatgttcatgatctggtggatcatgtgtcagaggaagcagctcttgcaggaacctatgcggcggaatatgtgcggacagggcaggcatttcggaaaagtcacagtcacggacggcaggaggtgtgatggatggaacgtaagaaactgatctgcatcggttgcccgaaaggctgtgaactgaccgtgtttctggatggaaaacaggtcacaaaagtagaaggaaatcactgtaaaaaaggtgcagtctatggagaaaaagaagtaacagctccgaccaggatcgtgacgagcactgttacggtgctggaaggtgagataccggtggttcccgtaaagacagcttctgatataccgaaagataaaattctggcctgtgtgcaggctctgaagaatgtgaaggtgacagctcctgtggagattggagacgtgatcgttcatgatatcgtacatacaggtgtggctgtagtcgcaacaaagaaaatccgtgtaaatgcaacaaaaaaatacctttacaaagagctgtaagtatgttagagtaacaaggtatgaaattcagccgtcattcagagtctggacactccgaccggcccttgatgacaggcgtttaaaagtataggaggaagaaacatgatttctaaggaaaaaaagcaggcaatcattgcagagtacggacgttgtgagggagacaccggttcaccggaggtacaggtagctatcctgaccgctagaatccaggagcttactgagcatctgaaagttaaccagaaagaccatcattccagaagaggtcttctgaaaatggtaggacagagacgtggtatgctggcatatctgaaagagaaagatatcgagagataccgtgcactgatcgcaaaattaggtcttagaaaataagaaaccatagggcggagaatttctccgccctgttttgagtggaagataagttccgagaccactgaaaagcgcagaaatcagtgcttttctgttcttttcagtagtttcggtatcttccacaagcaattcagaaaggagatacaattatgtacaaaagttacacaatggagctggcaggcagaactctgagagttgatattggtcgtgttgcagctcaggcaaatggtgcagctttcatgcactacggtgatacagttgttctgtctactgcaactgcatctgacaagccgagggatggaattgatttcttcccgctgagtgtagaatatgaagagaaaatgtattctgtcggaaagattccgggaggattcaacaagagagagggtaaagcatctgaaaatgcgatcctgacatcccgtgttatcgaccgtccgatgcgtcctctgttcccgaaggattacagaaatgatgtaaccctgaacaatatggttatgagtgttgacccgtcctgccgtccggagctggtggctatgctgggtgcagcaatcgcaacctgcatctctgacattccgtttgacggaccgtgtgcaatgactcaggtaggtatgatcgatggcgagtttgtgatcaacccgagccaggagcagtggaagagcggcgatctgaacctgaccgttgcatccaccagagagaaagtaatcatgatcgaggccggagctaatgagattccggaggctaagatgatcgaagcaatctatatggctcatgaagtgaaccagaagatcatcaccttcattgatacgattgtagctgaagttggaaaacagaagcatgagtatacaagctgtgcagttccggaagagctgtttgcagcgatcaaagagatcgttccgccagaagagatggaaaaagcggtatttaccgatgataagcagactcgtgaggagaatatccgtgtactgaccgagagactgactgaggcatttgctgagaaggaagaatggctggcagtactgggagaggctgtatatcagtacgagaagaaaactgtccgtaagatgatcctcaaagatcacaagcgtccggatggacgtgagatcacccagatccgtccgctggcagcagaagttgatattattccgagagtacatggttctgcaatgttcactcgtggacagactcagatctgtgacgtgtgtacactggctccgctgtctgagcagcagaagctggacggactggatgagcatgaagtaagcaagagatacatgcatcattacaacttcccgagctactctgtaggagagaccaaaccgtccagaggaccgggacgccgtgagatcggtcatggtgcactggctgagagagctctggttccggtactgccgagtgaggaagagttcccttatacgatccgctgtgtatccgagacctttgagtccaacggttccacttccatggcttctacctgtgcatcctgtatgtccctgatggcagcaggtgtgccgatcaagaagatggtagcaggtatttcctgcggtctggtaactggtgagactgacgatgatttcgtacttctgaccgatatccagggtctggaagacttcttcggcgatatggactttaaggt

SEQ ID NO: 2262 - DNA, 5701 bp, Unknown
  16S sequences of unknown bacteria
gtggtaatcgactaccgggtcaaggtgctgatcccggagaatgaggtatggttcaacgaagccaccaggcggccgccgcacgtcctgcgctccatggccggcgccaccattgactatgtcattaccggcattgaccgagaggcggggtgttgtatcgcgtcccggcgtatggcgctggcgatccgccgccgcgctttcctgcgcacacaccctgaacccggtcagaaagtgtcgatccatgtgctggcggtcggccgacagcatatgctcgtcacctgcggcggctttgacatgaccctttctccccgggacatctcctacgccatgattccggaactgcgggaacggtatcacccaggtgaagcctgcaccgccgtcgtcaccggctatatacccggcacggaaaagctggcggtttccattaaggaggctgagcctcaccccttcgacgggatcgatacgcgccaccccgtcggctgtcgccgggcatcggtcatcactggaaaataccacggcggcgtcttctgccggttggaggacaatctcgactgcttatgcacctattcccccgaacagtacgacgaggactttcacatcggcgatccggtgattatcgtcatcacaaaatatggctacgacaaaaaacaggtgtacggaaaaatcgtgtccaagtggtaaaccaggatttacctgtagatttgcaaggaaactggcctataatagaagcaagaacatatgtttctgttggcggtgggttatggaaagagtcatcctgcattctgatctgaataacttctatgcttccgttgagtgcctatacaatccggaactgcggggaaagccggtggcggtggccggtgacccggaggcgcggcacggcattatcttggcaaaaaattacccagccaaagcctgcggcgtccagacgggcgatcccctgtggatggccaagcagaaatgcccggacattgtgttcaccccgccccattatgaccgctatatgcagttttctcagcttgcccgggagatttacagcgaatacaccgatcaggtggaaccctacggtttggacgagtgctggctggacgtgaccggcagtatcgccctgttcggagacggcagggcgattgccgacgaggtgcggcggcgcatccggcaggaactgggcgtcaccgcatcggtgggggtgagctacaacaagatatttgccaagctcggcagcgatatgaaaaagccggatgctaccaccgtcatcaccagcgaacgattccgggagagcgtctggccgctgccggtgagcgacctgctgtatgtcggccgggcgacccaccagaaactcaagcgatactgcatcaagaccatcggtgatttggcagccgctgaccagcggtttttacagcgccttctcggtcaaaacggattgatgctctggcgctttgccaacgggctggatacgtcgctggtatcgaatatcggcgccaaatcactcatccattctatcggcaacagtaccaccgctccacgggatctggtaaccgacgaggacatcaaaatcaccctgtatgtgctgtgcgaaagcgtgtctgcccggatgcgggagtatggctttgtgtgcgatactgtacagctcggtgtgcgggacaacgaactgcaaagctatgagcgccagggcaagctttcctatcccaaccggacagcgaaagctttgtttgaaaaggcgtttgaactgtacaagcgaaaccatttgtccggcaagccggtgcgttccctgagtgtgcgggcctgccgcctctccataagcgagaacgagcagctttccctgctgccggacgtggccgccattcaaaagcaggaggaactcgaaagcgcggtggacgccctgcggggccggttcggacctttctccatcaggcggggaatcctgctggcggatcggcagctatccggcctcaatcccaaagacgaccatatcatccacccggaatcctttttcaaaagctgaagggcgccgcttgcacggcgtccttattttatgcttttggaccgccgtattcttgctgcatatctacgcatccttctggccctttgtcatccaaaaccaccaagtgtaaaccgccgattctattccggtgaatttcccatataccatcgtctggtataccggctctggtagccataaagttccgtgtcgaattcttcttcgatccacataaaaaagcccctttggtatagtctgccgaaacagcagcaaactatatcaaagaggtggtcgcatggcacggaaggtttatgttgaagtaacggcacgatttgacgtggacggaaaagtcacaccgctatccctaacctgggaggatggaacggtgtttgaaatcgacaaagtgctggactgccgccgggccgcttcgttaaaggccggcggagtcggaatgcggtacatcattcagataggcaagcggcaaagctatctgtattatgaagatccccggtggtttgtggaggcgaaggacacatgagtcacatagctttctgtcgggtcaggatgcaggcggcgacgcgatccgcgataatgccgcggtcgcgaacaggatagtattccagcagaggatgtacggcggcgtgaatgtcctccaccgtcagctttggcatgaaaagctgttttccggtcaagctacgcgccgcgttcatctggcgggtaaaggtggtgttgaagggtcttgcccgcagtgcggcaatcagcgccttgggatcaatgtccattggagagagttgcgtgttggacagcagccccgcgccgttgtcgaagatcgggcaatatgcgtaccgcccctcctgctcgataaccgcgatattattgagatgccggtcatcgttacagaacagcgcatccacctcaaaaagcagcgtcaaatactgctgaaattctttcagccctgtatattccgccgtggcttcgcctaaaaacgcaatcctctgtttgtcgctcggaagccgcgccagcttttgcttgagcggcattccaaggaagcccgtcagcaggcggttcagggtgatgagggattgtcctggcctcagaaaattttcgcttacgcatccggttctctcccgcccatgaacgtgtatgcgctccaatcggtatcgtacaaaggtaaacggggtatcgctctccaggccgctttgttccagcagagcggagatcacggtttcagccagtgcctcatacccgaattgatccagcttataccagcagttggcggcatcatcccgccatttttcctgattgcccttggatgaagtttcggcaatcttttcatccgaaacaagccgtatagtcatgacagttcatccacctccagccactgatgatcctcagccatgcggcctccggttctttgtatgattttcagcgggtcgtattcgtcgatccccagcgcttccagatactcgcgaagcccggcacgctccctgggaatgcaccgctcctgcaaaaaagcctgaagatccgcccagttcgggagctgattattgccaaaggcggtttttacaggatcttctatatggttctccactacaaatgtttcatcggtaaaatccgcataaatggtggtacagagtccgtcgccatcataaaagcgtatccggcgcagcaaatgccccagattacgtttctgcgtggtaaattcctgcccggacagaggacgggcaaggataatggtatttccgtcaaaggaaagctcgacgtcacgactttcctgtttcagacccagcgcctccacccaggcggtcggcaaggtgaccttgcaggtttgagcgccttttgacgccgtaccgcccgctgcagaaaaattgattttcgctaaccgtttttccattcgtctcacctcaatactattatatgatattcggtacgaataatcaataataaatacaaaataagggcttgattatggcaagcaaatcccctgcggttcatcatgaaccgcaggggattttatgcgttaggcagccagcttcatttgcccctgaaggctccgtacacggagttcttcggactgcatctggagcatggcatagtcgttgttgagatcgtcaagtttccgtttcagaatctcttcgtaggtgtttttcttttcctgaagcgccttgagcttcagcagccatcgactgataaccgtcggcgaggtgcagccgttatcaatgaaatgctgaatacgctctttgtactgttcgatatcgcgcttgtagttgatataaaactcctccgtcattttttgacgctggcgatcatcatccaccacaaacatactattgctcatcaccagaccaccaccaaggttatactggctgatggcgtcgatataatcttccagcatattcagcttctgcaaatacggattggggataaaatacaggttgccgtgaatgctgattttgttcgcctgcagccggtcgagctgatcctggataaccgaatccacatggtcgagagtgtagcaggtgcaataccgctcatagagggtgagcgcccgctggcaatactcggccacatccacatccgggtcatagacctcatcctcgctgaacatggtttcagtctctttgtcaaagacgatattggcgagctttttgtactcgttggtacgggcgttcagggtttccttcaccagttcccggtagatatgcgcagagtcctcccttttgttgtcccggcaatagatccgatacactcgagtgccagcgctgtctttcacttcgatccgctccttaagagcggtcgtcgcgttgcgataggcgccagctttcgattcctttgcaggtttgaacttcggcaggccgaaatccatgccgacacggatgaactgttccttggggatcaggatgtttgccagggagtagtagaagaattttccgatgattccaccggtgttctccgggactaccatgagattttccatgcttttcattgctatttttcctttcgttctcattatcatggacgcttttttagtggcagaataagcatttgcagacgtgccgacatatcctgaaacatcgtccagcgaccggggtcaaactgtcggtaatactcccggcacttgcaagcccggtagaggcattcctgtacccgccaggccgcttcaaactgtttggaattgaggtcaaataagcgaagatcataaagaccgggaaaaggctgatagtctttgcgcttgcgttcaggctgcatgagtgaagtcctttccttgtgttactatcgggcgcctcgggttgtcaccaaagtcagcgcctctcctccaacatcattctgggcctcctgctgcttttccaggtgctttttgcatttggggtaggacttgtcgaggccgataacatcggccagccggtcgctgatctgcatggtgcgttttgcaagctcctccttgttgtgctttgcccagaaattctggggcgggttcttctccatatgttccctcaaaagccaagaatagtcgtccaacacgtccacaatgatttgcagatcccgataggacatattgaccatatggattttatagtcccgccagtcggcataggagagagtataggtggaaaaaggggtgtttttcatataggcatatcctccagtattcgctcatgctgcccggtagagatgttcttgcttgagcttttcaaataaaagaaagtcgtcgatgcccttctg

SEQ ID NO: 2263 - DNA, 1894 bp, Unknown
  16S sequences of unknown bacteria
agatgtgtataagagacagcaaaatacacggcattatccatagagaaaagacttttatgcttggaatccggtaaaataacaactccattcctgttatcttgtccgtgcagagcggatcggatttgaaaacggtgttcttcggtaacctggaaagttgtgcagcgcaaactgtatacctgctggcaaaaagctttgaaaattttctgcgcctgattctggtttgcgctaccgccaatccagtgaagcaaaccgtctggatgaacaaaaaacaggcagaaagaggccgcggagatacttcgatacgcgttggagtgattgccggcggaaaccttcatttgtatccattaagtccattcaagcgtgttttaagaacagcaagatcagatagcatgatgaatactgtccattttggtttgattgcgcgtaactttggcagaaaaaacagaccatctgtttccaggtttattatgctgccaaacatgaacaaacgattttggaaatgaacggcgcatataaaatgcgccgttctgagcagcccccagtttgcttgaaaagaaatgccttcccttctattttaaatgcaggggaaaacatagatcgcgaggtggttttgatgcgtgaaatccgaaaaatacgggctgttgccactgtaacgcttggggaaaggatgtgatggaagccgtctaaaacagaaaggatgtatcgttatatgaatctgcccagtccggatgtggtattccccaatgaatacaaaacatcctgttttatcaaaaatgtggtcaaagcccccaatatttccattggggattacacctactatgacgacaggcaaaacagcgccgctttcgagcagaacaacgtgctgttcaactatccggaattcggagaccgcctgatcatcggaaaattctgcgctatcgctgagggaacgaaattcatcatggggcctgccaaccaccgtctcagcagcgtgaccacatatcccttcagcgtgtttggcggaacatgggaggagaatacgccgccgcatttatctcagctgccccgaaaaggcgatattgtgatcggaaacgacgtttggatcggccgggagtgcctgatcctgcccggcgtgcatatcggcgacggagcaatcattgccgcccgctctgtgctcacccgggacattcccccatatactatcgccggaggcaaccccgccgccgtacgccggcagcggtttgacgaagcagtgaccgcgctgcttctggaactgcgctggtgggattttccgcccgaagtactggctcaggctctgcctatgctgtgcaatccggatctggaagcttttacccgctgggcacaggatctactgcgccaccggagcacgcagaaggacagcaatcgataaaatcttttcaaaaactgcacaaaacctattgactttttttggcacaatgttatactacatctatcagcaatggcgctgtgggaatagtttcttcccacagcgccttttcttttttgtttgaaacaagaagtttctcaattcgttaaaggaggaatttttgatgtcagaagcatccagccacgtccccgccatgttcggcagcatggtattcaatgaaaaggttatgaaggagcggctgcccaaggacacctacaaagcactgaaaaaatgcaaggatgaagggattcctttggatatgtctgtggctaccgtcgtggccaatgccatgaaggactgggcactggaaaaaggcgccacacactacacccactggttccagcccatgaccggagtgaccgccgaaaagcacgacagttttatctcccctaccgacggcggcggtgccattatggaattttccggcaaggagttggtacgcggcgagccggacgcttcctccttccc

SEQ ID NO: 2264 - DNA, 4145 bp, Unknown
  16S sequences of unknown bacteria
tcgccctcggtgttgagattcagatcggctgtcaaaacggcgttgtagccggtattccccgcattcacctgctgggcgagccaggccaggttctcggcggtggcgatctggtaggtgttgccgttaagggtcggctccgccgccgtgccgtcccaggagataaagggctccagggcgatggtctggggggcgtcggcatctgtcacgttgatatagccggtgacttttttgtagccggtggtgacgatcaggtagtcgtaggccccgacggggacgcgatacgtcccgtcttcttcggcggtcataacctcgccgtattcattccgaagggtgatagccgggacagcttctgtcgtcaggccggtgaatgtgaaagaaatgacgtattttgtcgattcctgcaggttaatggtgatggtcaagtccgcaccggagacggtgaaggcgacgcttgacgcggtctcgtagccgaaacggctggcggtgtaggagtacgtgccgtcttgcaggatgtagctgccgtcggattccggcgtcagtatctcgcctgcggcgttctgtacctccagagctgcgccttgggggaggttctggaaggtgacgcgccaaaccttcgtccagacggcgtagaggtcgaggtcggcgtccgccagggtgacggaagcgccgtccgcgtaggcgacttcgctgctgcctgcgctggtggcccagccgtcgaagcggtagccctctcgggtgaaggtgttggccgtcaggttgccggtgccgaaaacgctctgggatgccgtcgcgtccgtgccgtcgttggcgtggaagatgacgctatggggcagggcgacggcgaagtccttgaggtagacgcagtcgtcgttgccggtaccggagacatccttgacgtattccagcgtcagagcatcgcccgccgccagctggacgctgtaggacttgaattccgccatattgccgctgaaatcggccttctgtgaatagtcgtcattcagggccgcgccgtttttgctgatgcggaggaagtcgaatctcgactccgaggaggctttgtaggagaacgtcagctccgcggccttggcaaaggtcagggtcagtgcagaggcggagctatcgacgccggtgttcgtcgagacgagggcggtgccgtcgtccgtcacggcgaaggggtagtccgacgcgctggccccggcgccattggtcacagtggcgatgccgtccagggcggtgaagaaggaatcaatgccggcggcctccgtcgcggtctccacgatggcgacggtgtagacgcccgcctcgaccttctcggcgccgccgttgctgctgccgttgttcatggagggccagtcggggtggccgacgacgatcttcaggctgtcacccacagagacggggaccgtctcgccgggacggtagccggtttttgccgggtcatacgtcgcaacatgataggtctggacctggaagttcttgttataggctgccggggtcacgaccagattcgcagccgtgacgccctcgcccagggcaagctcataggtcttgctgccggaggcaaacttcgggctcagggtcccgccggtgatctccaggctggccagcgttttggtcgtgtccttggcgatgctgccgatatccggcccaccattcatggtatagcgcatgtagatggtatccccgctgcgcaggttattgctcgcaacagtataataccccatcccttgattggtaaaccagtcgttcagggtgaacatccaacctgctgcatagctggtcggatctgcccgcaggccattgatctcggtaatataggccttctctgcaccggtcagggagtaatttccctctgccagtgccgcctgcaggcaggagactgccgtagagctgctggtgagctccaccgttttatccaccaggataccggaccaggcggtcgcaccgctgacccagctgccggtgtcggtttccttgcaggtgttgttttccacaacgacccgcacggtgccgacggtgtccgccgcgccgtctgccgcaaatacggacagcggcagcaggctcaggagcatcgccagcgccaaaaggaagctgcaaactcgtttactcataggttgtttcctttctggatttttctttctgatcggcaggcagctgcgtgcgctgcccccatgttttccttttcctacgattctctaacagattacaggataaaatgctgcaaaaaaaagcacatggccccctttctcaggatattgccatgcacccgtatttgcgcatagaatcagcgtaaggctgatggagctgaccgtctgtcttctgacttgcgataggaggcaaagcctctgcagggcgcgcctaccttcccatgcgaacacacagtggaagcctttcggctcacgccagatcgctctgacgcttcggcggcccttcacgcgcacagcgccggtaacgtggggtcgttttgacgcccctttccttctcatgcacgccccccgctgcggcgcggtcaggggcgggcatccggtcagttgctaaagtaccattattataaaggaatgcgcagaacttgtcaatacaacgccgttgctgggcggttccttttggagggccccggtgcaatgctgggcaccaaagggctgcacccagtggccagcggcccttcgggcccagtgcgcagcacgcaaaaatccctggcctggggccagggatcggggcgcgctattggttgagaaacgcatgcaggcggctgaggttttcggcgacgtcgtagccgtagagctcggcgccggagacgtacatgatgccctcgtaggtctcgccgctcatgttttcgatggggagcatcagctcgtcgatcttgaaatcggacatcgtcgccaggctcacggcgtgggagaggatctccgtattcgtcaggtccgtgttgaccagggggaaaattttgttggcaaactcgttcagctccgcaaccgtggagtgggtcgccttctccagcagggcggtgatgacggtgcgctggcggctggtgcggacgaagtcgttgtcgatcttgcggatgcgggcgtaccagagggccgtctcgccggtcaggtgcatcgtgcccgcagacaggcccgcgccggggacctctttgttgatataattcgcctccgcctgggtcaggtcaatgtccaccccgccgacaatatcgacggcctgctggaaggcggagaagtcgacgatggcgtaattgtcgatatccaccttgaaattcttctcgatcgtcgcaatcaggaggtcgatgccgccccaggcgtaggcggcgttcagggcaaaccaggtgttgccggtgtccatggggatgcagacgtaaagcgtccgcatcaggctggtcaggtgaattttgccggtgtcgtaattgatcgtcgccagcatcatggtatcggaccggccgatgtcgtcggtgctgcgggtgtcggacccgaccagcaggatcgtctccgacccttcggggcggacgagctcgccggtgtcactgtaggcgccctgcattttggccatctcttcctcggaatcggcggcgtcggtcaagagggtgtcatccccgagggcctcggcgtaggacagggcggcgttgccgctgatagtagagcggtcgatcttccccagcagaatattgagatacgcatacgccgacgccgccaggacgaccataacgcacatcgtccacaggatgatgcgcagccctacgggcaggcgttttcgttttttctttggcggttcctcgtgcaagaatttgccttgatacattttccggctccttttcgataattatttgcagtataacacatttttatcggaaaagaaaccctgcaggcgaattttttaagattttaaggtttggtgcgggtgccaggccaaaggcacccttgtgcatggggcagacgccaagggcgcgcagcgtgattggctcaatcgaacccatacagcgtagagggattgatgcttagcaaaagcaaatttgcagcgtagtgctcgactactccaggcgttaaaagtcaagctttgatatctttccatgctaattcctaccaggcaagcatgccagcgccctccgggggcccgattctttcttctccagcgaagaaagaatcggggaagaa

SEQ ID NO: 2265 - DNA, 3824 bp, Unknown
  16S sequences of unknown bacteria
agcagcagccccagatcgaacaagccgttttccatcccctcgcggatatcgtccgctgtggcggaatggatgttgaaacgcacctgcggatgcttctgtcggaaacgcgccatctgctgagagagaaaggtcatgttggcggtctctccgcagccgatggagatctccccctgcagcatctgcggcgtgctgctgaactcttgcagcgtgcgctccgcgagcgatacgatctctgaggccctgcgcttcagccgcatgccgtcttccgtcagcacgatgtgatggctgccgcggtgaaacagcttgacgcccagttcctcctccagctgcatgagctgacgggagagggtgggctgggtgacatgcagcagctcagcggcacgggtgatgttctcctcgcgcgccgtcatcagaaaatagcgcaatacgcgaagttccatggctcttcctcctttatatccaaaaaaaactgcaaagcacctttgacaagatctttgcagttcaacacggtcaaaacagcctgctgacatcgttgaaggtcgcaaacagcatcagtccgatgaccagcgcaaagctgcctagcatgatcacattgaggacggattccttcagcttgcggcggaacagcttctccagcacgacgatcacgatgcggccgccatcgagcaccgggatcggcagcaggttgaagatgccgatgttcagcgagaacagcgccagcagcgaaaggaacggcaacagacccatgctggcggtctccgcggtcacctgatagatgcccaccggtccgctcacgctgtccagcccgacgccctgtacgatgttctggatgccgcggatgatcatcgtcgagtactcgcccatctgcccggtagcgacgccgactgcctgcagcttggtgatcggctcggcgcgggcgctgctgacggtcgtcgcgctgaaagcgtgccttgctttcctcatcataagccggcgtgatgttcacgctgacttcctctccatcgcgaagcaccgtgagcttcgcttcatcgtgataatactgcagctgctcattgaggcgcgtcgtgctcatatcacgcagcacttctcctcctgcctccagcgcgacgatctcatcgcctggctgcagcccgacttcttccgccggggatccttcctgcacctcatagatgatcggatccgtgtccaccacgacatatccttgcaccatattgatgccgatgaggatgatccatgccagcatgatgttcatgaaggcgccggccgccatgatgatgacctgcttccacgccgcgatcccgttgagccggcgctcttccgggacgttcttcatctcttcgtcttcctcgctgccatcatcctcaccggccatcatcacatagccgccaaaagggatagcgcgaagggacagcgtcgtctccttgaatttatgatgccacagcctgggccccatgccgatggaaaactcatggcagtatacgccaaatttcttggctgtgatcagatgcccgagctcgtgaatgatgatgaccacgctcagcaaaacgacaaaggcaaggatgcccagcaaaattgatccgatatccatcaaaaagctcctttccatttctcgcgcacgaaggctctcgcccacgcgtcgcttttctcgagcaccgcataatccggatccggcacaaaatccgcctgtgccagcgcgtcgatcacgctgcgctcgatgtccagaaagccgatggctcccttcagaaacagctctacggccatctcgtcggcgccgttcatgaccgcgccaagattgccgcctctttttcccgtatcatacgccgccgcgagcagaggccagcgcgcaaagctggcagcctcaaagtgcagctgtgcgcagctcagcagatccagcggctgcgcgttttccatcttcagccggtgcggatagctcagcgcatactggatcggcagccgcatgtccgcggtgcccatctgcgcgatgatggcatgatcctgatactccaccatcgaatgaatgatgctctcccggtggatgaccacatcgatctgctcataaggaagatcgaagagatgatgcgcctcgatgacttcaaaacctttgttcatcatggtcgcgctgtcgatggtgatgcgcccgcccatgttccagttaggatggtgaagcgcttcctgcacgctgacatcgttcagctcatcacggctgcgcgcgcggaagctccccccgctcgccgtgatgatcagccgccgcacttcgcgaggatcgttgccctgcaggcactggaacaccgcagagtgctcggagtcgatcggatacagatgcacgccgtgttcgttcaaggcagccttgaccagatctccgccggtcaccaggctttccttattggccagtgccacatcgtgatgatgcgcgatggcgcacagcgtaggatgcaggccgcggaaaccgaccacggcattgacgagcacgtcatattcgctccaggcagccagttccatcaggccttcttcgccccagcaccagtccaggtgcggatacttgcggctgagcaggtcatggtcgctttcttctgccacacataccttctgcacatgcggcagctgcgcgagcaatgtctccagctgcgcgatattgtgtccgacgctgatcgcacggatgctgaagagatcgctgtgatggcgcaccacatcgaccgtctgcaggccgatggagccgcttgcgccaagcaatacgattcgtttcacagggtcatcaccaccatatacaaaatgccgaagcacagaaaattaaagatgagggaatccagccggtccagcacgccgccgtgtccgggaagcagatggctgaaatccttgcggccgtaacagcgcttcatcgcgctgaacgccagatcgccatactggccacacagcggcagaagcaggcaggcgagccagaagacccgcatgtccatgccaggcatgaacgcgttgagcagcaggccgatgagcatggacaacaagaatccgctgatccatccgcatatcgcgccctcccatgtcttcttgggcgaaacgcgctcattcatcttatgcctgccgaggaagcggccaccgaaatacgcgccggtatcgcagccataggtggcgaggatgatcagccagatataggccggatgcgtctgcacctgctccagcgcatgcagcgtgaagaagaagagcatcacataagagatgcacaaaaaggcatcattggacgtgaagtgctccgtaaagaccggaatggacagaaagaacagcacggcggcgctcatcatcgggaacaggtatctctgctggaacacgctgagcagatagatggccagcacgaagaggatggctgccggccggatcactgccggccatttccggctgcgtgaagacaggttcatgaactccagtccgcccacgaccacgacaaacacctcgagcagacggaaaggaatgccgccgaaagcgatgatcggaaacaggatgacgatcagcagcagggccgtgatgacacgcgtcttcatgccttcaccccgccgtaacgccgatctcgcatcgagaactcgtcgatgcaggcgttcagctgctcctcatcgaaatccggccaggccaccggtgtaaagatcagttccgcataggcgatctgccacagcaggaaattggagatgcgcagctctccgctggtgcggatcagcagatccaccggcggatgcccgctcgtcatcagatattgttcgaagccctgctcatccagatcgttttcccgttttccggatgcgacatcctgcgcataggcgcgggcggccagcacgagc

SEQ ID NO: 2266 - DNA, 1795 bp, Unknown
  16S sequences of unknown bacteria
gcagcaggcaaaaagtacggctttaagatgtgtcggctccgtagacccaaagaccctcggccttgagtcggtcgatttcggaggcaagatttgccacctttgcgattttcatgtgttcgagagctcccgccgaggttttggaggcggtgaacccgagaggagcgctcctccttttgggaacgattatgccgtgaacccccgcgcactcggccgttcttataatggcgcccatgttgtgcgggtcctcgatttcgtcgcaaaccacaataaacggggcttcatctctgctttttgcatattccaaaatttcatcgaccgtaaagtaacgcgccgacgaaagggtcagcgccacgccctgatgagccgtgtgcccgcaaagaaagtccagctttttgggcgaaacctccttgacgattatgctgcgctttgcacactcggcaagtattcttgcgatttttccgttgtcctttttgcccgaaacaagcaggctttcgatttcttttcccgaacgaagcgcctcgatcacgggatttataccgcagacaacgtcctctcttaccttgttttcaagctcagttttttccatacatcttgtccctcatcatattattatacacaatatataatagcacacaacattacaaaaggaaacctttttttgtccgtttttttatttttcgccttttttcgcaaaaataaattttacctcggcgaagcattactttttaaagccgtttttcccaaaagcctccctttgcgccaaaaaatctctgtatcccgcatgaacgctgggactctacccacggtatagtccgaaaaaattctctaccgggcgtgtttttttaatagaaaaagaaatttgctcagtaggttgataatatatgattattgtgataggctttgtttgtcgggcaagcccgagagaaatcggaaagaggattttttatgactgtactttttactgacacttcggccaatcttccgaaggaagcatatcagaagcacaacatcaaggtcattccctattcatatttttacgaggacagcgacgaaaatctcgccctgtcggattttgacggcaagagcttttatgacgaaatgagaaacggccgcgtggtcaacacctccatgataaaccccggtacctttgaaagctattttgaaaaggctctcgaggagggtcatgacgttctttatgtgggaatgtcgtcgggactgagcggttccataaacatggccgaaaacgtcgccgaagaattaagagagcgttttcccgagcggacggtggaaatagtcgactcggtggccgcctctctcggcgagggctttttggtgcttgacgcagccatgtatcttgaccgcggcatgaccgcttccgaggtggccgaaaaaatccgccgccgcattccgaaaatgtgccaatgtctcaccgttgacgacataaattatctcaagcgcacgggcagggtttcgggtcccgtggcccttatcggctcgctgctcaacatccgccctcttctcagaggcaacagccacggaaaaatcgtcatgtacggcaaggtcagaggcgcaaaggccgccctttccgctctcgccgaccgatatgaggcgcaggttcttgacaaggcggcgcccgtgggaatcgcccatgccgacaatcccgatgcggcgacatatcttcttgagctgctcagagaaaagggttttatcggaaagagcatgaccgtttattatgagcctgtgaccggctcccatgtaggccccggaacggtggcgaccagctcggtatcagctt

SEQ ID NO: 2267 - DNA, 32759 bp, Unknown
  16S sequences of unknown bacteria
gcacgccgatggtacttggctggagacggcccgggagagtaggtcgctgccgcatttcatattcctcagtagctcaatggcagagcattcggctgttaaccgaagggttgtaggttcgagtcctacctggggagccaaagggctcgatattctagcaatatccgagccctttttttgtggggaacaaggtcccctatgcaaggctgacgccgtcttttgaaagcggttatttgaatgaaaagcatatgcagaccacgtgcattgacaaaagcccctgatatgctacaatggaaacagggtgctcggctttggaccgggaaatcccgcaagaaagggggagaacaagtgcgaaatggcgaaatcgcagtggagattgctaccgaaccgctgttgtggaaagataagaagcggatttttggactggctatatcttttacgcgctatgagctgaccgagagccgtctgctggtgaaaaccggtctgctgaatatccatgaggaggaactgcggcttttccgcgttcgggatctgtctacacaggaatccctgctggatcggatatttggcgtggggtccattgtattgcacacatcggatgctacttcccctacgttgaagattcagcatgtgaagaatagcatgaaagtaaaggaactgctttccgcgcaggtggaagaagcacgcatgaaaaaccgtgtgcgcgccatggaggtaagcgacaatgtgggcgaggatgaagtgtgcgacgacggccatgaataaccgaggatagcggcggactgcggcgaaaacgtctcttgaaacagggagcggcgggatttggaaccgccgctttttgcgtatccggggcagaagaaaaaagcggatgtcattcgcttgacattccatggctgctccgatatactaggcctcaaacagcactacccaggtttgacgaaaggcggtctctgcagatgaggcaagatacctgttttcagcaagctacggcatttcagctgatcccatcggaggatggggtatttttcgaacaggacggacggacgcgtttttgtctgaacgcgccgaaggcaaccagcctggcggtcagtttgccaggcggtccctgctggccgttggaaaaaggcgaggatggccgctggcgcggtacgctggagctggagggaggattccgctatgtggacatcctcatggacggggaaacggtactgctgccccaacttccgatcggtttcggatactctcgtaccgtgaactttctggacgtgccggccaaggaggacgggtattatcagctgcaggatgtgcctcacggatctgtggcgcgccattattatccctccactgtgacagggaacactgagagctgtctgatttactgcccgccagacagcgagggccggcccttgcccatactctatctgcaacatggcttgggtgaaaacgaaaccggctgggtccatcagggacgcataaacttcatcatggataatttgctcgcccagggacgggtgaggcccatgcggatcgtgatgggcaacggcatggtgcaaattgatggcgggataagcaccagtgcgtttccccgcgtgcttgtgcaggatttgattccctatgcggaaagcgcatatcccacgatgaagggaaaatggaaccacgcggtggccggactgtccatgggcagcatgcatgccagcgcggcctcaatgacgcatccggagcttttcgggtatgtggggctgttcagcggcttcctgcgcatgctgtgggagaacgaacaaccgcatttgaaagcactggatgatccggaggcttttgcccgcaattaccgcgtatttttccgcgctatgggcgaacgggatgagtttttttctgtctttgaggaggatgatcgcttgcttgcgtccaagggtgtgcaggtaatgcgcaaagtatatgacggcaaacatgaatggcaggtatggcgcgaatgtgcgcgcgatttcctgccgctgctgttccagtgacgtgggggaatgggtatggaaaaattgcgggaagggctgtggcggctgaacgacgaggcaggttgcacggcttatctggtcatcggcctgaatcgggcttacatgatcgataccgggatggggcgcccgccgttaatgccgcagatccgcgcattgaccggacttgcggtggatctgttgctgacgcatgcccatccggaccattttggtgcggcaggcgaatttgatcgcatatggctttgtgcggacgatcgggaaacgctggcctgttcagagccattgtgccaccgttttggcgtgccgaccctgccggtgcagcgggtgcgttttttccgggacggggacagctttgatgccggaggcatccggctggaagcgctccaactgccggggcatacgccgggttcctgtgtctttggcgtgccggagtggaaagaactgtttacgggggatgcgatcggcagtggcgatatcgtgctgatgaccctccccggggcgctgagcgtgtcggcctactgtgcgtcgctggagcgcttcgtgcagcgggcgggagcctacgcagacacagaatggcggggcgggcactgcagccaggcgggaataccgggtacgccggcctataacccaccccgcatgcaggtggcacgggacatgattgtcctttgcaaacggctgctggccgggcaactctccggcgaacctgtccgggaacccaacgctcccgggggtcatgcgctgcgggcgcgatgggggacggcagggatggtatatacggctgtggaatgaagatgtccggagaaaggcacttggattcgggtttcatttggagtgccgggacccttcaaatatcttccagagacttgtcaacagcctgcgcgcggggcctgggcccccgcgcctttttgtgtgcgctcatgcccatctgtccataaaaagacaaacgctttcattttttgcgtgcgggaaaaataaaactttgtggggaaaattggacgaatcgcccattttgaatggaatattcgactcttacaagaactttttgtccatttttttatgtcaatcggttgacatttttgaaggccgatggtatacttgtctcaatccgtaagggacggaaatttgaatcgaaagggagacccaaacatgcttaagaaactggctgcgctcctgatggcggctgcgatgctgctgtccatgacggccgccggcgcggaaaccgcgcaggcccccgtgaccatctccttctactccacgcaggcgggcgtggacgacgccaccgtggcgctgctggacgagttcatggcccagcaccccggcatcaccgtggagtactatccctgcggcgacgatcagctggctgcgtggcttgcgctgtactccgccggcaccgctcccactgtgtcgctgctggatgtgggccagattctcaactacagcgattatatgtacaacttcaatcagggcgataccgaatggatgagccacgtgctcagcggctgggaattctgccagaaggaaggctctgacgccatctacggcattcccgccagctaccagggcttcgcgctgctctacaacaaggacctggtggcccaggtgcacggcgaagacttcgacgtgaccaccgtcaacaccgtcgataagttggtctccttctttgacgcctttgaggccgccggcatccccgccactgtggtgttcagcgcggactgggcgttgggttcgcactatctgggctgccagctgttctccgagtggctgggcgacaaggaaacgcagcgcgccttcctcaatggcctctacaccggcgaaaccaagctgattgaaaatgagcacttcaacaacctgatggacgtgttcgacattctcaagcagtataacatcaacgacgccgatcctctggccgatacccaggagggagatcttgagatgctggcgaccggcgaggtggccaccatgttccagggcgactggaactggctgcagattcagaccttcgccgagcgcgatgagctgggcatgatgcccctgcccctgaccaacgacgagactgacccccgcaacagcaagattctgggctcctgccccaaggcgtactgcgtggacgtgtaccagaacacccccgagcagcaggccgccggcgttgagctggccaagtggctggcgctgagcgacgagggcaaggaattcatggtcaccaacctcggctccaccctgcccttcgacgaggtgaacgtggtcaacgagaacccgctggccgtggaaacccagaagtacctgaacgaaggccgcatcttggacatcagcacctgcctgtgtgaaggccccaccgatttctggctggtgtgcggcccctacatgcaagcctacctggccaaccagatggaccgcgccacccttgcggcccagatcgaggcgtatttccaggatatctgatccatcctgtaacaacactgtctgcggacgggcagggcttatgggcataggccctgcccgttcctttatcatccgagcggagggaggaaacgcctgtgctgagcgcgcagaagcgggatacctggaaaatgatcctgctgttcttcatgccggccgtgttcgtgtggctgaccacgatggtgataccgttcctgtacggcatcttcatctcttttctgcagtgggacggcatcggtaacaattacgaatttatcgggcttgaaaactacatcaaaatcttctccacccccagattcatggaaacgctcggccgtactgctgtctataccatcggcacggtggtgctcagcaacatcctgggcatcgcgctgggcctgctgctgaccagcgcgctcaagggccgcaacctgttccgtaccgccatcttcgttcccaacgtcatcggcggcgtggccatgggctatatctggaaatacatcttccactacggcttcaccgccgtgggcaagagcctgggcatcgacttcctgagcacatccatgctctccgaccccaccaaggccatgatcgcgctgatcgtggtgtcctcctggcagctcagcgcctatctgatgatcatctatgtggcgggctttaccaatgtgcccgcggaactggtggaggccgcgcgcgtggacggtgccagctcctggtcggtactgcgcaacgttcgcctgcccatgatccgctcctcggtgacgatctgcctgtttttggccatcgtgcgttcgttcatggtctttgaggtcaacatgactttgaccgacggcggccccttcaacaccacagagatgatcgccttccgcatttacaatacggcgttcgtcagcctcaagtttggcaacgcgcaggcgcaggcggtggtgctgttcgtcatcgtggcgctgatctccgtatgccaggcctacttcacgtccaagcgggaggtgcagatgtgatgaagcaaaagcgctttgccggcgtggtgctgctggtgctggccctggtggctacggtcttttatctcttcccgctggtgctggtggccatcaactccatcaaaaccacgggtgaatttaccagcaaccccttcagcatgcccaccgtgccccaatggggcaactatgcctacgccttcggccagatgcatttcctgacctccatgcgcaattcgctggtgattaccgtcagcgtgtgcgtgctggtgtctctgctgggtgccatggcggcctatgccgtcagccgggtgaagcacaagtttgtgtccaccgtgtactacctgatgctggcctccatgtgcgcacccttccaggcctacatgatcccgctggtgaagatctatgcctcccagctgggcatgaacaacagtctgatcccggtcatctatatcggcctgggcctgaatatctgcttttccatcttcctggtgcgcggattcctcaattccatcccgaaggaaatcgacgaggcggctctcatcgacggttgcagcagcaccaagctgttcttcaacatcatcatgcccatgctcacgcccatccaggtgacgttgctggtgtttgtggccatgggcgtgtggaacgactatctgctttccagcctgtttttgaacacgcaggaaatgcgcacgctgcccatgatgatccgtgtgttctgcgcgcagtattccaatgattacgcccccatgatggcaggcctggtgatgagcattctgcccatgctggccttctatctggccggtcagaaacagattctggagggcgtggtgcagggcagcgtcaagggctgatcctgtcaggtggtctcgcgcgttaccagcgtgacggggaataccgcgcaggtgggtacgactcctccgcgggaggcatgcaggatgctttccacggcatagcggcagatgtcctccaccggctgatgaatggtggtcagctgcggcgagcacagcgacgcaaagcgcgtatcgtcgtagccgatcagcttcagccggccgggaatgtcgatctcatgccgccggcaatactgaatgatctcggcggcaatcacgtcgttggagcagagaatgccgtccacgtccggatgattgcggaagatctccgccaccgtttcctgataatccatgagcacaaattgccgctcggcagcgtccacagcactgggcttgtccacgctcaggcggcggcatgcatcctgaaaaccgagatagcgcttgttggcgtccatgtccaggtgcgcactgccgctgacgtacaaaagccggcggcagccgcgcgcgatcagatgctcggcggcgatgtagccgccgtagtagttgtccgcgctggcggaagggatgcggggactgaccgtgcggtcaatggtgatgacgggtgcgtccacgtccgcaaactcctccaggttctgggtatggctggccagaatgatgccggccaccttatttcccagaagcatgctgaagaattccttttctttttggatttcgtgattggatacgcaaagcagcagcttatagccgctggcgctggcatagcgctctacgctggcgatgacgcagctgaaaaagaagttgtccgccgagggaacgatgaggccgataaaatggctgtttttcttggccagcgaccgggccagttcattgggatgataatccagctcctccatggcgttctggatacgaaggcgggttttctcgctgacgcgggcgcggtcgttgagcatgcgcgaaacggtggtcaccgtaacgcccgcgcgctgggcaacgtccttgagcgtagccattgccattcctccttggtttggttcctgtgcactatgataccttttttttgggagaagtcaaaccggaaataacgcagcaagaggtgattttcccatggcaaacctccacctgaactttcgttcggacatgttgatgcgtagcgtctatccgcgcgtgttcctgcccgactataacgactggaacgacgtacccccgccgtatcgcacgctgtactttctgcacggatattccggcggggcgctggagacggccacgtttaccaacttcgctctgtacgccgcggtgcatggcatcgccattgtgatgatcgacggcgacaattccttctacgtcgatgacgagcagcgcaacgcctactacagccgctacgtgggcgaggagatcgtggaggtgacgcgtaagctgctgcctctgtcgcaccggcgggaggatacgttcattgccggcatctccatgggcggctatggcgcgctgatcaacggcctgcgctacagcgatacgttcagcaaaatcggcatgctctcgcccgcgctgggcatgtatcccgagaacggaaagatgcagcccggaagcccgcttcacagggagtccatgctggcgctgctgggagatccggagcactatcacgggtcgtaccgcgattatgaggctgcgatgcgcaaggcccttgaaaaaccacaggatatgccacggctgtttttggcctgcggaacggaagatccgctggtgtatcaggcgggacgcgatttcgcacaccgcatgcaggcggagggcgcgcccatgacctattatgaagcgcagggtggacatgaccacgtgttctggaagcacgccatgacgccgctgtgcgaattcctcacggcgaagggaggcaagtgagatgtaccttcggatcagcttcaagtctcaaatgctggggcgcggggtgggcgtgcatgcgtttttgcccttccacgacggatatgaggacgcacaggccccctatcccacgctgtactttcttcccggttactccgccaacgccgaggaactggccacgctgttgcccctgcggcgtttctcggccgaatatggggtggccgtgatcatcccggacggtgaaaactccttttataccgaccatcccgaacgctgcgcgctgttcagcagctacgtgggcgacgagctggtgcgcgtcacgcggcggatgctgccctgcctgtccacccggcgggaggatacctggatcggcggcatctccatgggtggctatggcgcatgcaccaacgggcttcgctggcacgacacgttttccaaaatcgtgatgttctcgcccgccatcgatgtgaccgacctcttgagcgagcgggacggctcgttgcccaaccagctcttttccgcctggatgggcgatgaggacagctaccgggaatcctggatgaatccccgctacagcctgctcaaggccaaggagcagggcatggatgtaccgcccatgttcctgtgctgcggacgtcaggacgcgctggtatatgatatgtgcagccgctttgcggatttcgcccgcaaggagggcctgccgctgacctacctggagggtgagggccagcacgacatccccttctgggatggaatgctggagccggctttccgctttatgaccgaatcccactgaatgaccggaggaatggcagatgacggacttggagaggttgaccgcgccatggcaggagccggcgctttcgggcacgatcgcgcagggcgacatgccgggtgacaaaatctgcattacggaggagcacatccaaaaggccaggacgatctatcccgtgctgagggagcttgtagcccggcaactgggtgaaagtgcctacggacgcgccgtgataacggtgtgcggtggctcgggtgtgggtaaatcggagattgcctcgctgatttcttattatttaaacgccgagggcgtaggggcgtataccctgtcgggggacaactacccccgccgctacccggaacagaatgacgccgagcgtcgccgtgtgtttcatgacggcgggttgaaagggctggttgccaatggcatgtaccgcccggaacaggcgcaggcgctcagggagctttggcccgaggatggcgacgccgcgcccgcgaacgtaagccgctacccctggctggccgtttaccagcaggcgggcagaaatgccctgcgcggatatctgggcacggagaaggaaatcgactttgaccaggtcggccatatcgtgagcgatttcaagcagggcgcgcccacgctgtacctcaagcgaatgggccgcacgcccaccgagctgtggtatgacgcagtggacatgaccggcaaaagcgtgctggtgatcgagtggacgcacggcaattccgactggtatgagggcgtcgatattcccgtactgctcaacagcacgcccgcggaaaccctggctcaccgccaggcgcgcaaccgcgatggccgcgcggacagcccctttaccaccatggtgctggagctggaacagcagatgctcaaggcacaggctcacaaggccaaattgattctttccaaggccggcgagatcatgacctatgagcagtatacccgcctgatggcgcaggcatgaggaggaaccgcgatgaatcagggcgtgatgctcaatgcttatcctgatagcctgggcggcaacctggcggcggaggcggactttctggcccgtcccgaatgccggggggcatttcggtcgttttatatcctgcccagcctgttcaacagcgatctggaccgcggcttttccgtggccagttacgatctcaaccgcctgctggccgatgagggcagccttaagcgtgtgggcgagcttgggctggatctgaagctggactttgtgctcaaccacctttccgtgctcagtccccagtttcaggatctgctggcgcggggcgatgaatcgccctaccgcgacttctttatcgactggaaccgcttctgggcgggaaagggcgagatgacgccggagggatacatccagccagacccggcgctgattcaggacatgttcttccgcaagcctggcctgcccatcctgatggttcgcatgcccgatggcagcaagaggccgtactggaacaccttctatcaggaggtgcgctatccggtgcttgacgcgcaggatctgatggcgccctgcggcctgcaatatgcacaggcagacaggctggccggacgaatcaatgcgtcggtacaggcgggcaaagggcctgccggggccgacttcaccggttttgaaagctgccgcgaggctgcggtgcaggcggtagaagcccgctgccgttacctggggcagatggatctcaacctgaaatcgcccttggtgtgggagtattatcgtgaaacactgaaaaagctggctggctatggcgcggccatcgtccggctggatgccttcgcctacgctcccaaggagccgggacggcgcaacttcatgaacgagccggaaacctgggacctgctggaggagattcaccgcatggctgagcctctggggctgaccctcctgccggaaatccacgccagctatgccgaaggcgcataccgcaccctgacccggaagggctacatgacctatgacttcttcctgccggggctggtcattgatgccatcgaaaaccataccggcgaatatctggccaggtgggccaaggaagaacgggacgagggcatccgcacggtaaacatgctgggctgccacgacggcatcccgcttctggatctcaaggggctgctgccgatggagcgcatccaggcgctgattgacctggtggtatcccgcggagggctggtcaagagcctgcacggccagaagaacctgtattaccaggtgaacgccacctattacagcgctctgggcgaggacgaccgcaagatgctcctggcgcgcgctttgcagctgtttatgccgggcaagccgcaggtttggtatctggacctgttcgctggcagaaacgaccgggaggccgtggcccgtggtggcgaggccgggcacaaggagatcaaccgcaccaacctgaccgggcgggacattgcggcggggctggagcgtcccatcgttcgtgaccagctgcgtcttatgcgcatgcgcaacgcatgcggggcctttgagggcggcacgctgaccgtggagcaggccgctgcggaccgcctgacgcttgcctgggagcgcgatggaagccgggccaggctggaggccgatctctctacctatgctttccgagcggtgaccagcgaaggcggagaagagagcgtatttgaacagtgatgccttgaaacaggaaaagcgggaggacctctgcgcgggttgcgcagcggtcttcccgcttttttacggtttctcctcaggccttttcctcgggagaagacggcatggtatccagatggacgttcaggtggggataggtcatggagatgccggcttcctcaaagcgcacccgcacgttttcgacgatggcgaagtacacgtcccagtagtcggtagccgcagtccatacccgcaatacgtattcgatggcgctgtcgccataccggttgacggcggcgaagggggcggggtccttgtagacctgcgggagatcggcagccttgagcaatgcggccttgaccgtctccgccgcgtcgtcataggaggcggtgaaggtcaggtccacccggcgattggtgacggcagtatagttgatgattttggcggcggccacctcgctgttgggcacgaagatctccttctggtcgggtgtaaccagcgtggtataggtcatgccgatttcctgcacggtcccggaaaccgtgcccacctccacaaagtcacctacgcgaaaggggtgggtggacagaagcatgatgccgcctgccaggttggacagcgcgccctgcaccgccagcgttacagccagggaggccacgctcaacagtgcgatcatggaactcacatcaatgcccagcgagcccgccacaatcaggaagatcagcgcccacatcaagatgcgcagggcagagcgcaggaacttctcgatggttttctccatgcgggagcgggcgaacagcttgtccgccaccttgagcacgacccgggaggctgcataggcgataatgaaggtgataatggcgggcggcagctttgccagcgtaaaggaagagaaaaaatgtgtgatctgcgtcgtatccacagaggacatgatgatacagcccctttccttcggccccgccacggcgcgaagaacagggccgcgccgggcttggttgcagccggattataccatagcgggtgggtggaggcaagcggagacaaaattctgaaaaaggttgccgccctgacagctttcgacaaacactgtcattgcaaaaccgcgaatgagcgcgtatgctgaagatgaatcaatgctcgtggcgatttgtccattacaaaaggagggaaccacgatggaaagacacaacccgataggattcgcctttatgcgcaggcgcgcagagcagctttttgaagagggaatgacggcaggcgcgattcgactgcttaaggcggtggatgacgcgcaggtccggcgctttgaggccgcttccggccagaaagcggcggaagaaacggccgagcgaaattatgttagcactcattatagatgagtgctaattttttgttgctttttcccttctcctctgctacaatagaatccgcggagcgctttgcttccgcgccatagcatttcaacccggccgcgggccggttttttcaggaggcagaatcatgaccagtcaacagggcaatatttctattcatgcgcagaacattatgccgatcatcaagcggtggctgtattccgacaaggatatttttatccgtgagatggtgtccaatggctgcgacgccattaccaagcagaagatgctttcccccggagtcgaggaggactggcgtgtaacggtcacgctggatgccgagaaaggggagctgaccttcagcgataacggcatcggcatgaccgccgaagaggtggaaaagtacatcaatcaggtggccttctccggtgcggaggaattcctcaaaaactatgaaggcgatgaaaagggcggcatcatcggccattttggcctgggtttttattcggcgttcatggtggccgaccgcgtaaccattgaaaccctcagcggcacggagggcgcctcgcccgtcaggtggaccagcgaggatggcatggcctttaccatggaggacggcagccgcacccagcgcggcacggatgtgattttgcacatcagtgaggaggaaaaggaatttctcgaagaataccgtgtgcgcgaggtgctcaagcgctattgcggctttatggccacgcctgtgtattttgacgtggtaaagaaggaagagcctgccaaggaaggccaggagggcgagaaggccgccgaaaacaaggagcccaagggcccggaactgatcaacgatacccccgccctgtggctcaaggctcccaaggattgcaccgacgaggaatacaagaaattctaccgcgatgtgttccacacctttgacgatccgctgttctacgtccatctgaacgtggattaccccttcaacctcaagggaattctctacttccccaagctgaccaacgacttcggaacccgcgagggcgagatcaagctgttcagcggccaggtatttgtggctgataacatcaaggaggtcattccggagttcctgatgctgctcaagggcgtgatcgactgtcccgacctgccgctcaacgtcagccgcagcttcctgcaaaacgacgggtatgtgaaaaagctgtctgcctacatcacccgcaaggtggcggacaagctgaccggcctgtttaactccgagcgcgataactatcagaagtactgggacgacatccatcccttcgtcaagtatggctgcatgcgtgacgcaaaattctttgaccaggtcaaggatacgctgctgtacaagaccaccaagggtgaatacctgacgctccaagaatacctttccaagaatgagggcaagctgggcggcaaaaaggtgatttacaccaatgatcccacccgtcagagtgccagcgtggccatgtatgatgccgagggcatcgacgtggtggtgatggatgcgctgattgacttgaacttcctgagctttatggagtattcctccggggttgagggactgacctttgcccgcgtggacgccgacagccagaccttccagaaggaaatgaccgaggacgaaaagaagcagagcgaggaggatgagaagaagctggccgacgtgctgcacaaggctaccggcaaggaggatctcaccgtcaaactggcttccctcaaggatgaaagcctgcccgccatgcttacccaggaggagcagggccgtcgcttcagcgaaatgagccgcatctatggccagaacttcaaactgcccgaaacccatacgctggtgctcaacgtcgccaatcccgtggtcaagagcctcatcagcggagaggcagacgaggaaacccgcggcctgatcgcagcccagctctacgatctggcccgcatgagcacccgtcctttggagaaggaagaggtcacggccttcctcagccgcagcaacaaactgctggagctgctgagcaagcgttaacaatcatgtaacattttgcccggaaaaagcagggttttcgtctctgggcgcgtataccttgtatggtgggttttgcggaccgcacgtccgcgcccccatacggggtttttttatcaacaaaaagaaaacgcagggccgcttcccgcggccggaggaggcgcagatggcaaagcggattgtgtgctggctggcggcagcggtgctgctgttaatgggcacgatggctggcgcgctggcggatacgccgcgcgagatctatcctttggattacgataccctgccggagccacgcgcaggccagtaccattatctgatggcctgtgtggacacgtgggagggaagcgccagcaaccttggcaacactgacggtgtgctcatggtcacgctggatgtggacgccaagcgcgtgatgctgaccaccttcacccgcgaaatgctggtcaagcggccggacggcgggattgggcggttcacctacatcgccaaaaactatgggcctgaagcgctgtgcgaaaccgtcagcacgcattttggtacaaaggtagacaagtacattatcttcagcatggataacgtgcagaccatcatcgatgccatgggcggcgtgtacatcaccgtgaccgacgcggaggcggactacctcaatcgctaccgcatcgcccgcgacgccaccacccccagcatggacaaggcaggcacctatctgtttacggggcatgcggcggtgatctacatgcgcatccgcaaggtaggcggcgacggcgattcgggccgcacgcggcgcatccgcacggtgctgagcacactggcgggcaagtatgcccaggcttcgctggacgatgcgttgcagttgattaccaccgtatcggaaaacatcgttaccaccaacatgagcatggccgacctgctggaagcggcggggtatgctctggaactgcggggcgtggagccggaaggcattcagatgcccccggaggaggccatgcaacccattacgtatgcaggaatggctacacgtcaggtggattttgaatacagccgccaggtgctcagcgaatttttggaaagccagagctttgatgtggtggaataagggaacaggatacctcaagctattgaaggaaaacaggcgaaactgcatcttctgcaaatgacgccggatataaaacggcccgcgattcattcagaaatcgcgggccgtactctttggttgagttgagcctgttttattcctcgtccggctcttcgggcaactcggcgttgtgccagacattttgcacatcgtcgttgtcctccagcatctccagcagcttttgcaccttctgcaacgtttcttcgtccgcggggaccacggtattctgcgggatcatctgcacctcggcgctcaggaaggtcagcccctgcgcttccaacttctcacgcacggcggagaactcattgggatcggtggtgacctcgaaagcgtcgtccatggtctgcatgtcctcggcgcccgcgtccagcacggtcatcatcatttcgtcctcatcggaatccggagtgcgctcgatcaccagaacgcccttcttgtcgaacatgaagctcacgctgcccgttacgcccagggagccaccatttttcgcaaagcagtgacgcacatcgctggcggtacggttgcggctgtcggtaatggtttccacgatcacggccacaccgccgggggcatagccctcgtaggtgatttcttcgtaatcgacattgcccagttcacccgcggcctttttgatggaacgctggatattatcgttgggcatattgttgcttttggccttggcgatcacatcgcgcagcttggagttgctgtccgggttgctgccgccttcgcgcaccgcgatggcgatttcacgcccgatcttggtaaaaatcttaccgcgaagagcgtccgtcttgcctttcttaattttaatgttagcccatttgctgtgtccggacatcgtatcagcctttctctatcgaatcaggggcgggaacgggcccgaaagggcgcaaccccaccgctatgccgtatgcggcttactattatagcacattctgggcctgcggtcaaataaacggggccggcacgcgaggacccgtagctttctacctctgcgctgcccacggcaggacgcaaagccttggctttcgatgataggaacccggcatgcgttcagcaaaccggaagggcatccgaccatggaccaaacgccggcaccgtctcccggtccttgtccatgaactgggcaaccctctccctgaacgggcattgataccctccctcaaaggacggaggcggaacgcatggatttccggacacatagcatgagcggggaaacacttgaatggaagggggtcatttctatgtattgtcattgcaaggggtgtgttacgagctgctgcataccatgtcagcagatcggtacggtcaccgggcctaccggccccacaggagctaccggacttcccggccccgcaggtccgacgggcgcaaccggggcgacgggtgcgcccggcccgacaggtcccgcgggagaagccggacttccgggacccacgggacccacgggcgctgacggacttcccggccccacggggcccgcgggagaggccgggcttcccggtcctacgggcgctaccggagccagcggttctacgggggcaacaggcgctacggggcccacgggcgaggccgggacggagggacccacaggccccacgggcgcgacaggagctactgggccgacgggccctacgggggcgaccgggagcctgggcgcaaacccctatgagctgtttgtgcaggcggatgcggcgccgggcggagacggaagtcaggcggcaccgttccaaaccatccagcaggcgctggcggccgctccgcccgacagcgtgatccatgttttgcgcggaacctatcccatttcgcagcagctggtgatcagcacgcccggactgaccattcggggccgggccggggccatgatcctgctgcaggctccggtggtgccgtttttatgcaacggtagcgacgacacgatcgacggcctcacgatgaccagcgatgctccctatcccgtcgaattcattcagattggcggagatggaaaccagattttaaattgccagatctatggtcctgcccagccgggcgattcctcgacatgggtggtgaacaggggctgtgtaacgcagggaaatgcgaccaacctgctggtgaggaacaatgtgttccatacgctgcgccagccggcctatctgaatcccggctccaccggtacgatcatggacaatgtcgcgtataacacccgcggctatgtagtggaccaggcgacgtttctgttctcgggcaattcctggggacttccggcaaacgcagtggatatcgcgctgctttcgggcacggcgtccggagcgccttacgatccgatttccgcgctgcagagcagcaacagcagcgccacgatcagcgatcagcgataaaggcacgaccgcctgcgaaactcgctgcagctgaacatcgccatctgacggcagcaaagccggagcaaaccttgctccggctttcatcctgccgaccaatcgttttggtgggagcctgggaaggggcgcaggtctctaacgggagtccgaatcctggtgccgtttccccacggagccgcggagacaggggaacagcgcttccgggcagaagccaagggcccatctttccgctatgccgggatttttgctgcacgcttcatataaagatagcgattttctcattttaccttttgacgctgcttttcaagaaaattcgcaatcgcttctaccgtctgtgcctgctggtcctgtgcagagatggtggcgggcagatcccccttctgcggcccataattgccgaactgggcatgattgccgccttcgatttccacgacgttttccgtgtaatcgatgtgatcctccacactttgattcaacgagccgtaaaccgtgagagtatcctcggccggatagtccccatagaggtacgcgcccagaaggatcagcccctccaccatatcaggatgttccgcggcaaacttcgaggccatggcgcctcccatggagtgtcccgcgagataccagtggcggatctggggaaactgccgtatcacatcctccgccgcgcccggatcgaagatcgccatatgaaagggcatatgaaccagaatacaggtgacgcccttgctgcgaatctggtccagcagcggcaaataggcctctgcctccacttttgcgccgggatagaaaatgagcgccgtgtccgtggcataggaaggagagagaatggtcaatccatccctcgcggaaatgcccgtcccctgggccagcacctccagggccgtgtcttgcgcgcgatagtagtcggatacgtaccagaaaaatgcccctgcgcccacggccagtaccagcacgatgattcccgccgcaagcagcagccttttggaaagagacctatgtgtgcgtttcatggacacatcacctccgatatcctatgcgcggcaggcgccatgatgaacaggtgcggagaatatcggccccggcataccgcccatgggaatcggtccgaaccgtctccgaccccgccggcctgtcaggctttttcctcctgagggagatagggccaaatggtataccgccgccgcccttcggtgcctttgccgtactggatggcctgcctggggcatgcgttgatgcagcgcaggcactggtagcactgcgctttccacacgggtttcccatccttcatggagatggcggatgccgggcaccgttgtgcgcacaggccgcagccgttgcagcggtccgtggcaaagaagggcctggcgcttcgggcaaagcggttgaaaccggcgttggccgcataggatttcactccggccatggctccctcgtggacgcggtatacccgctccttgcgcaggatctctccggcaatttgcttcagcgtttcccgggccgaagcgatctttttgagaatcacttcctcgctgtcggtatccgagccgatgatgtagttgttgggcatcaccaggctgtagctgctgtcgagcggatagcatttggaaaaggcttcatggcgagcccggcctcgctgccgcaggtgcaaacgccgaaagcaaaggccccggtccttttcatccgctttgcaaaggcggccatggcctccggtacgctccaggcatataccggaaagacaaagccaatctgttgaacggcctttaggtccggcacttgcgtcaaagtggtgatatcacaggcctcgccgcccgtgaggcgggccggctgccgggccgcccatgctgaattgcccgttcccgaaaaatagaaaatcatgttaacccctcttttcctttgcctgcctgacgaccttttcgtagggcccgatgatgtactggctcatccgccccttcatctttttctgtaccgacggaatcgcaatcagagcgcctaccagctgcatctgcaggatgcgcttcttctgcttctgcgggaaatcataaatgccatgttccttgtaaaatttatgatcggccttcatcaagccccgcatgacataaatcaggtcccggaagattttcatgccacccacgccatagaagttcatggggcgggtcaggcccttgtccagcgcgagggccagcgaaccggccagggtccggatggaggatgccgcatcgccctcgtccgtggccacgccgcacagatagttgccgcccacctcgctgcgggcctccacaatcatgcgcaggttgctttcgtagcggtagtcgccgctgatgagataggcgatgggcgtgccgtgggtgacggtgcggtggccgttgcaaaactgccggtcgtcaaagcatttgaagctggaatgcgtataatggtcggagatggtgaaggcatagacaaaggcatcggcgttttgaatccgggtgcgcagaaattcgtcaaagccatccttgtagacgcatttcccggtcaccgcgcagccgaaacagcccagacagccgccgtcaaagggaaaatcacgcaggttgaccacccggctttcgaagggcagcgcagcgcggaaatcggcgatcatattccgcaggttttcatccccgggggcgcagttggtgacgatgaccacgtccttctccccgcttttgggtacggacggaagcgtctgagaataaacctccgtttcatgatgcggcgcccggacgggcggcgtgacgaacaggccgtgctcacaggagaacataagctgctcaaaaaagtcccttgcgtcccgctgcccctgctcggtgagcagatcctccatgtccgccgacaggccccgcaccaccttcatgcccaggtcgcagcagttttcttccacatagcgatgggcggtcacatcatagaagtgcttggaggtggtgatctgcgaggcgaacttgccggagagatccacaccgtccgccttgatgagctccatcagccggtgcagctgatagggcgcgataaacgtatacaccggatagctgaacaaaatcagctccgccttttccaactcttttcgcagcggggtgaagtccttttcatagctttttatccgctggcccaccggcacaaaggtgaaggtgtgctccggatgcagggcctcaaggtacagcgcggtgtgcaccgtggtggattgctttcccttggggctggcattcaagacaaggatgttcatggttgctcctccagttcgctaagcagttgtttgtaccagccgatttcaaacgcggcggcggcaatgccgtactcgatggtgtatccctgaaaacgcagaatctgcggccagtcgcttccgggcggaagctgctgacgtttcagctgctcaaaacggtcccggatcgtgcacagcgtgattctggcatcctccatctgtcggatgtagtcccggatggcggcaagccgttcctccggccgggccaatccggcaaagaacagccgggacagttccatattctttccccgccctgcccgcatgggctgcgcaacccaggcggaaaaggcggcccgtccctcttcggtgatggaaaacgtttttttgcggcgcttgcccgcgaccgtttcgctggatgccacttttccgcttttctccagcttggaaagtgccgtctgtacgctgcccgcactgtgcgaacagatcagcgccagattttttcggatgaactgctgcacctcgtagcccgtcatgggtgataggatcagcagacccaagaccaggtattccatggctccctcctatctatcgaatagatagattatacgttcggaaaacgcttgtgccaaggagcgctcatcttctgtttggattgtcttttcttttctatgattatataatagatacgttacgacccgatgaagcaaggaggatttgcgtggaggtttcatcctttttccccatatgggggaggcttacgcccgggcagcaggcggccctgtcagccgccgctttcagccgcaaggttcacaggggcgatgtgattcataatgcggatgcggattgcactggcctgcttctcattcaaagcgggcagctcagggccttcatcctgtccgaggacgggcgggaaatcacgctgtaccggctgtttgaacgcgacctgtgcctgttttcggcctcctgcatgatgcgctccatccagtttgacatcaccattcaggcggaaaaggataccgaactgtgggtgattcccgccgaaatctacaagcaggtcatggacgagtccgcgccgctgtccaattttaccagcgaagtcatggcggcgcggttttcggatgtgatgtggctgattgagcagattttatggaagagctttgataagcgcctggctgccttcctgctggaggaagcagccatcgaaggcacccatacgctcaggattacccacgagctcatcggcaaccacatgggcaatccccgggaagttgtaacgcgcatgctcaggtatttccaaagcgagggcatggtgaagctgtcccgcggaacggtggagattgtggacgaaagcaggctcagacgcctgacggaatagaaaacgccttgcaaacaattcgcaaggtttggaaacaacccctaccatgaacgtccgacagcaaagccgtttcctgaaaaggcatcgcgccgtttcccccggccgcgccgcagacgcagggaaaatgccccggcggaaaagatcgccagagacgaacccttttgacacgctgaaacgccctgtacagaattttggtacagggcgttttgctgtgggccgcgcgggcttattcggtcacgatttcgccgggccagctgttgatgccgccaaactcgacgatattggtatagcccaatcgggccagcttgtccgccgcctgcttggagcggttcccgctgcggcagtagaccagaatcagctggtccttgtcaggaagctgcgcaatctcctccgtgccaatggtttcgttgggtatcaggattgcgcccggaatatggccggaggcaaattccgattcggtgcgcacatcgagaatgatgtagttttcctcctcggccatcatctctaccgcttcctgcatggtgatctggcggtaggcgctgtcctctggctgctgagacgatgcacagccggtcagcaccagggccaggagcgcaagcgccggaatcactttctttttcaatcgaatccctcccggatatcactttgtattctttgccttgcaaatcagctgggtcatggttcccatcgggcagtatacgcaccagctgcggggcttgaacaggaccatggtgatgagccccagaaccgtggaagtgagcatcacactataaaagccgaaggcgaactgcgcgacaccggggtgaaagagcgtaccatgataggcccattgccagggaagcttgaacgtccacagcagggttaccacttgtttcagactctccgcgccggcgaaaaccagataggtgttccaaagcatcagaaaaaacatcgcaaagaaaaagaccagaaaaccgtaacggaaggccttgttcttcatccagcgcgggatatcccgcttgcgggaaagaccgaaccggccgcccaacaggctgaacagctgcccacgcccgcagtaacggttgcagtaggcctttgtgccctttgcgacggaaagaaccagcggaatgaagaagcacagaagtcccagccacgcaaacaggatattgaaaaagcccaatacgagatacgtcagggaagcaatccagagatagtcataccacttctttttcataccgattcctcccggatctcgattaccgacgcggggcattcctttgcgcacctgccgcagccgacgcatctatccccgttgacccgcacataaaggccacgaatcacctctatggcgccgatgggacaaaccttcacgcagcatccgcaggctacgcactcgctctgtgccacgaccgcttttcttttcctccggcttcccgtcatgtccattcctccccgtgtgaatatggatatcatgataggacggacgggcgttttcttccgtgatgagatcacagaagacgcctgccggtatccccggcaggcgtcttgggggttacaccccggtcttccacagcccgtggaggttgcagtaggcatagaccgccacggccttttcactgcccagtgcgaaggtgacgccgggaggatctccgggtttgagaacccggcgctgactcccgttttccgtttcaaggacaatccactggatgtagtgcccgtcaaccatgggatgatcggcgcttccgacgttgacgtggacttcgccatcttgaacggtgaccacaggcaggtgcttttcttcgctcgcctcaaccgtattggggaccagcgcttccatcctctcgccgcagcagacgaccggaacgcccgcgtcatggaccttttcaatcacattgccgcaatggcggcaaatatagaaccgggtttgcatagcatttgtctcctttctttttctatcatcacgttgccatcctcccgcctggcgccgccccgcgcctgcttcttgcgaaaaggtgggcttttcccatgctttagagcatggcaagaatggcgtttttgggctttgccccaatggactgattcacaatcttgccgttcttcatgaccaccagcgtgggaatgctcattacgccgaactggcccgccagttccggctgctcgtccacattgactttgcacaccttgatatcgctgcgttctctggaaatctcctccacaaccggacccaccatacggcacgggccgcaccagggcgcccagaagtccatcaggacgggcttgtccgaatgaatgacttcgcttagaaaattggctttattgatattgacagcagacatgtttgttgccctccttgtgtttggattatggctgtattctacccggtttcgaggttgctttctgtgataaagtcacgatcaccgaccacgcgctgcggatgcaaacaggcgcttggtgatctcgtcacggaaggaaagcccgttttggggtatcctatgcctaaatcaaacaaaaggagctggcaacatggcagccaagaacataaacgtccgggaactcagggatctcatcgaaagcaacaaacccgttctggtggacttctgggccacctggtgcccacattgccgcaagatcaaccccgcctacgaacagatcgccgaggagtatgccggcaggctggaggtggtcaaggttgatgtggatcaggatgaaacgctctgggaggaactggagctgatcccgacccttcggctttatatggagggaaagcccgtcgattccatcgtcgcgccgcagtccaaggccgcgatcgagacattcctggcgggtgttatgcccaaagaaaagaaggaaaccgaaaagcacctgtacgacacgatcatcatcggcggcggtcccggcggatataccgcggcgctgtacgcagccagagcgggccttgatacgctggtcgtcgagcggctttccgcaggagggcagatggcgctgacccaccagatcgacaactatcccggctttgtggacggcattggcggctatgaactggccgagcagatgcagcggcaggcggagcgcttcggcgcacaaacgcgcaatgcgcaggtgcagagcgtcgatttgcgggggaatccaaaggttgtggaaaccagcgagggaaccttttacgccaaaaccgtcatgctggcaacgggcgccaatcccagagaactgggcctccccgaggaaaaggagctggtgggacgcggcgtggcctactgcgcggcctgcgacggcatgttctacaagggaaagaccgtcgtggtggttgggggcggcaatacggcggcggcagatgcgctgctgctgagccgcattgccaggaaggttgtgctcgtccaccgaagggacaccctccgggcaacgaaaatctaccatgagcctctcatgaaggcggaaaacgttgaatttcaatggaacagcgtggtgacggcgctcttgcacgaagacaggctcaccggtgtccgcattcgaaatgtcaggaccggcgaagaaaaggacattgctgcggatggcatatttataagcgtgggccgaattcccgcgacagagctggtcgcgcagcagctggaactggacgagggcggctacatcgttgcaggagaaaccacagaaaccagcattcccggcgtgtatgccgtcggtgacgtgcggaccaagccgctgcggcaggtggttacggctgttgcggacggcgctacggcggtccatatggcggaagcatttttggcgggaggtgtgtgatcttgaaatggaaaaaatggattcggcctgcactgttcacgctgggcggggccctggcaggattggcctattaccaatggatcgggtgcgcaagcggcagctgtgtcatcacctcaagccctgtgggctccatgctctacatggggctgatcggctggctgctatccggccttttcagaaaggagcgcgataaatgcaatatgtaattgcttttctggaaggggtcatcacctttctatccccgtgtctcctgccgatgctgcccatctatatttcctactttgcgggcggcggagagagaagcgtgcgccagacgctgaccggttccgtgggctttgtggcgggtttcagcatcatctttgtgattctcggggcgctggccggaacggtcggcagctttctcaaggagcatcagacgcttgtgaacatcgtttccggtgcggtggtggtgtttttcggcctcaactttctgggtgtgttcaaactgaacctgtttcacggcggaagcaggcatgttgatacgcaaaacatgaacttcttttccgcaatgatcttcggcatgattttctccctgggatggacgccctgcgtgggtgcgttcctgggatccgcgctgatgctggcctcccagcaggggcatgtggtacaggggatgatgatgttgctggcctactcgctggggcttggcatcccgttcatcctcagcgccgtgctcattgattatctgaaggccgctttcaactggatcaagaaaaactatcgcgtcatcaatgctgtcagcggcggcctgctggttcttgtaggcgttttgatggcgaccggcacgctgggccggctggtgaatcttctgagttaaagaggtgagaacatgaagaataaaaagacattgctgagcatcgtgctggtctttgcggttctgatgggcggggcatacgtcctctatgaccgcctcggccggaatgttggaacagaacagatgatcgttcatactgaccagcagccggcggcatctgcggccacagaaggagattcggcagatccggcaggggaagacgaggccgcgtcagagcaggagcccgaggtcgttcccgcgcccgattttacggtgtatgacaaggccggcaacgaagtgcgcctcagccagtatttcgggaaacccattgtactgaatttctgggcaagctggtgtggcccgtgtcagagcgagatgcctgattttaacgagaagtacggcgcgctcggtgatgacatccattttcttatggtcaacatgaccgatggtggacgggaaaccgtcgagacggcctcggcattcatcgaccggcatggatatgaattcccggtgctgtttgataccgaggctgaagcagccctgacgtatggcgcatactcgctgcccacctcctttttcatcaatgcgaagggccatgtgattgcgcaggccgtcggcgcaatcgacggcgcaacgttgcaaaagggcatagacatgattgtggattgatacaggcgcgatgcaccacgatgcccaaaaggcctgccgaaaccccttcgccagggacgaggggtttcggcaggccatgattttttcagggggcataacccggtttccgcttttaataccagtcgtgtttttcgccgcgatccagggcgttgatacgagccatttcttcgtcgcttagcgcaaagtggtacagctgcgtgttttccaggatgtggtccggattgctggaaccggggattaccacaacgcccttttgcagattccagcgcaggatcacctgtgcggaggatacgccatgggccttagcaatatcgcaaattaccgcatcgcccaacagctcctgcgtgtgtccacggccgcccagcggataccagccctgtaccgtgatgccaaggctttgaatgtaggggatgacgtcgttttcctggtagtacggatgaatttcattttgcaccagcgcaggcagggtatccacctgaggcagaaaggtttccagttcctccacataccagttggacaggccgattgagcggatcttgccctcttgcacaaaacgctccatggccttgtacgccgttacatcgttgctgtccgggtgatgaagcagcatcatatccacataaccgatatccagtcggtccaggcaggcctggatggatgcttcggggttggccatttcagtgccggggtagattttggtgattacaaagatctcttcccgctgaatgcccagttccaccatgctctcccgaatcgcctggccgatctcctcctcgttgccataggcggaagcggtgtcaatgaggcgcacgccgcattgcagcgcggatttcacggcgttgatgcactcgtccccgtgcaagctgtaggttcccaggccgttgatgggcatggtatatccgctgttgagcgtcacggtgcgggtgctgaaatcaaaggaaccgggattcggaagcgtttcatgggtttcagttgcgattatctgctcctgctctctgccggtcacctctgcctgtgcgcctgaccacagcagagagagcagcaccagcacgcagcatccaaacgtacctgcccgcttcatcgtcaatcctccttaacggtacgccttttcaaagattccggcgcaatcttcgtcattgagttcgcaggggttagccaggaacaaaccacccatcgtctcccgtgcgttcacggccagcgtcctgcattcctcttgtccgcgttccatgccacgctgagcagcgcggacttcatgtgtttgcgctggatgcgtccgttcagggcgcagaagcggtcaatcaccgttttgagctgcgcggacatgccgtagtaatacagcggggtggcaaacaccagcatgtcggccccaaggattgccgtgcctatgcgttccatgtcatccttttgcacgcatgggccgtcatagccgcatgcgatgcaaccgccacagggctggaggcgggcatgcgccacgtcgttcagttgaacttcatgcccgcgttcctccgcgccacgccgaaatgcgtccgccagcagataggtggagcctcgctcattggggctgcccatcaacactgcaatgttcacaccagcacctcgtattgcgcatcgcttaccggctccagccactcattgcgaccgtttacgccggggacctccaccgccagatggctcatccagctgtcctgggccgcgccgtgccagtgcttgacccccgcagggatgttcaccacgtcgccgggcgtgagcagctgcgcgggcttaccccactcctgataccagccgcgcccggccacgcatacgagaatctgcccaccgccctcatcggcatgatggatatgccagttgttgcggcagcccggttcaaaggtcacgttgtagatgcctacctgcgcggtggacagcggcgcaaggtagctctgcccggtgaaatactgcgcgtagccgtcgttgggcgcgccgatggggaacaccatcgaagccgcatgcgcctgcatggcgttctgcaccggggcggcatcctccgcccagacctccttggccatattgaaggctgcccaggccttgggccagcccgcatagaaggccgcatgggtcagaatttccgcgatttcctccttggtgatgccgttttgcctggcggtggtcaggtgatagcggaaggacgaatctaccagcccttgggccatcagcgccgttaccgtgaccagagagcggtcgcgcagcgagagcttgtccgtgcgattccagacctgcccgaagagcacgtcgtcattcagctcggcaaatttcggggcgaaggcgcccagagcgtcgcgtcccgcggtttgtttgacagacatggttttgtctcctttcatctcatccgttcgcaatgcgtttactccgccgtatagggggcgatgcctttttccgcaagccaggcttccatttcttccgccgtggtggaagcggagaagcgtgcgccctcgatccagttgaccgtcccatcggtcagcgcagcgagaatctcgccggtccggccatagccgctgctggcggaggtacagaaggtgagcacggtcttgccgctcaggtcgtgggcctccacaaaggtctcaatcagccgcggcgcctgtccccaccagatgggaaacgccagcaccactgtatcatactgcgccatgttttcaaccgtcgcggccagagtggggcggctggtttcatcgttcatttcctgattggcgcggcagtccgcgtcattgtaattgaggtcggcatcggtgtagggaatggcaggctcaatgcggaacaggtctgcgttgaggtacgcggccgcgtattccgccagcggccaggtattgcccgtcgctgagaagcaggcgaccagcacattggagtccgtgggcgtaaaagcgggcgtctcttcctcggcacaggcgaaggaaaggctcatcatcagggcaagagcaaggacaagcagctttttcatcgtggtttcctcctttattttttggatgattcattttttgttcagctcaagcgtattcaaccagttgcggatcgcgtcgaggctcgcgccgctgtcaaaccgtctgccggacagaaagacggcttttgtcggacaggatttttgcaggatctcttccgtgcgccccatgccgctgccgccggaggtggcaaagggcacgacgcgcttgccggaaaaatcgcaggaggccaaaaacgtttcgatgatgcgcggggcctgataccaccagatggggaagccgacaaagacggtatcgtagcgcgtcagatccggcaactcgcctgcgatgcccgggcagcaggcctcatcccgcatctctgcagaagaacggctgcgctcgtcatgccaattgagatcggcggtagtatagggatgctcgggccggatctcatagagatcagcctgggcggcgcgggcgagcgttccggccagacgggcggtttctccggtggcggagaagtatgcaacaaggatcatgaaagtctctcctttcctggttttcagactttgggtgtgctttgggaccagacgccgggccggtccgccgcttcctgcgtgttttgcgccatcacgcctaccagcgcatgaggcgtataacaggcttccagataagcaacttcctcctccgtaagcgcctgttccgtagcgcgggccgcgccttccacatggctgagcttggtcgctccggccacgggaattgcccccttatggatcagccaggccagcgcaatctccgtcatgctgacgccatggagccgggccagctccgccacgcgctcaatgatgcgggcatcctgtgccgcggtggcatcatacttgcccttggcgtaggcatcctcctccaaacgcctggaggtctcccccggcagctttgacagccgcccgccggccagcgcgctgtagggcgtaacggcaatgccctcctcccggcagtaggggatcatctcccgttcctcttcccggaagatcaggttgtaatgtccctgcacggaaataaagggagcaaagccctcccggcgggccagttcattggccttgcacagctgccaggcgaagcagttggagatgccgatatagcgtgctttacccgccttgacggcattgttcagcccctccatgatttcgtaaagcggcgttcggtagtcccacatatggcaaatatacaggtccacatggtccatgcccaggttttgcaggcttttgtccagtatgcgccgcacatgctcctgtccgctgattcccgcgtcgatctcctcctgggtgcgcacgggaaacttggtggctaccaccacgtcctcccggcgggcaaagtccctgagagcgcggcccaaatactgctcgctggtgccgttttgatacacgatggccgtatcaaagaagttgatgcccagttccagggcccggcggatgatggcccgtgaggcttcctcatccagcgtccagctgtgctgcccatgggcggcatccccaaaccccatgcagcccaggcatacacgggacacattcaggctgctttttcc

SEQ ID NO: 2268 - DNA, 2520 bp, Unknown
  16S sequences of unknown bacteria
tcaatctctcagtcagctacgctgacagctctctttaccaaagagagccttgctactcgttcggtttaaaatgctgattgttttcagcgaaaagttgtttcaatcaaccctcccggtgttcgctaagcgctcacaccaccctcccttgcacagggagggcaagttggcagtttgtttgagttagtattttatagcggaaaatataattaaacaatttgcctaatcaatctctcagtcagctaacgctgacagctctctttaccaaagagagccttgctattcgtttggtttaaaatgctgatttcaaccgaataagcgtatcaaagagagccggttttattgaaattatagatttatagatttttaatcaaccctcccggtgttcgctaagcgctcacaccaccctcccttgcacagggagggcgagtttactgtttgttgggatacgatacaatatagtataagttcatatcataggctcccttgtgcaaggggagctggcggcgtcagccgtctgaggggttgtcaagcaaactttttatatcaaattccagccacaaacaaatatatctataaaataaatccgtaggggcgttcattgaacgcctatgcaaaccgtaggtttgcacattgacaacctgtttacatcaaatttcggctacaaataacagccccaaaaatccacaacacagccgccctttggtaaaggttggtaaagggaggtggtttttcgcaagaaaaaccggagggattgaccttagtacgataaactgatttgcaagcgaagttgttaccgaatatcgaatgtaaacaaaatgttttcaatctctcagtcagctacgctgacagctctctttaccaaagagagccttgctgttcgttcggtttataatgctgatttacagctgaacaagtgtaccaaagagagcctgttttattgaaattataggcttgcagatttttaatcaaccctcccgtcggctaacgccgacaccctcccttgcatgtcatgccctgtgggtacaaggagggcgagttttgcagtttgtttaaactgtgtctttatagcggaaaattgttttaaacaatcttcaataaggcgaccgatggtcgcccctacggtggaatttgtaatttattactattggttacaaaataatatttttcaaaatcaataatatcttgttgtccatgataagtgaaaatgtcacgccgacggcgtgacaaaatgggtaatataatattaaaaatctgtaataaataatatccgttatcaaaaaacatttagattaagataaaacaaggttcttggcaaaataaaaggacggcaaatgccgccctttaaatttttaattttacttgttgccgaagtattcaacggcttttttagcaaatttttcacccaaagcttccaaaacatctgctttgtcctcaacttttgcgttcttaacaaaggcatttgcgccgatatgtgtaagaggcataccgtgtgtgcaaccgccggaataaaccgtcataccttttgcaagcataatgctgttaaggttctgcaaaacaatttccgtgccgccgtgtgagaagttaccggttgagaaagcacaacctaatttgtcgctaatatttatgccgcccacttcaaggaatttaaccatctgccatgaggcttctgcaagatatgtaggtgcaccgattgcaacgcccacaacatcgtcaaaatcttcttgctttgcatcgtcaatggaaatcatcttaacttcctcaatgccctgaactttttccataccggcttttacaaattcaccggctttaagtgtattgcctgtttctgaatgataaagtacagcaagtttcataataattatctcctttatgtttatatttgtgattatattgtagcaacaatatgtgtttatttcaagtagctaaaaaatttttttagtaataaaatcggtttaaatattcaacaataaacagtttaaaaggggaattttttcaaaaaagtttataaatttaaaaattatttgtttttttgttgaaaaatgtactattgatatattataatctatacagtatttatttacaggagattaacaatgaacaaaaaatcaaatctgcaatatgtgtttgtggttgtggcgttgctggctttgcagggcggctttataggtatgcttgtcaactgcaccggtattttactttccgccgttatggcggatatgggctttaccgccggcaaaatatccctttactacaccgtcagggctttggcacaggcggcaacggtaggttttaccgcaaagtgcttctttgaaaaaaatcaaaaacttacaatatccgttatgggagttttaagtggactttcttttatacttatgtatttttacaacgatctttggcaatggtatatttccggcgctttaaacggtgcaggcatgagctgcgttcttgttgttatcccggttgtaataaataactggttcaaaaagaaaaacggccttattataggtatttcaatggcgg

SEQ ID NO: 2269 - DNA, 19031 bp, Unknown
  16S sequences of unknown bacteria
cattttgccggcggggctcgcaatgtcgcgcgcaatggagttagacagcttcctccatctcttggagcgcgctcgtgctcgcctatttccgccgtcaaaatggaagggcctttttccctccgctgcctatcgccgctctgccccggcgcagctggcgtgaaacaggctcaaccaacgcaagttgggatgttacattgcagcttggataatttcgccgcgcagaaaacagtcttgttttttcttctgcggttggcactatccatacgtaaacagcgctgctcgggacgcttcgatgtgtcttagatattcctgcaacacaaaaaagcagcgtattttctttcatacgctgcccttttagcgagccatgaggccctccgccgaatggcggtctttcctagtcaactaacacgaagctggaccagaccggcgagccgcgaggcctgttgccgagcggcggtaaaaccccggccaactggcatatccccctacgcccctgcgcgcatagcgcgcagtccgggatcaaggggcactgccccttgcgcgagccgcgaggcccgttgccgagcggcggtaaaaccccggccaactggcatgtccccctacgcccctgcgcgcctgcggcgcgcagtccggttaggggcactgcccctagcccctgacgtggaggcgggtcagggcacgcttgagcttggcttcggcaatgcggaactgctcgtcgctgcggtcgagggcgcgcaagcgctcctccgcttcctgccgggcgcgctgggcacgctccgcgtcgatctcgtccgcccactcaaaggtggtagccatgacccagacctgcccgccagagacagtcagaagcccgccctgacaggcggcggagcgctcgttgccctccgcgtccgtcagcttggcctcgccaatacccagcggcgcggaatagtcgatgtgcccggccagaatggccgcgtcgccgcccaccgtgcgcagaatgatctgccgggcttcgccgtcaaataccagccggtccggggtgacgatctgcaaatgaaaggtcgccatggtcattcacccttcttggcctgcgccacggcctcgtcgatggtgcccacaaacaggaaggcgctttcgggcaggtcgtcgtgcttgccttcgatgatctccttgaagccgcggatagtttccttcaggggcacgtacttgccctccatgccggtgaactgttcggccacgctgaagggctggctcaggaagcgctgcaccttgcgggcgcgggccacgatcagcttgtcctcgtcgctcagctcgtccatgcccatgatggcgatgatgtcctgcagctccttgtagcgctgcaggatgccctgtacctgccgggccacgtcgtagtgctcctgccccacgatctcgggggtcaggatgcggctggtagagtccagcggatctacggcgggatagatgcccagcgaggaaatggcacggctcagaaccgtggtggcgtccagatgggcgaaggtagtggcgggggccgggtcggtcaggtcgtccgcaggcacgtacacggcctgcaccgacgtgatggagcccttcttggtggaggtgatccgctcctgcagcgcgcccatttccgtggccagcgtgggctgatagcctacggcagagggcatacggcccagcagcgcggacacttccgagcccgcctgagtgaaacggaagatgttgtcgatgaacaaaagcacgtcctgatgctcttcatcgcggaagtactcggccatggtcaggccagacagggccacgcgcatacgggctcccggcggctcgttcatctggccgtagaccagcgcggtcttggaaagcacgccgctttccttcatttcgttgtacaggtcgttgccctcacgggtgcgctcgcctacgccggcgaaaacgctcaggccgccgtgctgcttggcgatgttgttgatcagctccataatcagcacggtcttgcccacgcctgcaccgccgaacaggccgatcttgccgcccttggcatagggggcgatcaggtccacgaccttgatgccggtctccaggatctcggtagaggtctcctgctcttcatagctgggcgcgggccggtggatcggccagcgctcgcctgcctccgggtcgggctgattgtcgatggcctgacccagcaggttgaagatgcggcccagacattcgttgcccacgggcacggtgatggggcttccggtgtccaccgcgtccatgccgcgcaccatgccgtcggtggcgttcatggagatgcagcgggccacgttgtcgccgatcagctgcgccacctcggcgacgattttcttgtcgccgttctgaatctcaatggcgttgagcagttcgggcaggcagccgtcctcgaagcggatgtccagcacaggcccgatgatctgcaccactttgccaatgttttgactgctcacaataggtgttctcctttcgcgatgccgttacgattccgcaccggccacgatttcggtgatttcctgcgtaatgctgccctgacgggcgcggttgaagcggagcctgaggccgtcgatcatctcgcccgcgttcttggtagcggaatccatggcgttgcgccgggacgctacctcgctggcaaaggaatcgcacagggcgctgtacagccgtccggccaaaaagtccggcatgaccgccttcagcgtttcggcgggttccagctcgtacacggctgccaccggcaaaggctcctgcgtctccggcttgcggatgggcaaaagctgctccagctgaacctcctgcgtcatcatggactggaaggaggtgtacgccagccagatctcgtcgaattcctcgcgggtgtagccttcaatgagccgcttggccatcgcatagcaggaacctacggaaatgctttccacgcgcgggtactggtcgctgagaagctccacgcccagatgggcgtatttctcaacggccttgcgtcccagcggcagcacacagtagccggttccgtccgtgtgggcggccaccgccttgaatacattgttgttgtagcccccggccagtccccgttccccggcgatgaccacatagcagcggcgcttcaccggacggggggtgacgaagggcacgttggggtcggtgcagcgggccacggccgcggccatggctgctccggagatctgaccatagggtttgctggcttccatccgctccttggcgcggcgaagcttggaggttgccacaagctgcatggccttggtgatctgcatggtgctttccacgctcttgatgcgcagcttgatgtctttcatggacgctccggccatgttgcagcctcctttcccttagtcggccttccgggcgctgaggaagtcgcgggtgtagctttccagcgcctgccggagagcctcctcggtttccttgctcagctggccgctttcccgaatggcgttcagcacgtcggaatgctgggcctccatgcgctcgtacaggccggtctcatactcggctacgtcgctgaccttgacttccttgaggaaatcgtgagtcacggcgtagaaaatgcacacctgatcctccacggccacgggacggttcctcttctgcttgagcacttccacaatgcgttcgccctgcgccagacgagcccgggtgtccgcgtccagatcggagccgaactgggcgaagccctgcagctcccggtactggctgtagagcagcttcaggctgccggccaccttcttcatggccttgatctgggcgttgccgcccacgcggctgacggaaatgcccgggttgacggcgggcatgacgccggagtggaacagctcggtctccagaaagatctggccgtcggtgatggagatcacgttggtggggatgtaggcggaaacgtcgcccgcctgggtctcgatgatgggcagcgccgtaatggagccgccgccgtaggccttgtccacccgggcagcccgctccagaaggcggctgtgcaggtagaacacgtcgccgggatacgcctcgcgtcccggaggacggcggatcagcagggacagggcccggtaggccaccgcgtgcttgctcaggtcgtcgtagacgatcagcacgtccttgccctgatccatgaagtattccgccatggcgcagccggaatagggcgcgatgtactgcaagggcgactgttcgctggccgtcgcggacacgacaatggtgtaatccatcgcgccgcccgcggtcagggtatccaccatctgggccacggtggagcatttctggccgatggccacgtaaatgcagatcacgtccttgcccttctggttcaggatggtgtccagcgcaatcacggtcttaccggtctgacggtcgccgatgatcagctcccgctggccccggccgatggggatcatgctgtcgatggccttgatgccggtctgcagcggcacggacacgcccttgcgctcaatgatgccgggggcgttgcgctcgatgggatagtactggctggtttccacggggcccttgccgtcgatgggatggcccagcgcgttgaccacgcggccgatgagcttttcgcccacgggcacggacaccacggtgccggtgcgctccaccacgtcgccctcgcggatgccctcgtcgctgcccagcatgacgatggccacggagttttcctccaggttcagcgccatgccgtactcgccgttggagaagcgcagcagctcgttggccatgcacttgtccagcccggaggcccgggcgatgccgtcgccgatcatgatgacggtgccggtatccgcctgtgaaatcttattttcgtaatgcttgatctgctctttgatgagcttggaaatttcctcgggttttaactgcattgtctcaccgcctgttatcaggcctgaccgccgatggcccgatggatggccgtaaggcggctctggacggtattatcgtagcgcttgccgtccatctccagccgaacgccgcccagcaccgccgggtcaagccgttccttcaaaacaatctgtttgccggtcatggcgctcagtttttccatgagctttttccgctgcccgtcgtccagcgggacggcggtggtgacgctggcctccacaatgccgttatcctgaagataacgggcccggtaggccttcacgcagtcggagaattcatgcaggagccccttttccagaaggatcttgcaaaaattcagcacataggggtgtacctgtccccgcagggtcctgtccagaatatccagccgctcctcccgggccagagacatgttggacaggagccgcaggtaatcgggctgagccttgaagctgccgttcagcacgtccagctgctccagcacgtccccggacagcgcttcctccgcgcacagggcgtacaggccttcgccgtactctctgctctgctccgtcactgccggtcacccacgttcctgataaattcatccacaaaggtatcctggtcttccttgcggatctcgcgttccacgaccttggatgcgatgctgacggccaagtcggagatctctccccgcacgtccgtaagcatacgctgtttttcctgggcgatttcctcttccgccttctgcttcagatggctggcctggctgctggcttcctgaacgatctggtcgccgcggcgctgggccgtctgggtggcgctgcggacgattttgtccgcctcgtcccgggccccggccagcttctcttcatattcctgcttcatgctttcggcgtcggtgcggctttgatccgccgcgtcgtacatttccgttacctgactctggcgggtgttcattacgccctgcaccttggcgaaaagcacttttttcaggatcagatagatgatcagcaggttggcaagggaaatgaggatctgccacaggttcaccgaaatgatgtccaatgactgtacgctcatatactattgcctttccaattcagggatccgtcagccaatggccttcaggagaatattcacaaacaggttgggggccacgaagatcagcaggatgccgatgaccaggccgtacagaccggtggtctcggcgatggcgcagcccatgatcatggtagaagtaacggcgctcttgcactcgggctgacggccgatggcttcacaggccttggcaacggcgttgccttcaccaataccggggccgataccggcgatcagagcgagacccgcgccgatggcgcagccggcgagaatgataccaatagcgagttccataacagaatcctccttgtttgcagcgtgtgtggacaaatgggcttccctgcgttgcttttggcagggccgccgggttattcctcctcaggggcggcggtaccgatatacagcatggtcagcatggcgaagatgaacgcctgcatcaggccgctgaaaatatcgaagtacagcgatagaatggccggaaggccgacctgcagcagggggaagcttcccaggatgccgggcagccagcccagcagcagcttgctaaggccctgcagcgcgtaggccaccagcgtggaaatgaccacgccggaaagcacgtttccgtaatgacggaacgacatggatacgggggtggcaaattcgccgatgatgttaaagggcgcaaagaccggcaccggctcgaagaaccccttcacatacggcccaaggcctccctggagcttgtagtgggtaatgagcacgaacaccagaatggcccatccggccacgacgttcatgtcggaagtagggggccggaggccgaccaggctcatcagactggaaaacgcggacagggccatgatgcccgccacaaagggcgcgaagcccatgaagcgcttgcccatgttttcccgaaccagaccgttggtcttttctacgatccattccgccaccagctggcgcctgctgcccggcttcacggtgatgccgtgtaccagatacaggcacaaccccaggatggagatcatcaccagccaggagttcacctgactttcggtaatgggcagatcctgcaccggcatgggaatggtaaagtagatgcgcgccccgctgatctcgatcccttccgacgctggagtcgtcaggatcttgagcgccatccccgctaccagcggcaggatcatcatggcgatcagcagaacgtccaccgcacgaaaccgcgcggattttcgattcatttcggatcatccctcctttgctttggtaatgatgagcagaagcggccggctttcgccgcgcttctgcctgcggatatttttccttcccttttccttcctataaagtaaagaaaaggaacgatcaacgcggaaggtttcccttctgcgtttaatcgatcttcacatcgtccttccccccggaggtggcctgaccgttctttttgtcaaacagcggacggaacgccactccgatacgggggaagaacaggggcacgatcaccgctaccgtctggaagcagttcagcgcgatacctacgcagcagatgacgatcagcatcagcatccgcagcagctgggacagcttcagcttggcggcggcggccttttcgtccagccccacggcccgctgaatggtccaccccatcaggaagaaattgaggatggccgcaacgcctcccagcaggttgcccagcgggacggtgtagtccatatggccggtcagcaggaacaccagctccatcaccgcgctgagcagaagcacccagccagcgatatagccggtctcttttttgacggtagggtcgatgcggctcattcctcatttctccttccgaaaatcagatcggggacgcgctgcgccgcacgggcggagcgtgtcgaaacaaaggcttacttggtgccgaagagacggtcgccggcgtcgcccaggccgggaacgatgtagccgtgctcgttgagcttttcgtcacaggcggccacgtagatgttcacgtcgggatgatccttctgcacgcgggcgatgccttcgggcgcggcgatcaggttgaccagacggatgttgtggcagccgcgctgcttgaggaacgtgatggcggcggaggcgctgccgccggtagccagcatgggatccagcaccagaagctcacggttctggctgtcgtcaggcagcttgcagtagtattccacagggttcagggtctccgggtcccgatacaggccgatgtggcccaccttggccgcagggatcaggttcagcacgccgtccaccatgcccagaccggcccgcaggatcggaacgataccgaccttcttgccgctcagaacgcgggtcttggtcgtgcagatgggcgtttccacttcggcttcctcggtggagagatcgcgggtcacttcgtagaccatcagcatgctgatttcctccagcagctcgcggaactcctttgcgccggttttcttgtcccgcatcaggctcagcttgtgctggatcaggggatggtcgaatacgtataccttacccatgaaatagtgcctccttcgtcgtagtgcctttgcattggttttcttccggccgctccctgccgcttttcagcagggcggaagttgccggattcatccactctccattataggggaaaggacccgacattgcaagcaaaaccgtcaaggctctccgaacgctttttcattctagccatccccgggcggccaaacaatgggcaaaggggacggactgccaaaaagtttggcattttgctcccagcgcccagtccccctttttcgtcctctgtggaagaaaaaccccttgtcaaccctttcaaaagcgcgtataatgagcgccgtggcaaggatcgtgaaacccgaagggcttccgtctcaagagagcagccgtctggtgcaaggctgcggcgggcgcttcgtttccatcacgggagccaaccggcgacgagccgggcgggcgcgcccgatacagcgcaaaaaaagggaaggcattttgccttaatctgggtggcaccgcggagcacgcttctctccgtccctgagaccggcaggtcttgaggggcggttttcattatatccggacaggaggaattcaaaccatgctggacatcaaacgcatccgacagaatccccaggaattgatcgacgcgctgaaggcgcgcaataaggacatctctctggacactttcctcaaggaagacgaagaacgccgcgccctgatggccgaggtggaggagaagaaagccctgcgcaatcagacctccaagaagatcggtctggccaagaagaacggcgccagcgaagaagagaccgccgccatcatgcgggaaatgcgcgaactgggcgacgtgatcgacgcgctggacgaaaagatcaacgagctggacgcgaaaatgcagcagttcctgatgagcgtgcccaacatccccaacccccgcgtgccgatcggcaaggacgacagcgaaaacgtggaagtgcgccgttggggcatgccccgtcagttcggctgggagcccaaggcccactgggacatcggcaccgatctgaagattctggactttgacaccgccgccaagatctccggcgcgcgtttcaccatctaccgcgggctgggttcccggctggagcgctccatcatcaacttcttcctgaacacccacgtggacgcgggctacgacgaggtctatccgccctacatggtcacccgcgccaccatgaccggcaccggccagctgcccaagtttgaggacgacgcctacaaggtcgatcaggacaccttcctgatccccaccgccgaagtgcccgtcaccaacatgtaccgcgacatgattctggacggcgcgcagctgcccatccgtcactgcgcctactccagctgcttccgcgccgaggccggcagtgcgggccgcgacacccgcggtctgatccgtcagcaccagttcaacaaggtggaaatggtgaagatcgccaagcccgaagaaagctacgccgagctggaaagcatgaccgccgaagccgaaaaggtgctgcagctgctgggtctgccctaccgcgtggtgaacctgtgcaccggcgatctgggcttcagcgccgcccagacctacgacatcgaagtgtggatgccctcctacggccgctatgtggaaatttccagctgctccgactgtgaggacttccaggcccgccgcgccagcatccgctaccgcgagacccccaaggacaagccccagttcgtccacaccctgaacggcagcggcgtagccgtgggccgcacggtcgccgccattctggaaaactaccagaacgaggacggcacggtcacggtgcccgaggtgctggtgccctatatgggaacgaacatcatcaaataaatcaagcgattctccccgcaaggggaagaaaaccccccgctgcaggaaagggcctgcggcgggggttttgttttatcggaggaagtttatcggcctcagcgcggaggatggagacgccgccgcgagggatgcgtattggcttcggcaggcagaccgcaagcgaggcgcacggcagtgcggttattccgatggtgtgtcccgaaaaaatccctttgttcgcttccaaaagtgaaagcctttccgcgagagcaatggttgcagtccctttggtctcccgccagccttcggggcccgaaggcttccaaaggggaacgaagggaagcgggtatccagtggatgcaaccgccgaaggcggttagcgactgacaggcctgcgcaaatacaagggccgggcacggcagtgcccggaacgccgatatttgcgaattacgcacagcggggcgggccgcctctggagtcgccgtgccgctggctttcttttgcacacttttctttcgccatcgaaagaaaagtgtgagcgccccatagggctgcaagccccatcacccgcgccgcagtcggcgcgtcagtccccggcagcagaaggcctgcgcctgcgggccccgaaggcttgcggaattttcccatagggctgcaagccccatcacccgcgccgcggtcggcgcgtcagaccccgccggcagaaggcctgcgcctgcgggcgcaccaaagggctttcctcggggcaaacaatcggcgcggttcgcactgccgtgcgctccgcttgttgtttgcctgaactccgggtcgctaaccgccttcggcggttgtatccactgggcacacgctccctctcggcccaagcttcggtctgcggtagccccttcggggctgtcctcgaccttggttcgcttcgctcacccttccgggaaaaaggctcctattgcccattttgacggcggggctcgcaatgtcgcgcgcaatggagctggatagctattacacaggggcggagcgcgctcgtgctcgcctttttccgccgtcaaaatgagcgggcctttttccctccgctgcctatcgccgccctgccccggcgcagttggcgggggacatactcaacccctgcagggtgggatgctttggcgtaacttgtgttttttcgcaaggcaaaaggccagcgggaaatcaaatccacgctggccttgtttgcgagccatgaggcccgtcgccgaatggcggtctttgctgtgcagctggcgggaatctgcaccagacccgcgagccgagcggcggtagaaaggagccaatctgctttcctccgagcgctctgcgcgcacagcgcgcagagatgggtgcagggctttagccctgctggtggttgcggttaggaccgcggaggaggtcgccgggggcgacgggaaaggggaagcggagcttgagaagggtgcccgctacgctggccgtctggattgactcgcccgtctcggccagaaccatggcttcgacggtgaaggaatgactgcctgtgggggtcagggcttccagccggtcacccacgtagaagcggttcttcaggcggatcagcgccggttcgccgggcgcggcggcttccagtacgtcgcccacgtattccatggtctgggaaaagccctccgccccggcggcgggctggggcgcgccaaagtaaaagcccgtgttgctctgccggtggctggccttgtccagctcccgcatcaggtcggggacggcccggcggaaggcttcctcgccctccttttccagcagatccagcccgtggcggtacacggacaccacggaggccacatagtaagccgtcttcatccggccttcgatcttcaggctgacgatgcccgcatcccgcagctccggcagatagggcagcatgcacagatcataggccgagtagagataggttccccgctcgtcctcgcagacgggcaggtattcgcccggacgcttttcttccatcagatgatactgccagcggcagggctgggcacaggcgccccggttgccgctgcggcccaccagtgcgttggataacagacaccgcccgctgtaggccacgcacatggccccgtggacaaaggcctccagctccagctccgacggcaggagggcgcgcattccccggatgtcctccatggacagttcccgggacaggacgatccgctccgcgcccacggcccggtgcaggtgcatggctgtgggcgcgttcatcacattggcctgcgtggaaatgtggatgggcagccccggcgcccgctcgcgcagggtcagacaggctcccagatcgctgacgatggccgcgtccgcgccgcagcgcagagcggtcttgcccgcctcggcaaagccgtccagttccttgtccgtgggcaggatgttcatggtgacgtagaatttcgcgccctgcttgtggcactgttccgccgcttccgcaagggccgcttcgtcaaaattgcccgcaaaggcccgcaggccgtactgcttcatgccgccgtacactgcgtccgccccaaagcgcagggccgccttcagctgctccatgcccccggccggggccagcagttccattcttctgttcaaatcaaattccccgttcctgatcgtaagcctgccacagcggcgagtagatggacacggcctgattgtgctcctccagcgtcttggagaaatacagctcgccggtgctgggatccttgctgcagaagtagaggtacttctccgccacatagctctcgtccgggtacagggccgcgtagatggcctcgggggacggattgcagatggggcccagcggcaggccgctgacgatataggtgttgtagggcgaatccacctgcagatcgctggaacgcagcgccatgcggcgctggccggtgacatagtgaatggtggggtcgctctgcagcttcatgccgctgttcagccggttatggaagacggcggacaccttggcaaaatcggccttcttggcttctttttcaatcatggaggccagcgtcagggtctgatccatggtcatgcccagctcggcggcccgctcctgccactcgttggagaaaacatagtccgtctgatccagcagctttttcacaatgtccttgggcgtggcgttcaggtagacctcgtaggtgttgggggccagatagccttccagcaggtatttgcggctgttcacgtcccgggtcttcagttcgtcctgaaggaagtaatagtcggtcacgccctcgccggtcttgcacaggctcaggaattccgccgtatcctgcaaaatgcccttttccttcaggtaggcggcgatgttctcgatggtgtagcccgggatgatcgtaatatccgtcacggtgggccgtccgtcgccggtggtcagaagctgggcgatctggaacatatccatgctctttttcaccttgtaatcgcccgcctgaatcttctggcccatgccggcgaagtcgcagtaatacttgaacacggagctgttcttgatgagtcccgcgctttccagattgcgggatacccggctcaggctattgcccgtctccacggagaaggcgatttccgtatcgtctgcggggtccaccgggctcagatatttgtcctgcacatggctccacacggtggacagcacaccgaacacgatcagcagcgcgcacaggccgatcaggacgggccggagaattttccacaggccgctgaaccagtacaggccgtattttcggtcctcccgcagggattcgtagtcgtaatcctgttcttcagggatttgcggattctttctgcgtttcaatggggttcctccttgctcagccgaggggaatatccagcccggcctcccgtgtgattttttccatcagctgggctaccagctgctgcaccttcatctgggccagcagatactcgctggcctcctcgctttcgtacaaaagggcgctgagctgctcgaaggcgcgggtatcctcttctctgggctcgccgccggaaagggccgccatctgcaaagcgctctgggccgcggcaaaccggcgcagcagcgccgccgtgccctcgtcggccatcacgctttcccgaagggccgcgtagcgcctccagctttccgtctggtgcagggcgctcagcagctcatccgccgcccggcgcaggttctcgtccatggtaccggcctccccgtgcttttcttccagaaaatcccgcccttagtataacgcatcttgagggaaatttcattccctattttccccttctgccggtaacatacccgcaaacagccatgcatatccttgcaccagccagacgaaggaggaatgaatgctttgagtgagcagaactttgatctgtaccgcgatattgccaaacgaaccgacggcgacgtatacatcggcgtggtcgggccggtgcgcacgggcaaaagcaccctgatctcccgcatgatggaggagctggtcctaagccgcatggcggcgggcccccggcgggagcggctcaccgacgagctgccccagagcggcagcggaaagaccatcatgaccacccagcccaagttcgtgcccagcgaggcggtcagcgtcacgctggacgatcagtccgccgtgcgggtgcgcatggtggacagcgtgggctatctggtggagggcgcgctgggcacagaggaggacggcgcgtcccggatggtgcacaccccatggttcgactacgacatcccctttgagcaggcggcggagatcggtacccgaaaggtcatcaccgatcatgccaccatcgggctggtggtcaccaccgacggcagcatcgccgacctgagccgggaggcctatcagcagccggaggaacgggtggtgcgggagctgaaggagatcggcaagccctttatcctgatcctgaacagccgccacccggaggcggaggaaacgctggccctgcggcagcggctcagcgagcgctacggcgtgcccgccctttccctgaacgtaaaggaaatgggcctgcccgaaattcagcaggtctttcaggaggtgctgtatcagttccccctgcgggagatccgcgtttccgtgcccggctggctcaacgcgctggacgaggggcactggctggtgcagcacgtgctggagcacgtgaaggaagccggggcgaaggtcagctgtatgcgggatcagacggtctttgccggggcctttgcggacagtccctacacggacggcctgcggcccgacggcatcgagctgggcaccgggcggctgaacttttccctgcccttgaaggacggcctgttcaaccgaattttaggcgaggaatgcggcaccaccatcgagggcgacgcgcatcttcttcggctgatgaaggaactggtggcggccaagagcgagtacgaccacgtagcggacgccctgcgcagcgtccgggagacgggctacgggctggtcacgcccaccatgaacgagctgaccctgcaggagccggagatcgtccagcagggcagccgcttcggtgttcggctgaaggccaacgcgcccagtctgcatctgatccgggtggacatcgaaaccgaggtctcccccgtcgtcggcacggaaaagcagagcgaagagctggtcaaatatctattggaggagttccagaacgacccccagaccatctggaacacgaacttcttcggcaagagcctgcacgagctggtgcgggagggccttgccaacaagctgatgcgcatgcccgtggacgctcaggaaaaagtgcaggagaccctcagcaagatcatcaacgaaggcaatggcggcatgatctgcatcctcctctaggcagggggtgaccccctgcaccccggactgcgcgccgtaggcgcgcagggcgctcgggggacatgcagcttgactgcgaaattaccgccgctcggcgacgggcctcgcggctcgcgggtctggtgcggctccctgccgtttggccgattcagaccgccattcggcaacaggcctcatggctcgctgcaaaggccagcatgaaatcaaaatcacgctggccttttgcgtcgcaaaaattctcaagccacaacgaagcatcccaactggcatgggccgagtatatgcatcgccaaccgtgtaagaaaaacaagcctgtttttctgcgctgcaaagccatccaaaccacaccgaagcatcccaagcaccgccatttgagtctgccctgcaccaactgcggcggagcagagcggcgataggcagcgaagggaaaaaggcccgcccattttgacggcggaaaaaggtgagcacaggagcgcgcacgaacgttggtgttcactatctaactaggatgcgcgcgacgttgcgagccccgccatcaaaatgggcaatagaagcctttttcccggagtcgccgtgccgctggctttcttttgcatacttttctttcgccatcgaaagaaaagtatgaacgccccttgggactgcaagtcccaccacccgcgccgcagtcggcgcgtcagaccccaccgggaaaagaaggtctgcgcctgcgggcgcaccaaagggctttccgctccccctttttggaagccttcgggccccgaaagctgaggaatttatccccatggggagacatctccaccacccgcgccgcagtcggcgcgtcatgctccctgacaggaagctgcttccggcagagttgtcatgtaatgccgcttgcagggggctttccgctcgccccctgcaccccttcggttcgtcctctgaaaataacgcctatgggacagcaagtcccactcccgcgccggagtcggcgcgtcaggccccgccgaaaaatatccccgcgcctgaatgtccgcacaaaaaagcggaagccgcacactccgcgccgcttccgctttcccatttatttcaggggataaaactccccgccccagtagatctccccagagaacccctccggcaccgccccggagacaaaatacgccgcgctgcccaccgcctgattttcgcaaagcgtgttcgtcatcgcatagacccatagccgctcctgctggccgtccatgccctgccccgcgtccagaaacgccggggcgaaattcaccaaaaccgtccggccggaaagcgccagccccagaatgtccgcgtctgacaggctgcccaccggcatcaccgccgccagcccgggaacctcgtcatagggctgcgggcccttgctcagctccaacagcagcgcacggggattctgcttctgataatagaccaccggccgcctgctggcctgtaggccccggccctcgccgtcggcaaagtacagggtgcacaggtcgcacagcagcggggcaaaatccgcccgcttcatcacctgatcggtaaagacgatggagctggtaaagctgtccgtcagcatcagtgtctccaccggctgctcgccgatggtcaccgtcacgcccgacgcggcggggaaaaagctgcacagcgtgtagcacagcgaagccatgcagttggcccggctcacgttcgccttttccagcatgtcgttcaaagaataggagaaattcagcgtaatgacgctgccgcccagctcgtcggaataggcgacctccgggtcgccggtgagcatctccaccagcagattcagcggcggcgagtcgatctccgaaaccgacgcgcccttgctcaattcccgcatgatctggacgatcatatcggacggcttctggttggcaaagctcagagagcgcacctcgctaagcagtcccggcacgcccgccagcggataatacagcgtcacgttggcggaaagggacttgtcctccgcgctttcgttcagccccacccggcggctgagccgctgctcgtagaccgaggacaggtcctcgctcaggctgcggctgaacgatcccataggcagagtgttggccacgtccagccctacgggatgatcgacgatcaggaagttcacatagtcgatctccttcagctccgtcagcgtgttggcgatggcctgaaaagcaatgtacaggtcgccccggttcagctgcagcgccgaggccgccagattcaccgtggccgcgttccggctgacttccaccgggttggccccgtacagcgccagctttacattcccgcccagcgcggcggcagtggacgtgcccgagtggttcagcagcgcccgcaccaggctttccgcccggggtcgggatgcggaaaacgtcaccgggctgaccacggcggtcagacggctgccgctgtgccggggcaggtacagcgtagcgtcggcggtgtattccagcgccgcgtcgccgatgggcgccacatagctctgaaccgccggaggcaaggtgatctccggggacgcctccgacgcgggcagactgctcccggcctgacaggcgcacagccccggcaacagcgccgccagcagcagtgccaacgcgcgtttcttccctttcacggcagtcctctctccttcttgtacttcgtaggcgaaggcctctttccaacgcctttgaatcaaatgatcgaatatcgatacgaatgggacggcagcacccgcgaaggatgcttctgctgcacggcgtgctcgtcctcggtgcttcgcacccttttttgcggcccgccccgctttgcgtcgcgggcttcggactgcggtagccctttcagggctgtcctcgtcctcggcgcttcgcacccttttttgcggcctgccccgctttgcgtcgcaggcttcggactgcggtagccctttcagggctgtcctcgccctcggtgcttcgcac

SEQ ID NO: 2270 - DNA, 7698 bp, Unknown
  16S sequences of unknown bacteria
cggcgccccctttttcgttgggggaaataatttcaaatttcttctttacagcgagaggctttctgttatcatacttttcgctgctgaggcagtggggtgttagctcagctggttagagcgccggcctgtcacgccggaggtcgagggttcgagtcccttacatcccgccatcgaatcgcaaagaagccatcggatatccgatggcttctttcatttcggcactcggttgcaacgtgttggcaacgatatgcgcagcgttgctgacaagtatccaacgcggattattctctccaactacgtattacccgagagaaaggggttgccgtgggcaattccatcatgttggaaaacctcgacgccgacgcgtcgattgagcagatccgcgcgttcttcgagcgcgaccagttcgcgcacaagtgcctgggcgccgtcgtcgacagctacgacccgcagactggagcggcgaccgtttccatgacgatcgacgatcggcaccataacgcccagggcttcgtcatgggcggcgtgcttttctcgctgtccgacttcgcgcttgccgtcgccacgaacatggggcaggaggcgtcctcgtcggtgagctcggccatccagttcatgcgccgcgccaaaggcgagcgcctcatcgccaccgcacgtcccgacaagattggccgcgcgctcacgttcttcacgatcgacgtcgaagacgagctgggcacgcacgtgtgccgcatgactgcaacgtgcatgcgcaccgaccactgagctgcgctagaatctacgcgacagcaagttttttgaccttgggggagctagtgaagattctcgttaccggcggagccggcttcatcggaagccataccatcatcgagctgcagaacgcgggacacgagcccattgcgttcgacaacctgtgcaacgcctctccggtcgtgttcgaccgcatcgaggcaatcacgggcaagcccgtcgagtttgtcgagggcgatatccgcgacgagaagaagctctccgaggtctttgccgcccatgacatcgactgcgtcatccactttgcgggcctgaaggccgtgggcgagtcggtccacaagcccatcgagtactacgacaacaacgtgggcggcacggtcaagctgctcgaggccatgcgcgatgcgggttgcaagaacatcatcttctcgagttccgccaccgtctatggcacgcccgagaagctgccgttgaccgaggacatgcccaagggcgaggtgaccaacccctacggccgcacgaagtccatcatcgaggacatcctcaccgacgtgcagttcgcgtatccggatatgaacgtcgtgctgctgcgctacttcaaccccatcggggcgcacaagtccgggaccatgggcgaggacccgacgggcatccccaacaacctcatgccctacatcacgcaggtggctgtcggcaagttggacaagctcggcgtcttcggcgacgactacgacacgcccgacggcaccggcgtgcgcgactacatccatgtcatggacctcgcgagcggacatgtcgccgcactcaaggcgctcaagcccgaaggcgggctgtccatctacaacctgggcacgggcaagggcacgagcgtgctcgagctggtgcacgcgtttgtcgaggcgacgggcatcgacgtcccctacgagatcaagccgcgccgtgcgggcgacatcgcggcgtgctatgccgactgctccaaggcagagcgcgagctcgggtggacggcacgctacgacatcaaggacatgtgcgaggactcctggcgctggcagcgcatgaatcccaacggctaccgctcctgatcccccgtgacccccccgcctgcgagggcagtagtgccaatcaaacggctgtgaaacggtttaccgtcgcacagccgtttttctttagaatcgcaagccatgaccagactgctcgcaacatatttccgacgcttcctgccgctgctcctgctctcgtttctgctgacggtggcacgcgtcgtctgcgagctggagattcccaactacatgagcgatatcgtcgacacgggcatcgtcaacggcgatatcccgttcgtgctccagaccggcctgctcatggtgctgtgggcgctcggcgcgatgaccgccgacctgctcaactcgcttgccgcctcccgttcgagcatggggctgggccgcgagctgcgcagcgcgctctatcgccgcgtgagcgcgttcagcctgcccgagatggacgagattggcacctcgtcgctcatcacccgcacgaccaacgacgtgcagcagctcgagcgattcgtgcagatggggatgacgatcgcaatgatgtcgccgatcatgctcgtgggcgcggccgtcgcggcatggcgcatgaacggcgagctttccatggtggtgttcgccgccatacccgtgcttctgctgcttgccttcgtcgtcatccgctgggtgctgccactgctgcgctcgctgcaggcgcgcatcgacaatctgaaccgcgtcacgcgcgaggggctgaccggcatccgcgtcattcgcgcgtaccgccgcgaggcatacgaggaggcgcgcttctccagggcaaacaaggacctggcggacacgaacatcgccgtcgcgcgccgcatgatggcgctcatgcccgcaatctcgctcatcctgaacatcgcgatggtgctcatcgtgtggctcggcgcgcagctcatcgatgccggctcgttccaggtcggcgacctgatggcgatcatccagtacgcgatgcaggtcctgttctcggtcatgatgctctcggtcatcttcatgatgtggccgcgcgcctccgcggcgggcgagcgcatctgggaggtcgtctcgaaagagccgagcatcgtggacgccgagcagccggcggaagtctcggcggagatgctcgcgagtccccacgaggtgcgcttcgagcatgtgggctttcggtttcccggcgccgaagtcgcgacgctgtgcgacatctcgttcacgctcgagccgggcaagacctatgcgctcatcggctcgacgggctcgggcaaatcgaccgtcgtcaacctgctcgagcgcttctacgacccgacgagcgggcgcatcaccatcgacggcatcgacatctcgcagatgcgccaagacgatctgcgcgcgctgatctcctacgtcccgcagaagacgacgctgttcacgggcacgatcgccgacaacatccgctacggcaacgcctcggcaagcgacgacgacgtcgtgcgcgcggcaaaggacgccgctgcctacgacttcatcatggagaaggaagacggcttcgacacgcagatcacgcaggcgggcggcgggctttcgggcggccagaagcagcgcgtgtccattgcgcgcgccatggcgaagcgctcggggctgttcgtcttcgacgactcgttctccgcactcgacttcaagaccgatgccgccgtccgcgccaacatctcgcgtgcgacccaaggcgcgaccgtgctcatcgtggcgcagcgcgtggcggccgccatggacgccgacgaggtcatcgtgctcgacaacgggcacgtcgactcgatcggcacgcatctggagctgctcgacgcaagcgaggtctaccgcgagatcgtcgcctcccagatcaccgaagaggaggcgaggtagatggcagcatccgaagaaaacggcggcagcgccgcacgccgccccggcaggcccgggcacggctttcacgggcgcaatctctcggcgccggtcgagaaggcgaaggatgtgcgcggcacgctgcgccgcctgttcgcgtacctgcgccccgagctccccaagatcgtcttcgtcctcgtctgcgccctcgcggcgacggcgttcgacatctttgccccgcgtcagctcggcatggcgacgacgaccgtcttcaacggtgccgtggccaaggcgcagggcacgggcgcgggcatcgactttgggctgctgcaacagatcctggccgtcgtcatcgtgctctacctgggctcgggcatctttcagtacctggagatgttcgtcatggcgcgcgtgacccagaacgtggtctacaacctgcgccaagacgccgaggcaaagctcaaccgcctgccgctttcgtactacgactcgcattcgaaaggcgacacgctctcgcgcgtcgtcaacgacgtcgacctcatctcgtccaccctgcaagacagcctcacgcaggccatctccgcggtcgtcacgattgtcggcgtgctgctcatgatgctgttcatcagcccgatcatgacgctcatcgcgttgtgcacgctgccgctttccatcgtcatcacggtctttgtcgccaagcgctcgcaaaagctctacctggcgcagcagacggcactcggcgcgctcgacgggcacatcgaggagacgtacggcgggcacaccgaggtgcgcgcattcacgcacgagcgggaatccgtggcggatttcgagcgcatcaaccgggagtacttcgggcacgcatggcgcgcgcagttcgtctccgggctcatccgcccgctcacgcagttcgtcggcaacctcgcctacgtcgccgtctgcgtggtcggcgcctggcaggtgctcgtcggggccatcggcgtgggcgacatccaggccttcacgcagtacatgcgcaacttcacgcgccccatcgcccaactcgcgagcatcatcaacacgattcaggccaccatcgctggtgccgagcgcatcttccagctcatggacgagcccgagatgaaagacgagtccgggctgaagccgcatgacgcgccggttgcggggcatgtggaattcgagcacgtcaagttcggctacgttcccggccagacggtcatcaaggacttctcggtcgacgtcgcgcccggccagacggttgccatcgtcgggccgaccggcgcgggcaagtccacgctcgtcaacctgctcatgcgcttctacgagatcgacggcggctccatcaagctcgacggtgtagacacgcgcgagatgtcgcgccatgacctgcgccgccacttcggcatggtgctgcaggacacgtggctgttcaacggcaccatccgcgacaacatcgcctacggcaacgacgccgccagcgacgaggatattctgcgcgtctccaaagcggcgcttgccgaccacttcgtccgcacgctgccggacggctacgacaccgtcatcaacgaggagggcaccaacatctccattgggcagcgccagctgctcacgatcgcccgcgcccttctggcagatccggagatcctcatcctcgacgaggcgacgagctcgatcgacacgcgcaccgaacgtctcgtgcagcaggccatgggcgagctcatggcaaaccgcacgagcttcgtcatcgcgcaccgcctctcgacgatccgcgaggcggacatgatcctcgtgctcgacaagggcgatatcgtcgagcagggcacgcacgacgagctgctcgccaagggcggcttctatgccgacctgtacaactcgcagttctcggagtgtgtcgacgcgttcaacgagtagcccgaaaagatcgcggcaccgtcacatcctcaccatggttcgcacgtataatgctcagacactacatgcatgggcattgtctgccccgcaggcgtgcgggcgcgcatcgaaaggagctgctggcaagtgatacatgtggccgcgttcgatttggacggtaccatcttggacggcgagtcgccgctcaagctcacgacgagcctccttcgccatcgtgagctgccgctgcacaagggcgtcttgatgggcgtgtggggcatcaagtaccgcctgcgcctgccccagaccgaaagcacgccgcgcgagctgctgttctcggcgctcaccgagcccacggtcgaggaagtggacagcgagatcctcgagatctacgacaagcgcatgcgcaagcacatccgcccgggcgccatccgcgagatcgagaagtgccgcgccgaggggctcaagctcgtcttggcgtctgcgtcgttcaagccgatcacgacgaccatcgtcgacgagctgggctttgacgggcagatatcgacgatcatggaagagcgtgacgggcactacacgggcaaggtcgtgggcgttccggtgcagggcccggaaaagctccgcctgctcatccagtactgcgacgacaactacgggcacaaccagtgggtgctcgagcgcgcgtacagcgaccactacagcgacgtgcccatgctccagatggcgcaccacgtgacggtggtggacccggatgccaagctcgagcgcatctccaagcagaagggctgggagattgccgactgggacgagtagcctgccgggcgagtcgcccttgagcgacgagcgcctggcggcgttttccgatctcgtgcgcgcgaagggcgcggagctctaccgcgacctgccctggcgcaacacccacgacccctatgcgatcatgctctcggaggtcatgctccagcagacgcaggtcgcgcgcgtgcgggggcgttgggagcagtggctcgcgacgtttccgacagtgggcgacctcgcggccgcgcccctgccgcccgtcttggagctgtggcaggggatggggtacaaccgccgcgcgctcaacttgaagaagtgcgccgagcaggtggtcgagcgcttcgacggcgagatgccgcgcggccacaaggagctgctgagcctgccggggatcgggcctgccaccgctgcgggcgtgcgcgtgttcgcgtacgaagagcctgacatgtacctcgagacgaacgtccgcacggtgtttctgcacgagctgtttcccggccaagacggagtgggcgacaaggagcttattcccctcgtcgaaaagacgtgcccgcagggccccgaggtccgggcgtggtactatgcgctgctcgactacggcgcgcacctgaagaaggtgctgcccaatccgagccgccgcagcaagcaccatgtcagacagagcaagttcgagggaagccaccgtcagaagcgtgcctacctgctgcgccgcgtgctcgaggggcctgcgacgcaagaggcgcttgccgccgatctgtcggtggccgagcagcacgcgggacgcgatgccgtccccgccgacgaagtgcgggcgattctcgacgagctttgctccgaaggcttcatcttcttggggccagatggacgctggtcctgcgccgaatagcaaacggcgccgcattcctgggaggggcagggggcgccagcgtcttctcgccatggggtaccgccatgtccccgcgcgcaggtgcgcatggtagaattcgcgcaatgtcttgttgagaggactggtttcacgcatggcgcagcacaaaccgatatacgcgtttctcggcccggagggcacgttcagcgaccaggccgtccgcatgttcgtgagcgagggcaggcttcccgctgcatacgagccgctgccgtgcgacagcatgtccgatgtgttcgaggcggtcgaccgcggcaaggccgactacggggtcgtgcccatcgagaactcactcgaaggcccggtcacgacggtgctcgatgcctttgccttcacgacccgcgcggagattctcggcgaggtcgcgctcgatatccaccagtcgctcatcctcgcgaaaggcgccacgctcgacggcgtcacggccatcgcctcgcaccc

SEQ ID NO: 2271 - DNA, 27049 bp, Unknown
  16S sequences of unknown bacteria
cttcgttgtctacaagcctcaggatgttgtcatacgtcgtccgcgctttctgttccgctgccatgtcctcggtcaggtccgtgatcggatcgcccttggactggaagtaggatgccgtaaagggaacgcccgccgcagactggggatagatgcccagcgtatgatcgacaaaataagcgtcgagcccggcatccttaatctgctgcacgctgagcccgtcgcacagctgatacaggatggcagaaatgatctcgacatgtgcgagctcattcgttgcctgatgttatcgatgattttttaccatagcagagtattggacttaaaaacgccctcacctaagcgagggcagaggaagttcagaaacgaatatgatctattgtttctgggagtagagtaatagcaaacacacatatattattattgttatggcagcatttgtcaactaaaaatcgccctcgaccacgcggccgagggctgttgttatttgccttctttgatttcgatcatcgggtccgccttgcaccagattccatgaatcttggcgaggttattgggaatgtcgatcgcttctaccgtggcattatcgaggtatactttagccttggtattggcaagataattgtccttctttccgtcggatgcatcatactcagatacatacttggtcgggaaccatccgcccagatcagggatgtttacacattccacaccgtcaatatatttgattgcggatccattaaccgccttgatcgccatcggttttgacgtgaccacgctgcctaccgtgaggatgtcgtcgcacttttcagtagtcgatgtaaccccatatctgcgatcgacttctgcttgtactgctgcataatcgtatccggcagcttcgagcttctgcttacgagcgtctccattgccccactttccagcaatgacctcatcagccaactgcgatacggtcttcctagatgagttgctgccgcttcctgtgccgacgctgggcttgcttgcagaagtgttgccattgtagtacgcttttaccttgctcttgaacgtactccagttatatggcttcccggcgcgaatctgcgacgggcagtttttgccgctccagtcatgatgctggtagagcttgtcagcagacaatcccttcttcttgagctgctgggcagccagctgagctgcattatcggttgccttctccagatctccgtcagagttcatacagatctcgatggcaatggtctgcgtgtttcccttgccgctgccaccgtcgccggcgtgccatgcaatctcgtccgtaggaatggactgatatgctccattctcatcaaccgcaaaatgccatgactgctgcttgttcttccagctgttcttcagcagatttgcatgagcttgtgcgtcggcgccgactccggaattatccgtgttgtggatggtgacgccgatgcacttgctcattttgattccagggcgcgcgccggatgataccaccggtgcataatcctttgtgatttttaccgtcatatactattcctccttaattatcaatgggcagctcgcccagctcttccatcatttcatggatgccattttcatcggtgagtgtgttgtacaccgcatacatagtcttcgcgttctcgattgcgtacagcggaatcttcccaagatgggtgtacttcttgtgatagtcgatgattgacatccggatcagcatgcagacgccgctgcacagcgtccgcatcttctcctcttgatctcttttgatctccttctccagcttttggcgacgtgatttctcgttcacataattcttgtatgtaaacagcgccgccggcagcagaaatccagagagcgtcgccagaaagatctccatacctttcttattttcctttcagctgattcatcgcgctgtcgccgacctgtgctgcggaggtgaagctgttgttcttccaccaagtcacaaccgcggtgataaccgtaaatccgatggatacagcctggtataccatatcatcagcgatcgggatggactcgtgcccgaagatggccaaaagctggttgatcaacgccagcacaagacacactgttctggcaatagtgccggcagtgattccagtatcttccgctttgatgatcgtttcttccgtcgctacagtaactttgttctcttccatgagaatcatcctttccggccaagttttatgccattccggggcattatttccagttaatcggtcgcatcaatggccgtgtcatctccatcatggccctgatggtctccacatccgtactgctccagtcagcttctggctgcttaacgaagcgtgtcgtgcgtctgatcggcagatgctcgtccaccaggctgtcatctcccaagtgctgcaccagacatgggatcgtggagatgaccggaatgcctcgctctaaggcaaattgatgaaacgcatatgtctcccacttgatacccgggtagtgctcgtctgtataactcatgcattcgatggccacatccttcggtatcatgatcgccgcgccgaaaataccgcgatcgtgtgtgacatatggagtctgcagagcggcgatctcatcatcgcaatagctgctgttgtaataggtggagaagaatgacacgatgcagtctggatgggctgccacgatctgctcgcagatctcacggaatccctcgcacacttccagatcgtcgttgagcaccaccctgtgcgtctctccttctgcgtatggcgcaagccatgcctgcttggccactgggaacacaactccaccctccggacgctcatcgtagatgatgtcgctgtcagggagcttaagttcttcattcatcgctgcgatcatctcgtcccgctgatgtacaccaataatttttattcctaccataacatcctcctagttgaaatcaacataagtcaaaagcggattggcgcatgcggataccgcatagtaccagatcctcacacctggattgagatacttggtagcaaccgcatagctgtaattggagccattgtacaggaccgggaccaggccgctcgtgatattagaccatacctctgaatattcaggcttggctgtacatccggtaatgtcgatgatgaatgttccgccactatctccggaacctccgccagttcctgcttctgcaatgcgatccttgacccatgctgtagtagggatcctagtgctatcatcagtgctggttggcgtggatgtcttaggcgtgcccgtcagagtgggcgaggcaagtgtggcgtatttctgcgccttgacatatgcggtagtagcgatctgcgtcgtattggtcgatgtgcttgcagtcggcgcttttggcgttcccgtgaaagtagggcttgcaagcttggcatagtcttcgaggagactcttgatgaacgccgttgttgcgattctggtactgtcgtccgtatcggccggtgtcggcgctgttggcgatcccgtgaaagctggtgattcaagagtcgcatatacgtcttccagcagtgccaggatcaacgataccgcgacctgcctggcagatccgccaatattggcgaagacgctgtcatcggccgcgatggtctgcgacacatccagttctgtgatttttttatctgccatatcatcactcctttctatcccatcaggtaattgcctgcatcatctgtcagttggttgcctgcatcatcggtcaggtactgctccgcgctcggcttatccacgaaccacgaggcatagcaattaatccagcagttagctggcatgttgatttcagagctgcttccgtatcggctgatggcgagatctccatccgtgttcacgcgaagcaccatcttagacacaccggatccctggatgacaaactgctcgtagaaatccgacggcgcaaatccgtctggaagataaccgatcgttgtatcgaagtctcctgatatatcctgattgttcaggctcttgaccgctccgcgaagatgaacagaagagccgatacgccgaacctgcagcggtgcctgatctgcagcgtaacgagagaacccagagccatatgtgcaatccacccatccggtatcttcgacatcagaagcgtatgcaagccgctgatcggcgttcggaccagcatatacatcatcatagacatagatcggccaggctgattctactgccctctctcgtgtcggttttcggccaaagcccacgctgttcttggctatgacgagctctgggatgcccttgccaatagtgcactcgtatatcgtcgtagttagcgcatcagacaatctgacacggatattgaacgagtactctgcatccatatccccgacgaccgcatcccggctgatggtgccgccgtagaatgtcgtgatcgtggaatagctgccataggtcagctcagacgtcttctttttggcgtattctgccaagcaagaattattcttgaccgttgctccaatagtcaatggatggaactcgccggccatattaagaagtacggcatcctccacgccgtttcgccggtgcggtaccagctggctaaggcgtggccgatcgtactcgtagtacatatcgaaaggtacagtcagagagccttccaggccgcggctgtcgattgccttgaccgtcacgccggtattggatggaacggtggccgtatctgtgatcgcggtagatgtcgactccacagcgcgatccccgatgaccagctgatacttgacgatgctggcacctttccggccggtcgccgaaatcgatgacgcccggatgatggaagcattctggatgacgtgcttcgagttgcccgtgatagagatgcattccgacacggtatccgcatacacaaagctattgaccagcggttttgcctcatctacattgatttggaccgttccgctgcctgtgctggatccgatgctggagctgccgctgtatgtggtcagcgtgatcgtcatccccatgtcatccttggtcaagaattcatcgtacatgttatccacttctgtggatgtcggcgtgatggtcacgctgccacgatggagatcggtgcggctgaatgaatatgatccaactttgaacacggctgtatgcgtaaagtcatcgtcatatccggtaatctgcagcataaacgaattccccaaagtaaaagccggcgaattgccgacctttgagattcctagagtttttgctgacttgctggacgatgtatagcatactgtcccattccggtcgatgacctctaccacgaaagtgtagctggtattggccgtcagaccagtgatcgtggtgctgccgttgcccgtgttgccactcaaattccaggtcctcttagagatggtatccttcaacctcacgcgccagtaattacgcttgttggtcaacgtgtgcgtgatcttgaccgacttttctgtaatatctgatacgctcagcccataattggttggtgcttcgaccgaaggggacgagaagctgacattgccagatgcatcccacaatccgtcacagccggctttgaccgtcttggacagcttccgggagttgcccaggtcgtatgacttgctgccggaaccgtatgcgcttgattgctggttcttgcccaaggtgaagcttacattcgctgtttcttgctcaccatcaaacgtaaatttgtagccattccatgagcagcttgcgctgtttcccacgcacttgaaccggaagttgtaagaggtattgaccttgatatttggataattgccgctcaaggagcaggaagtggtgaccagcaatttgacgtactgatcagatgtattaagtgtcgctgttgccattgcaccacctcctagtccattactgagaagtacaccatgccatcatcagaattggtgatcagcagcttgccgatctccgcggaggtcgtccgcagctttgtgagctccgtggtatcgcgattgacgcgcaggactttttcgccgctgttcttgtcgatgaccgaaaactctgttgagtcgatcttggtgatcgtgtctgtgtcactctgctcgatctcgataccggttttgtcgatttttacgcctgcagtatagatctcatccgtgtgcggcgtccactgcttacggatggaaccctcattgaggatgagatcggagatcatcagataagatgccgatgacgcgatggccactgtaagctccgtgccggccgcctgaacgacaagggatgcctcgtgccactcatcgtccacatacgatgcagtcgtctcaaatacgaccgtttccgcgcctccctggatgaccttaaggcttgatgcactggtatatgtcttgtacaggcacgagatcgtgtagaccgcgccctgtcgcactttgaccgtctgagacatcgtagcgtcgtccagacggaatgcgcggccggaagtcgtgtgatcgttgacgtcattgtcgtcgaccgtcacgatgctgccatctgcttcccacatctgcgtattattccatcctaccgagttaagcagcaggttgtacccgctcatctgctccagcgtgacatttagctggtccttcagcagctgcatctcagcagtcagctctgattgtcggacgagctcctgcccggcatcgctctgcagcacctgctcaccgacatgagcgatccactcatcgctggtcagatcggtataggcatccttgagcgtctgaatgtcctcgtatccattagtcggcacccagtcatacagcggattcccagagctgtccaggccgacttcgacgtagattttgaggatgggattatcgttgtcagatatatccatccattgctggccaacagatggattgtccggcgggtcaggagacacgatgatctcctgattgaccgcttcccaatccgtgccgttgtagtgtttcagcgttggtggatctacagacgtatccagccacagccgactggtatcttccggcggagtatcacctgagatggcggcatccagaccatcgttgatcaccgtgatggtgatctgagcctgaccacgcatagatcagatctccacgacgcacacgaatgttcccttgacgtcaacatctgcgctgccgacgctcagggtcttacctgttttggagaacgatgccaccttctggccattcttatcgtattttgaccaggtatatgtgccttcaccggccgtatcgatctcttcacccgcctggtatacgcgggcggtgaggaccgtggagccttcaccatttttgaaagcatcgccgccggtcgactcgatgatgacctggatcggatcgctcaagtcgacgaaggatgctgtatccgcaaaggtctgattgtaggttgccgacgctgaatcggtatccttagcgacgcacttgaacactgcggaagaatctacctgcccggcatagatcgtcagtgttgacgtggtgatgccactgaactgaccgctggcattggccagctttttccagccgattccgccgccctgatcggtgtcgacagatgagtccatctggtaccactgatacgtgacattggtcgtatccacagcagatccgcgccacagctgcgctgtagcggtcaagctgtccgtctgcccattcttgaagatgttgccgtttggcgtcataaccagaaggtctgtgatgccgctgccgttgaccacgcggctgaagctgatcgatgtcttatacatcgtggtcagaccggtcgcaggatccttatactgaatctctacccggaaatccttaccgggaagaccggccatcacattgcccttgaccgtcaagatgtgggacttggcgccgctcagcgcataattgccggcgctggtgatcgctgtcgtgctactgccttcgtaccacttgaccgagatcacctcagtggatgtgatcttgtctgtcgatgttccggccacatagatggacggtgttaagacaagattcgtcgttgcccagtccggtgtgtaggtgtcattgtccggattatacatctgggtcttggccagattcgagttaataaaacctgtcagtgttacggcgtcattgagatcgacgatcgtaaactgaccctgtgctttactcatttaaccatctcctctcctctcaaagcagactcatgcgagtcgtggtgtctatcaaatcacaatagaatgtcgcgcggacatatacgtcctccgcagtcacgtggattgttttggtaccgccggcatgcgctgtgttccatgcctgatcagcttcctcatcggccgaaactctcgtccagatgaactggttatcatccaactggtcagttacgtcgtcatcccagctgtacacgatcgcgcgcaggttggtatcgatgctgccgttcttgaacacgctgccattgtccgacacgatgacgaggcgatacatcttggtgttttcaatgtcttcgaccttctgggaaatctgcccctgttccatttcgattgaagtcattcgttcagcctgatcatcctgtgtttcgataatcagctgaattctctgttcctgcttatccacaatcgcctcagtccgcttcaatatctgttttacactttccgcatactgatactggatctgtgacttggtcagcgccggggtttcaaaggatgaccggctggatccactataggagatgctgtgattcatcacatacatcgtgacatagctttgatcctttagttgaacctggatgatatcacctggctcgataataaaaaatccctgcgatttacatttcacaggagtataggtaaagccgtcgatcctatcgaatatcgcatttttcgatgtatgccgatcaatgtcaagaatcggattattcgctattttcagctcggtcagaccgttttcttctattgattcttcatcctgaatgtagacgttatcattcagcggttcacgcgctaacacaagcgaattgattggtccgtatggatccgctgtttctggccatgattcagccagattcttctgctctatcgtaaagtcagaggtagaaaaccaccgaaagtcaagttgatcatccgatgttatccgagcaaatgtacagcttgactgagcaatagccacgatgatgtcggcatacacaggctgttctccgaagctgatagcctccggtatcgataaagaagcgttcggaaacgtagttgtcgccagagatactcctacttttccgcatacccattgagccaattgcagaggcgttgtcggataggtaatttcatctacaggagcggtctcgttgaacacagcctttttatcaatgatgctgtattcgttgctatcgtctttatcatatgccaaaaacgatcctaacttcttgtactgaaaggaccctgagaccatgataccttgatagagctccaaccattggttctcgagattaagatcatctgcaggattgaccttcagcttcccggaacgtgcgataaaggtgccgataaagctgtcgttttcgctgctgtatacattattgtcgacagaaaatgagagtggatagtattccatatcgccaagtttgaaataagcatccaggcgccgggcagatgccttaagcgcctggatatactcagtagatacgttaatcatacttttgatttgagttcaacgtgaactcaatctccttgaaatagttgaacattccttccactctggatttctttggatcgacacagtacatggagctgcatgtctccatcttacctgtttcgctgttgtaatattctacagacatttccggatccttgagcaggttcagcagctgcatgccctctgcctgtgtgcatacgcccttttttgctgtaatgctaagaatgcgtccgagaatatccctattcatgacgagcgctggatttctgccgctgtcatcaccgtcctgagtagacaggagatcatcatattcaacaagattggtgatttctaccccattgattttcagataagccatcttatcatcctcctatcatctcaagttctttctctgcctgccgcagcaggatagccagcttcttacgatcgatgtcgacagacagattaagatttgcaatcaatgtgatcagctgcttcagcaggctgatgatctgacggattccgcttgcggatccctgatcacgctgcatctgcaatgctgtattgatcatatcaagcatcttattctccggagcaacgatctctccataccgcttgttatcaccgatcatggccaactgcggctgattggcgccaacataaccaccttctgccagcttaggaatttgtggtacggggagagggttctttccccacaatcccaggaacggctgcccgatgatggggatatcgatggtcctgatagtgttcagcagtccattgatcgtgccgaacggaacacggatgaccttattgataccatccaagatacaattcacgatattcttgaagacgtttgcaatgccgccaacgaccccagaaaagatttttcctccttctccaaagagatcgatgattttatcccatgtagattttacaaagtctttcaacccgctccacatatcttcccagatggaactgattttgtccaaaactcctgaaattgcatcttgaacaccatttatggcactgtcaattgttgagcaaataccattccaaatatcacctacaaaatttgaaacgccttcccacacattattccaggtatcttctatcgcacctaacacatcatcaatgacagattttatgctattgatagcatcatcgacaaattgacacattgaatcccatatgttttgaaggaaagagcatatgtcattccataccttctcccagtcacctgaaaaaacatctaacagaaaatcacaaatggaattaagaatatctattatcgtatttgcgcaatctccgataaaagaaacaagctcttcaattatgtcccagattccaccaagaacctccccaactactggagctaggttttctgtcaaaaattcaataaatggagcgaatatattcttgaatactagactgacaagttccgtgatttttccgataaatgtaatgattccatcaattgcaggctgtatgtgttcttcccacatttcttgaaatcttcctgatatctcatttaaaacaggtgcaatataggtattatatgaatctaacaaagtccctacaatatcgcttaatccttgtttgatgttatcgaatgccggcttaacatgctcttcatatgcatcaaaaatagatttcaatgtgtcatttactgcattggcaagtgtttcggttatggtttcaatcggttttaacgtttcttctagagcctgcttgatcttatctttattttcgataattggccctgttaaagtatcaagaatatccaaacctaactgtttgataacaaccatggccccaagagcgccattaacaatcgcagtaattaggttagccccaatattaattgcagtagggctggaaaatacactcgcaatatctgcaagtgcagagctgaaatccccgacaatttcattaatctcagaatcaatcaaaaaccactttttgataatggatttaatgaattcagtattcgaactaagataagtcgctacagaaccaacaagcaaagtagcaatagttgtgcctatagatgctattgatcctgttatctgtcctaaagccataacggtagaatcaacccattttttagctgctccagctacttccggatctgtgaagatgcttttcaaactgttttttatagttacagcataccattttaatcgatcaagattttcaaacgaatcaccaaaccctatttcaaatccttgtttaaataattctcccaaccttttaaactcatcgattattccctgcagcattccgttgaatgcattggcttctttggccgctttggggaagtctactgcttcagcgacatttccgccgccggccgatccacctcctgaaccgccgcttccagaatcggatccggaagatccactgtcaaagctcagtttattaatcgtatctacgcccgcaaaggctttcttgatctttttggctgcggattcacctttcttgccggtatccgatagcccgctgcccaggctgtcagctgcatctgtagcagatgacagatctgcagatgtatcagcaagtgctgctccactgccacctcctgtatctccagatgaacccgtcagcatctccatcaaggacgcgaacgaatcagcaagcggctgcagattcgccaggacccagttgattccctttacgatcggtgtaaacactgcaatgaatccttttcccagacttgcctttaaagcgtcaaaacgcaatgccaggacacgcgtctggttcgcccaactgtcctgagtacggataaaatcaccgctggccagcgacagctgatctgtcacaaaggcaaggcgtagggaaaccttctcttgttcgctcatcgcgctggttgtcttaccaaaaccgttggcgagagcatattgatccagcgctgcttgtgtcatgacaacaccaaggtctttcaaggactcggtttcgccagtaaacacagacttcagcttcgtatacgcctcagatggatctaagttataaaaagacgccacatctcctgcaagaccggtcaatgtcgcactcatctcataagcatcctgctctgcaaacccaaaagccttggacatggcaccaaatgtgcccatgtattgcttcgctacggtttcactgagcccaaagctttccattgcatttttggcaaaggcatccacctgtgccgacatcttcgggaacgcggtgtctaccacattctgcacttcggaaagattactgcctaattccagacagctaccaacaaattttcctacagcttgtacggagaaggcggccgcagccatcgctccgatctttttaaagctggaagaaaaggcactttccatcgaactggatgccgctttcgattctgccttgatctgctttcgcagattgcggccattgatctgaagatcaagaccaatagctcccacgctgaaaatgctcatatcacgcacctcccttcgccatactgcggaacatgtcctttaagccctccaggatctgcttcatttcgtcctggcttaccttcttcacgttccttcgctgccattcgctgcgaatacgtttctgctcaggggtaaaatgcttcaacacttctttatcgtcctcactgcgtatcttcacgatattcccaagcggtgtatccggcatcagcccggaaagataggaacagaactccgaataaggcatatcgtgaacgctgcgaagccggataccatactgcttgaaaaaactggcttcgatcagcggccagtcttcctgcatgtcataccagctttcaggctgttccttacttctgaaatcgctttttgacctcttcgatctcttcatcctgtacgcaggcaatcaacgtataaaagatttccttgtatgcagataagctgatcgacatgctgttcaattcctccactgcttcttcgcccaacagctgagcaatggctacatcgatggattcgatgctgttatcttctttctccagtttgctgttcaggatcaatacattggatttttcgtcattgaccgtgtatgtcttatctccgatcttgatggtcggtttctcgtcctgcagaatcgtagataagtcaaaatgttttgccatgtttctttacctccttaaacaaaaagggcagagcattacgccctacccagcagatgcttcagtgaattcaggcttgccgttggacagcacttcaaactccagcggcgccacgccagtggaatcaccagccccgatatttgttacgttgatgaccgcctggctcatctttaccgtggaaccatcgggaaatgtccactggaacggcttttctacatcgcggccatttttgttatagagtgatgcaaccatatcgtttcccgcatccccaatatttctctttccagtcacagtaatcgtcaatgctttagctgtcatcaatcgccgtttccagccttcctgctcaaacggcgtccactcttccactccattgtcaaaagagacactgaatgactccatatcagcgatggtactcatcgtcgcctgttcttccggctctgccgttgccggttctgtttcaatctgaaactgattttcgtaacaaggatatacaccagttcttgccattttctaaccttcctttctgtaatagatttcaaattcaatgacatattcagctatgccattatcgttatgatccacaaataccggttcaggtaccagcaatccaacaaaatccacctgaaatccaggcaaagaaaaagagccacatgagagcaaggtctcatacagctcaattgcctttttttctgtctgaacattattttttgtgccgtggatcaatagagatacttgcttggtcagcacttttgtcgccggaagaccgccaatagcaacaccgggcgcaccagaagttcgtttgaggttatacactccaagcgaatcatcctgcttgccgtccatcttcccgacgtaatagtgagaaaagactggcgccagtgtcttcagccaatccttcacgatatctaaagtcagcatcatagacctccatacttcttatagaatgccgcgtaatcttttttcacctgatcagcatatttgccgctgatccaatcatccagccattcacccctggcattcggattattgtcggtctgaaagttgtattctggatgaaaatacaggcgccgcgcatatggcgtatttgacacgatccgttcaatacctttcgatcgttcgctgcgatccacgtaagtcgcttcgttttgaagcgtacctacatcaaatggaatgacctgtgcatctactacatcaccaagcagtttttctgcagtagcatccagcgcattcatcgcggcatcttccagcatgttcatcggtccttcatagaatgtcagcttcatttcagctccagctgcgtatagttgacgctgccatccggattccttgcctttgtaccgatcgcgatatcgcgatttgtacccaggatggtcaccttccctgctgatatcacatccaggtcgggtgcaatatccccaggaatcagacacgtcccggtgacctctaccaataccttttcagaagtatagacctttttggccttgtcctgatagttacatgttccggaccagttcactatggatgctggagcgccatcctctccagtctcttctgattcgatatgcacctgcagtgcggtcgtacaaaactgtggaagaaccagctgtggccatttactcatattgccaggctccccaattgaaattggcgcagcataatccagtactctccagcagttcatagagatccgaacgaatggccaccccattttcaatatgcacgttccatgtgccttccatggtcatgctgaccccattgatgctatagctcttcagataggtctcaagcattgcctggttatcatgaagccaattagcataagcacaagtcacttcctggatgaccgtttgctgccaagacttcaacttttcgaacgtgatcacacggatccgattatatgtcaggcaatcaatgtacaatgatgctctggtgagatagcgcttcagctctgtgccgctcagatcaccatgctggtgttcagcatagtaattctcatctgcgtacatcattttgaatcggagtcggctatcttcttctctgcagctttcagtgctttttcagcattatccagctttgccttgagctcacccacgatttgcatatgttcactgtacttgatggtctttgttgctgaatagccaaacagggatccatcgtcattgtagacgtcgaatccctgattcatatagattttggcctgcgacttatcaatatcgtataccttattatctttttttgccttcatcaattatcacctatacttcagcttccgcattgatacggcatccctgtttcatcagcacatcaataccgaatgttccattgaatctgcggttctgataaagataattatccgatgtacgagaatcatgaccaggcgtgaacacgttgatgtaagaatacttcacacgagatacctggcactccggatcgatcaaaatgtagttgatctgctttgcgctgccatcagccacacatccactggtaaatacatacgcagttttcatacgatcctttggaacaactacgatcttcttaatgtcatcgatggagtgtacccgacgatcgatatttgcaccgcccttagcttccagataccgctgaatgccctcggcatttttcaaggccgtgttcacggtaggggtggcatacaggatgcagcgctccagcggtacgccggcttcctccattgcttccatgtctgcatccagcagactgaggatattggccttcgttactgctgtattatcaatgactgacgttacgcgcttagcttccgtgtaaatcttgctgaaagtgtagcagtccagttctggaattgcctgcgtgcggtcaaaattcgcctggatatttgcgatcgatacgaccgtattcgtctcatcgacatccatcgggtccaccgcaaactccacatctcggtcatgatcaagagacttcgtctcccattcattgctgtaagttccagcattaaagccaagtgatccacgggtatgatccttatatccgcctaccgtgatcttcgggatacgaatgtcctttgtgttccttacctggatgccaggatttgagttgaaaagatccgtgctgcacaactcgtgaccgtacagctcaatgatccggggtaaaaacgttgatacataactcaatgttgccataaattatacctcctaactttttttgatgccaaaaatagcgtccagagcagcgtccgttgctgaagcgccgccgtttcctccgccgccattgccgccaaccagcggctgagtgccagaacctgaagaagatcccttgaactcagggaaagccttcagcacagcttcaagggcttcttttgccttatcagactgcagcttgccatcctgaccgatgatcccatcacgttccaccatcttcaacaggaagggcaccttttccgacgatacgccttcttttgaagcgagtgatgtgatctctttgtcgatatctgcattctggatctgcagcttgaggcgtgcgttttcctgttccatattgcgcacacgattcacttcatcgtcatgcttctgcttctggctttccttgtactgccgaatggcctcagcggcctgttcactgctgagcccctgctgcttgaagtatccctgcaagaccttatcctcggtaccagatgtcctgcgcgatactacatccgcaagctgctcatagtcgatctgagcagtggactgtgtcccggaagcgcctgcagtgccgcttcctcctgttccttctccagttgctccgcctgcgccagctccttcttccgcgaagagctggatgtcgagtggaaataatgtttttgccatgtgatagcctcctgtttattcgggtgtgctcccctatctgcatctgcagacacgcacagtttaatgtcatatcgtgattggacatgatgcttacttcagccggctgccaaaatacggcagcttccttttgggcggatcattcatccggatcaccctctcttccaattttcgcccacaaaaaatgcaggtatctacctcccggcggatcctgcattgttggttcttatcgtaatatgttctataacatgtaacgtacgcatgacggcacatgttatgcctctattcgatgcgatcgataccgtactccactgcgcattggtgctcgatccggcaccctctcgcgttttcccatcccggcgcaaaatacgccacatcagcctgggacagtacctccagagacttgcccaggaaccatagcggcttagcatctgctggcgcaccctggaagaaagagtccagtacctccaccacgtcatcgcataagcgctcagcttccgcgatggctttgtttctttccttcaggatatcttcgtcgctttttcctttcatcggctgcgaaataaacaatttcttcatgccattactccttcctttatttcaaatcaatacactgattttcccatttcttataagcgtcaagatatagctggttcttgtctccattatatgtcagctcataatacattccatcaggtaccggtgtgcttaataaagctttattgttctgcagtgttttgcatgcccaaacaacaaacacatcgtcctctgtaatttcttcattgtcggttttatctttatgcacattgaaataatcagcgaccgttttcttacacagtgcaacgaaatcttttgtattcatattgtcctcccactaaaaaagcaccctgcttgagagtgctaacttattaacaaaaacgtattaatcaaaaaattttaatgcttttcgacgaagatcgttgtactcattggccacttttttcaactcttgaggtactaaactaacattgatctccatactatcattattgtaatatctatcaaataattcgggataattcttagtaatagcacatagcctatcaatatcctttttttgtttttctgttggcctaatcatcataaagattaccccctcttctctataaaatcaattgcctgcaatgctttgttttccttggctgttaattttctactagcataatattctgcatatacctctccatattttctattcagaaacgagatgtatgcatattcactaatgtctgacaaatactcatccttgttatttagcaaacctttcaactgtttactaaatgaagtataccccttttcttccaatttttccacaagctcatagtattttttatgtccaagttcatgtaaaaatgggtgaagtgtattttttgtactgaagaaaccattagcaagatatttagtaatcgaatcatcattcattaatttagagttcagaaaaatagcatcatgaatcttactatatccagcaattgcagattcattaaatccgtttcccgaggaaaacctggtcaaaataattcgtggcagtttttcatcaccaattattttttgaacctttttaagactttgttctgaaaactttaatgcacctgacatagaactcattgtataatcacaccacatatcaaatgcgctgttctcaacctttttgatgtgaattggtttgctgtgatcattaacttcaattctttcgtctctgccaaatttagacatgtattcagtggaggttgcggaatcgatatttagagtttcgtccttcttttcccactgtttctgcctgtttttggcaacccgcacattttgctcatccagtgagcctgccgcgatacgcttatgccgctggatctcgcgctgacacttgttgtgctctgcttgttttggttcgttctcaagctttccgtatgcggaatgatcattttgcattccttggaagaacgttgtcgcgcgatgcttgcagtttggatgaaacaagccaccggcgatggcttctgaaagcaacggatagcctgtatcttttgcttctgccttcgtgcccccggaatacacatcatccacatagacacggccttgccatggaaggcatgtctcagaacacccgccatagcggctgatccggacaaggtgccagccttgttgctgacgtatgtttccttctgagatcaacaccgcacgctgattcgcagtacggatggccatttctgcatagctggcaatattgaccaatcggccgtctttgtattttatgcaattgatcccggcacgaagaaaatcgcggctggccatatctacggcctgcttcaatgtgccggcgccagtattggcgtatacttgggaatcgaagatgatctttcgatactgatcattcgtcttccgaagcatcgcgtgttcggccttttccatgtcttcccgggttgctttcagcagctcgtccagtttgggactattgacacgaaagaaatccgcgtctttacgatcaaggtcatccatcagatcatcgatggtgactttcggatccactgtctttcgtaagatgcgcagctcttcagcgatggcagcattatcggcgttcttgcgaatgtagtcctcaatttcttcgttgatgcggctgaatcgcttgctgaacttctccctgttggcccgctggtatgctttcaatgatttcaactgctcttcctgccacatgttccagcggaatccttctttttcttcctcagccaagtggcggccaaggtttcgcttcatcgattcgatcagctccagctcgatgcgctcaaatgcccgccttacgtcatagtcgttcatctgccaaggttatacaccacaacaaaacctgccttccgccattctctgacggcttccagcaggtcctttcttgttggatactgatcgttgcgcgcttctgcagattctcctttctcaagcgcgatgatcacatttttgcctttcagcttctgcttgagcatcttggtcgttgcctgatactgctttctcggcatctcgtatacatgtcccttaattgagtaacgcatttgcaatccctccttctatgttttccagcccttcatcttcaggttcattttccgcgattccaagttcattcttcagccgttctacctcttctgctttccagtcatcatctttggaatcgccatacagttcgtccaccagcgattcgatgctcatcagattgctggactttgccttgctcagtgtttcgatcagcgcctcgaatgacggacttgcatattcgccaaacttcgcggttacgccgacctcatccggcatgctttttccggaaaatgcatcatatgccttgagcacaacattcaccagtttcggcaatgctttttgcaacgcctcgatgatcatattgcgtgtgtatagtgtcgttttctccttttcccgctgcgcttctgcattgtccagcttcttggtatcgataccaagcgtagacgggcttatgaaaccctgcaggcacagatccagatatgtgacataggattccagatagctggaagacgggatctccggctgaacgaccttgatctcatttttctcgccctctttgttgctgttgccaatggcgatatatgcgttatcgaaatcatttggtgggatgatctcgccggtatccgcttttctcggcgccagcatcttagggatgtatttggtcggacgtgcagctcttactgccgctgaccattggctgacgatctcatccagagcatcaaagagggtctctttcttatcgatcagtgactctccgcgccctttccacttactggaatttcgaaactgcagcgggacggccagcatcacatgcaccttgttgactggattgccatctgcgtcttctttatagccaaagaagcctacatcctgcagatttgcggtctcttccagcgtatccaggctgaccggatctcctgagaccgcctcacgcagcacatacttgatatacccccagccatagtgctcgtataggatgtatcgcttgctgttcttgtgatacatcgttcggaagatcacttcctgcagccgaccgcgattatacttgtaatcgatgcggtcaccggggaaaaattcaatgatcgggcagctgctcaactgtgggtcactgctgatcttaaaggccccatcgccgaccgtaatcgtctcatccacagcatcatggagcagacgatcaaaatcattgtccgtgctgatcgtttcccaatctgtttcgcgcttatcaagatccattccgttgaaatcgcggcatacgatcgatgtcatgacatccaccatcatccccgggagaccggtgtggatcttgcgtatcctggtcaacggaacagatgaccagaacatgggatttccactgccggtatttttgaagaattgcgacaattcatatggatccccgcgcacccacatacgattacgaaatgcgttgctttcgaagtcgtataattcctggacacggatatcatgggcctgtgccttttcgatccacaggaaattgcgcagcttctgtctgatcctgtctttaatcgtcatctgtattacctcctgttccgatcatgtccctgtacggaagaaatccgtattgactggcgttgatggtgtgatcattgccatcttccggttcatacttgtcttccttccaactgtatacgttcagctcatggatatggtgcgtgcaatgctgcagaaccagatagctatctgtagcaaaccatgccagctgcagatgcagacgatctacgatcttcatcttcttccagctgccggcaatgctatacaccttgggatgcgtcatcagatacttatctgcttccgtgatcgtggcttgatcggccgaatcgataaagatgcattccggcatgccccactcatgagcattgcgatcagcaaacgtaaaaagccgcggcacgatatcacttggcgccaacggctcagataaatctttgttgttgtaaacctcctcatccaagatgaccagttttcctgtatcggtcattccctggaagataaaggcaagcgtatccggtgactgtgagctgtaggatgtatccacaccaaccgaaaactggacgtatttcaattgcttcgcctgcgtccaattgatgacgtggcggcgctcatcaaagtttgagaacacaagacctgtcgcccggccgcgcagcccttggatcttattcttgtacatcttggtgccaaccggtaccgcatcgatcttgagcctgatctgctcaggtgtcagcgcagcgttatcataaaaagtgaaataccagtgaatccatcctgtctttctgctctcattcagctgattgagcaactccttaggataatccttcacatagcattttaacggccggctgtgattgatatactctgaatagataggtaaagatggatcatcagggttcagcgtagccatcaaatattcgcggcgatggaagatctcacgcacaaactccatgtctgcgatgttgatctcatcgatcagcacgcagccatactgacccccaagcacatcggtccattttgacttgtcagaataaccggccaggtaaatgaccttttcacctttcggtgtctgatacaggatatgtggaagtcttgtatcgccagcgccgcgcggattgtataccgcaacgccttcaaactgtgtgagcagaccaagttctccgttgaggatattcttctccagcacaccgatggtcttggcacagatcagatgcacacggcgattgctgtctgcgacccgcagcatgaactttggtatgcccacagtggtctttcctgcggccgtagtaccttctaaaaactccactgcggctatcgtacgcatgaagtgcttaaacttgggagagaggatgagatgcggcttaatcagcgacatcgtcatcatctacttcatgcatctgtttgaccaagttctcaatgtttttgattgctgccgtctttgatgtatcctctgtgacctcttgctttgtcgtataaccgtacttgctcatccaaagccctgccaactgcgtagggatcataccggtctcaaacttcatcctggcgtcgatctcgcactcttcgcgcatgcgcgttacgatgtcaacgtaccgccgattgtctgcataatccttgtaaaacgcctgtctggagatgccggcaaagacacagaatccttcgatggtgtacgtcacactcttcttcaattttgcactgacaaacttggaatttttagagctgaaatcgtgaaccaatacttcctggttgttgcaataatccttgtactcctgccacttatacagcagttcctcgggtgttttgaatttttttctcatgtctttgtcacctcctcaacccgcaccaaaagaaaagcacccatctctggatgctcttcaaagtattatgtcatagaaaggggaactagaatgaaaatgatcgtcgacccatcgaaccgtccaaatcgacactatcatgataacacggaaatggtgtcacagactgtacaaatcaagtaattttatcattttctctcagcttttctacatattcttctttactcattggacaatcaatcaatcgcaaaaaatcatctttacttaaatataactgttttctcatacatttaatcaaatactcatctatttcctgaccacaatggctcgtatgtgtattaattgatgttcgtttatcatcaacatacaatacaaaaaacttgtgttttctcggttcttggcgaaaacctttacgtattagcgaagcttcaacatcacgtgctttccgatttaccatatcaagaaaaatattcctttaacttgttgcgtagctcaatcgcatcctgtgtcaattctgactcatcacaattaacataattttcaaacaaagcgtaaagattttcattaacatcgtcttttaattcatcaacgctcctgccccagcaatacaagttaatattgtggtcttcggcaataaaatattcgtcatccttcgaataattaataatgtatggtttacttaaactgattgattcatcatctccaagcacttctgaaaagaatagatttaaaactttatttgtcgatatatctgtcgaactatcttctactgaaaacatcttaaaagtggtatttatcggactggaataattataaagtcttgtcctttcatcactctgatccacataagtgtcacccatctgaaccgtagtaaaaactccatttggtaatgctccctgaaaaataatacacgtaggaacaactattgcggccaatccagtcatctatatcaccctttgttaactttctgtactctgatataggtggttactaatgattgctcaccatctgctccgatcacttcaaacgtatgaactccttctgagtcaaaaaccaaatttttgacttcgatattaagttgcatgccaaccggattagtttcatcaatattgtccgggaatttaggtattacgatagggaaaattttcttgaccgtatctccattctcatttttaatcaatactccaaattgatcgttttcttttacatctaatagtccaatagaaattgtgaaagaatatgccgacggtatattcaccaaatcaaaaatttgcaacggtccaagcagcttagactgtccatcctgttctactttgacatcattgcaacatataaatgaagaaattttcataaacatgtcctcctcctgcatgatgttcatttgtattatatacggatttattggacattttccaccaaaacgatgatttttcatatattttcgtctatttttggctcaagtatctctgatatatcctgttcagtaccctttcccgtgtcttccgtacattttcttccgaatatcccgtaatgtcggccgccagcttcgcatcccggcactgctggaccattacgtattgtctgaccatcttctcctgcgcaggtgtgcatacggacatccacctgtcgacgcgggaaagatacctttcttcaattctctgcgactcttcgagctcgtatagctttccgctcaattcgatctgccatgggcttctttggctgctcccatccggcatccgaatgatgctgctcccgcatcctgggtgttccagctcctcttggtacctcgcgcgcagctccgtgatcagctggtcataccggcgccactcggatagatgccagtaataattcatgagttccgattcgatgtacaccagctgcatctgcttggtcagcctattcgccggttcctttctccagtccaacctcaatcactcccatgcggttcttttaagaccttgtcgtaataatcatcagaattgcatttaattgcatctgaattgcatcgatatgcttcgcgcggcacacgatcatcgtcattatggtcccggcagtccatgtacaagtagacgccagcacaaaccatgatggccgccacgaagcctgcaatgatgatccacatagctatctctcctttccctgggcgatgccctcgcttcacggggcgaccgaagtcgccatgatgatgcggagaaggggatctattccaactcctttctgattctcagtgtcgatacttcgtgaagccacgtgtaacgtaaaggatgtgtttcacctgcctttctgatttgattccgtggagcgagggcaccgcagtgcctatctctcttcgtttcgcatgcccttcagcgggcaccagcgcggccgtgtcttgatctgcacatctcgcggatggttctggttgatcatgtacaggatcgcgccggctcttgtgcatttgtttctagcgcgatattcgcatgtcttgcattttggcgcaggcatactcacaactcccacgctgcatccagatacttagatgcgtcctcgaatccggcatcctgcagaagctgcgatgtttcgtcgcgccatgcgttttttctttgctgtgtatcttgttttgccatcatttttacggcctcataatagccgcatgccatcattgtttgcagagccgctggagcatcgataaacacattgtcgtcatggtttatccattcctccaagaattcaaccgtatacaaccggtggtccaattccttaacaattcgcttttcttcgtcggtcaatacaatgagattacttgtattcatctttttcattcctctcatattttttttagaaatcatccaagtctgtaacactacatacctttctgccacattcctcgcagtatatgtatttgcttagcagcttgtgtcgtgccccatcatacatacaagtattatcgggatccttatcatctgtccgaaaaaagacgttgcatgtaccgctgtatctctcccgggtgtagaattctttgtcgtttccgcagtggttacaaaccaaattcgcttttttcatcctcaaccctccggagctggcgatgcagcttttcattcgtgatcttatgcagcttcgtctcgctgatgtggtacatcatctggatctgttccaacatgatcattacatcggccatttcctctgtgatggcctcgagatcaggatcatagcgcatatccttacagatctccttctgga

SEQ ID NO: 2272 - DNA, 5819 bp, Unknown
  16S sequences of unknown bacteria
gataaaaagcttagtcaaataagcggctaacaagaaaatagaaactgagtttgattttttggccaactggcccgccaaaaagaaaaaacgcccctatgaggcgttcgcagtgctaagaagctgtattagaatgtaaggaaacgaggcctgccatgttctggtctatctgccgacgattatgacatcagcataacaaaaacatcctccgactcactgaaatatgagtaggaggatgctttttttcattggtctttgtttttatccgcctcatccaggtaccgtataatgatgtattcgatcaggttggtcatggagcgatgttcttctttggccagtgcttcaattctgtcaaagatttcatcactgagacggagtgtgaaaacacgctttagggtagccatgattcatcctcctatcttttttataagtataagaaagcgaacagaaagaatatgcagtctaaaagatatctattgactgcttagtgatatcatttatataatgatgacaaagggggagaggaaagtggaggatcatacaaaattaaatgattttgaagtgcagaatcaaatagagaatcgaaaacaacggttaactatcattggagctgtggccttcggcctattgattatcataggattcttttggtatatcgaaagtgatttctcaatttcaagtgcattcaatagcggcgatgctaagaaatatgcagtgcaggcagcaaggaacaaaggatatgcggtgtatgaggatactgtaaaggtagaggaatcggacaaatatgaaaggtatttcattacgatgaatgcacgggtagcctctttggacaatatcaagctcgtttgttatatagagttgctggactacgaatatgtatttattgtatgccccgatacatttgagaatgcctgggaaagaaccgagtggaaaaacaatgttaaggccagcaatgggtggggaagcagtgctaaataagtaagagaatgaaaaagggaggattcaacaatgaagaataaagctttcagagtatttgcagccagtatggctgtcttattcggccttatttgtattgcttgtgattccagctctgtaggagaagaaggctatacatcagatgaggatgaacaacagtattatgaggcctgccaggcattgggtaacgaagaatactacatggcgttcagctatttttcagacttgggggactataaagattctgaagaaaaaatgatacaaggcgcaatcgggtatttggaacaggaaatcgcagcggcagaaggtggctcatctgttgatgtggatgagattgaggtagtatttgaaaagctttatgatcactatttagattatccgaattatcaggaagcaatagataccttgcgcgatcgttggcctgatatgacacagtatggaaattcggtaccgcagccaacacaagcatatcaaaactatgttcaggcagccgctgcctatgaggaaggttctttgacgaatgtagacgagtatcagaaaaagctgtttgatacgatcaataacattggtggatggtatctgagtgcggataagtgtatcggcggaagcaactggcttgtgggtaccaatcagacaaaaggatgcgttactgtgtcattgggtatggaagaatatgagctgtatctgcaaaactatggggcggagcggatacggtttgtaggggacggcatggagctctatgattaccactatgggaacggaatcgaaaccctcatggtaaaatgcccggaatgcaacaggacacacgagatatttgctacttaaaatagatgggaggatacatgatgaaaaagaggaataggctatggtggctgggaatggcctgtgtgctgtgtttgagctgtggtggctgtaacgtaaaaacagagaaaacagaagaaccaacggcacaggaggaaagcacatactttgataagctggaactggacatgacgccgggacgagtagaaagcatcatgggcagaaaagcagatgcaaccgaaggcccggaagagatgtctggtatgacggcaatacagtatacatggaattttgaagatgaatccatctcggtaacggtggatacaaccgatcctggcaatgagtttgtaatggcaatcaaccgaagcaccgaaaaggagatttatctggaacatttggacgttgcaaaggccatggaggaattacagcttggaagcgacacgtatgaggaggcgtgtgcaaagctggggggaaagggcaatcccatagtgaaacaatattatgcacaactagagggaggcaagataggagtaactgtatataattttaaggataaacagggaaatcgaatcagctgcgggtttaattctgcgggcactctgcgtgtagtaggtacagataccaagaaagtggacgcagaattttcaatcgccgacgtaaggaaaatagatttgggagacagctatgagcaatgctgcgcctatttgggaggacccggcgaatattggcaaaaatctagtatatatgtactgggggatagaggaaaagttatgcagtggaactgccgaggacaggtatgtaatgtgacgtttgatttagagacagacaaagtaaatcaaataaaatatgcggcagatgaaaataaaaaaacgattccaaaagaaacaaccaacaacatctatacaggcacaaattggaacgatggggtacaatctgcgggagaagagaacatctatatatggacgaaaaacaattatcaagaagagcttacatggaaaactgagaacttcctttggttaatttgccgtgttgctggagaagaaacgatagcggatgtttatgttatctattactgatgtcagtattcatgatgaggctcggcagggaaggatatatgccggaacatttggcagctgtattttttctacagagctttatccgacgaattcagaatactcagctatgaaagaaacagatttacaaaaaggggattgggattttggatatacttgtatgaatacgggaatccttggagtggttaatgaccaagggggggttgtcttgctggaatataggattgcgatatctcctgatgcatgggggaaagaagaagcgctcatgcaatttgccaatggtctggctgatatactgggaggcaagacatcttatggggaagaaataatgatgaatatggttgggatcacagctggactagaaccagctaatattacgatgctcgtagggttaccttattgctactattgggcagagaaagacattttgatttcttcatgtcaagccgatggagtgactcaaattatgttcatggcactataaaaaggaggagttttcaatggctgtttatgggatcggcgcttattacaagggaagaggggacgtcagcagggaaagcatagacaatgggttttgcggatttgggtatacagaagaagagcagccggcgctgtatgaattgatgcgccaggtaagcctgggggatatcgtgtatataaaagcaaaaacgccgcagatgcaaaacgaaattgcaatcaaagccatcggatatgtggtaggcaaggaaatagaagaagatcagtccggcaatgacctgggatttggcaaaaaggtgatatggaaaaagaaatatcccagtccgttgcgtatcagactggatgaaaataattgtatggtaaacacatacgctaacacgctgtacagggaatattcgcctaaaatgattcaatcggtgatggagctgttgtttgcttcagaggggtaagaagagatgaaagtgacgaggaataggctgaatagataggttaaaaaatgtttctatttggagttgtagacggggttgagaaggctaaaaaacgcttaataaaagggaggtatttcctccctttttgcattacaaaaaatgaaagaaggcgttgtgatgatacggattgaacagtgggaagacagatatgcagaatatttgtgcaaagtaggcattgttatgtgcgtggatgaaatgctggagtgtatacggatcgcatttaagcacagaaaggtactgttggaagaggacaaagataaagcagaaaaaatgattgatgaattgcaaaagctgtatatacaaaaggagggataaatattccctccttttgcccgtggacggtgttgaaaaaggccagattacaaacaaaaatatcataaaactacctaatgaaatcgaaagtaattacatgaaaataaaaaaactagtataagataaaataacgcggttttccctcataacccggaggtcgtgaggttcaaatcccacccccgctaccattcaatgcctgtaaacagtacgtttacaggctttttctttgttgttatcatgtatacgggattcacttttctcaagccaaggaaaggaacagaaagaaaatgcaaaagataatcccggcatcctcgttaagcatacgtcgtaagttttgggaactgtatcgcggattactagtcatagggccatttatctttctgattttggtgggaatggttagcataagatatctgtctggaggagaaaggtggccgctatcatacggtgtttcggcattggtgatggcatgttgtagcgttgtattgcaagcaatcgtttatcttatgatacttgtttcgtggattccggggtttgtgtggctgaagattcaggaaaggcaaatgaatgtaaaattgcgcgaaaaccgcgaagattggatgcatccgtgtggagatatttataggaacagtcaatggctgatttcgatgccatcgtcaggaaatttttttgtaatccataaagactatgtgaaagagattggaaagctaagaaggatatccaggaacaatccgaaccacggacataaagcgcggataaaaaccatacacggaagcagatggttaaaatttggcaccaaagttgcctataagtacacaaagcagtggatcaaagcaaatgttgagaatcgctgtaaagcctcatcgcgtagtacgggcaatgtgataacagaagtaaaataaaggaggggctccctcctttatttattctacatttatgaaattttttccgttttccaaaataggagaaagcctgccaaaaacataatggaaagaacgccgataccgaggttgatctgcccggttaactgactgacgagagaaacaagcatcgtacctaaaaaagaggcgcccttaccgcaaatatcgtataggccgaaatactcgccggaacggttcggaggaatgattttggcataataggaacgagataaggattgaatggcgccctgaaagatgccgacgcatacggccaagatccaaaattggtattgatgcaccatcccgatggcataaagggatatacaaaagtaagccgctatgcatacgagcataagcttggcagaggaaaaccggcgggaaaggcggccaaaaaacagcgcggcggggaaggcgacgatttgagtcacgagcagggccaatagaaggccggttgtgtctaggcctaatgcggtgccgtaggcggttgccatatcgatgacggtataaacgccgtctataaagcagaaaaaggcaagcaggaagaaaagcacctttttttgctgccgcagttctcttaataccgaagcaagacggccaaagctggagcgtatgggtttttcacaagattctacgtagtggttttgccgatagcttttcaatagcggcagagaaagcagtacccaccatattgcgattagagcgaaagcaagccccatagccaatcccatggataaaccgatggcatcatagcagaggaccaatgcaagacagagcac

SEQ ID NO: 2273 - DNA, 9425 bp, Unknown
  16S sequences of unknown bacteria
ttatgacaaatatttacattttgtcataacatttttatttataatccgattttatacaaaattacgacaacaaagggtaaaacggtaaagtaaaaattacattttgtttaacggtgtcaatgttaaaaatgttgaaaactctgttgaaaatgttaaaaactccctaattttaaaggattagagggttgttaaagtctgttaaaaagacaagttttcaacacagtgttgaaaactgtgtttaaaacttattgtaatatattttaaaagtcaatggtaaaaatacacaaaattaccattaaaatttttggcggtaaaaaagaaaattattcaataaaaattacgcattttttgaaaaaatcggttttatatgctataatgtgcatataatatcgaggcggcatcgggggtcgtgcaaaatggaaagtggttttaaggacaaaacgctgtattttaaaggtgtaaaagattttgatttggatcagatttttaactgcggacagtgtttcaggtgggataagtacgaaaaaggctatcgtggttttgccggcagatacctgtgttatgtgtatttcagcggtgatgacctatttgtggagccattgacagaggcggaaaacaaagaagattttaaaagctatatgacccattatttggctttggattttgattatcgggaattaaaagaaaaattttcccaagaccctataatgggaaaggccatgggttacgccccgggaataagagttttaaaccagcccttttttgaaacgcttataacctttatcatcagccaaaacaacaatattcccagaataaaaaagattgttgacagtttgtccgaaaaatacggcagcgatttagggggagtgtacgcttttcctacggcggagcagttaagtgatgttaccgaggaagattttcgcctgttgagagtgggtttcagggcaaaataccttgcagacgcaatggaaaaaataaaatccggcgaaataagccgggaaaaaataaaaaccatggatttggaaacggcgaaaaaatatcttatgaaaataaagggcgtaggcccgaaagtggcggactgcgttttgctgttttcctgccaaaagtacgaatgtgtgcctatggatgtgtggatgaaaagggcggtggcggagtatttccccgacggctggccccagtgcaccaaaggctttgagggcatagcccaacagtacatattccactatgcaagatttaatcttgaagcaaaatagaagttaataaaatttaacgaataaatcaacggcggcacactctgccgccacagacagaaaaggagatttaacatgcttgtaaacgcaaaggagatgcttttaaaggcaaaaaaagaaggctatgcggtaggcgcattcaacatcaacaaccttgaatggacaaagtcgattttgcttgcggctcaggaaatgaacagcccggttatgcttggagtatccgagggagccggcaagtacatgaccggctttaaaaccgttgccgcaatggtaaaggcaatggacgaaagccttggcattaccgtgcctgttgccctgcatcttgaccacggcacatatgagggtgcaaaggcttgtatcgaagcgggctttacctcaattatgtttgacggcagccattacggtatagaggaaaatgttgaaaaaacaaaggagcttgttgcccttgcacatgaacacggcatgaccattgaggcggaagtaggcgccatcggcggtgaagaagacggcgtggtaggcagaggcgaggttgccgacccgaaagaatgtaaaatgatagccgatttgggcgttgatatgttggccgccggcataggcaatattcacggcaaatatccggcaaattggcagggcttggactttgacgcccttgaaaaaatcaaggcggagacagagggcatgcctttggttctccacggcggcacaggtattccggcggatatgattaaaaagtcaatttctttgggcgttgcaaaaatcaatgtgaacacggagtgtcagctttcatttgcacgggccaccagagagtatatcgaggccggcaaggatcttcggggcaagggttacgatccgagaaaacttttggcaccgggtgcagaggctattaagaataccgtaaaagaaaaaatcgaattgttcggttcaaaggacagagcgtaatctgggctgttggcctttccagtgaggctatatcgccggcaatgaggaaagacaaaacagaacgggcaaaatattattttaagtttatattgaaagagtgcggaatatccgcactctttttatggctctaaaaattaaatctttgtaaattttgattttatttatggattatggttgcaaaaaataaaataatttgataatatagtcctatatcacaataatctttataaattttatcagcggagtgttaacatggagcagggcgcatttagcgaaaaccaaataaaatatctgacaaaactgtcggaggagtacccgacttcaaacagcgcctcggcggagataatcagcttagaggcgcagcttaaactgccgaaaggcacagagatgtatatgtcggatattcacggtgaatatgaggcttttacgcatatattgaacaatcggtcgggggttataaaagaaaaaatagacgtggctttggccggcgttacaacagaggcacagcgtgctacctacgccagccttatttactacccaaaggaaaaaatcgctgagataaagcagacggaaaagcgaatgaaccggtggtacaaacttacgatttaccgccttatagatgtttgccgccatgtttgcagtaaaaatacaaggcgggccgtaagggcagccataccgaaagactacgcctatgttatagacgaacttttgcacgcccattttgaggaccacaacaaagaggcctattacagccagtttgtttcggcaataatcgaaaccggctcggcagacgattttatcaatgccataagcactgttataaaaaggcttgcagtacataaattacacattgtgggagatattttcgacagaggcagtcgcccggatattattctcgataaacttatggcacatcactctgttgatattcaatggggcaaccacgatgtgctgtggatgtgtgccgccacaggctctccgttgggagtggcaagcgttgtgcgcatctgtgcggcttacaacaacttagaggcattggaggagggctacggcataaacctgcgccccattgccatattcgcaaaccacacctataaagagtacaagcggtttaagcccaaaaacagcgacggctacaacagcgacgacgaggttattgtggctaaaatccacaaggcaatttcaatcataatgtacaagttggagtgccagaccatagccggaaacccggattttgaaatgtctgacaggcgaatgcttgaaaaaatagattatgaaagcggcagaatagaaatagacggggtgaaatatcctttaaaagacagggaactgcctacggtagacccgaaaaacccggcaaagcttaccgacggcgaaatagatgttttgcaaaaactctgtctcggttttaaacagagcgaaaaactgcaaaagcacataagatttttgtattcccacggctctgtttataaagaagaaaataacattctcatgtttcatggcggcatacccttaaacgaggacggcagtatgcgtgttgtggctcttgcaggcaagcccttaaagggcaaggcgttgcttgaccatgtggatgaattatgccgtgtggcgtatttcggctctgacgtgggaataatgaaaagaaaaggtcaagatgttttgtggtacctttggtgcggaaaaaacagccctcttttcggccgcagtaagatggccacctttgaaagcgttatgataggggaaaaatcccttttaaaagaaaaagaggatagctattacaaacatcaagacgaagaaaaaaccgccgatatgattttaaaggaattcggtcttgaccctgcaaagggaagaattataaacgggcatgtgccggtaaaagtaagcagcggcgaaaacccaataaaggcaaacggcaaaataattgctatagacggcggtttcagcagggcttaccacaaaaaaacaggcatagccggctacacaatggtgtattcttcaaggggaatatccctgcgtgcccatcagccttttacaagtttgcaggatgtggttttccacaactcggatataaagagcaaagtagatgttttccgggcgatgaaaaaccgtgtgcttgttgaaagcaccgatgagggcagagaaatacaagataaaatatcggatttgaaaaaacttatttccgcatatagctgcggaattgtaaaacaggcggaaaattgattattcgcttttgaaattttgaataccccacaacccacaaagacctctttaacagcagaggtcttttgttttttaaacgaataatatgacgcaaatcaatatattcacaaattaacacagggggcatttgtcataggcctgtgcaaacagcaggcttgcgggctgccgttacaacttttctgtcagcggtaaaatccgtcacacattacttaacagggagaacaagttttgcagtgggcgttttccgctgaaaaatgaaaacaaacaaaaaatgtgaaatatctgtaaatatattgaccgagaatgtaaaaaggtatatcattttttccataccgaccgcacggtcggaatttggttttacagaggtttctatgacaaaattaagcgttaaaaaaccatataccgttttggtaggtgtggttttgataatagttttgggtatagtctcgtttttgggacttaacaccgatttgttgcctacgatggatctgccttatgtggttgtttacaccgtttatcccggcgcaagcccggaaaaggtggaacaatcggttacaaaaccggtggaaagcgcagtttccacaacatcggggcttgaaaatatgacaagtatttcacaagaaaatgtcagcatgttaatactggaattcagccaaagcacaaatatggacagcgccatgttggagctttccacaaatttggacaccgtttccggcaactttgacgatatggttcagtctccggttatgatgaagatgaaccctaatatgctgccggtggagcttgtcagcatagatgccgacggaatggatataaagcggcttacggaatatgtaaacactgctcttgccccggctgtggaaagaattgacggcgttgcctcggcagatgttacaggcgatgttcaggacagagttgatatattcttaaaccaagaaaaaatagatgagataaacgacactattctctatcatgtaaacaaagaactttacaacacaaagaaaaatcttgacagcgcacaaaagaaattggacgatgcacaggcggaacttaaaaaacaggagagcgaagctgttgataagttggcacagggttcggcagaacttgacgcagggcttataaaagccagcgccctggacagccagctgacggctttaaaggcaaggcaagcgctgttatccggcgcaaaagaggcggtaaaggggcttgcacagttagagggcatatcccgtgtgattgacggcctcatatccgccaatgtgggatttgacgaaaacagcaccttgaacgccgttttggcgtcaatagaccaaatatccgcaatgcccggtgttccggaacaggtaaagaacctgcttgccacggcaaaagatgcgataaatcaaattatcgcctccggcatggccacgggagatacaaccctgggtcagttaaaagcaaccgtaaacggacaacttgaagccgcaaaggccgcccttaaagaaatgggaattgacgacagcataatttcaggcggggcggttgcccttgaaaaggacttgtcaagccttgaaagagaaattgcccagacggaatttttgtcaaaacaggcggaacaggcggttacaaagttaaaggaaacctatgcacagcttgaaaaagcaaaaattcaagccacagaggggttggcagtaggcaccgtgcagatagcaaacggcaaggcacagcttgaaagcggaatagagcagtttaacagcgcaagagacaccgccctcaaacaggccaatatcgacagccttgttacccagtctatgctcagcaacatactcacagcgcaaaatttttcaatgccggcaggttatttaaatgacggcggcgccaaatacaccgttaaggttggggatacttttaaggatttagatgaacttaaaaaccttatgcttgtggatatgggcatagacggtatggaacccatataccttaaagatgtggcggatattgaaataaacgataactccgatgaaagttatgtccgagtaaacggcaaccctgccgttgtgttgtcaatctccaagcagagcaccgcatccacctcccgggtttccgacagggtaaacgccaaattcgatgaaattatgggggaaaatccctctgttcacattactgctcttatggatcagggcgtttacattcacatgataatttccagcgttttgaaaaaccttgcttacggcggtattttggcaattattgttttgcttgtattcctcaaagacataaagcctacggcgattatcgcctgttcaattcctatcagcttgctgtttgcggtaacgctgatgtatttcagcaatgtaacgctgaatgttatgtccctttccggccttgccttaggtgtgggtatgcttgtggataactccattgttgttatcgaaaatacataccgtttgagaaacctgggatattcaaaggtacaggcggcggtttccggcgcaaagcaggttgcaggggcgattacggcatcaacccttacaactgtgtgtgtattcctgcctattgtatttacggagggcatttcaaggcagcttttcaccgatatgggtcttacaatcgcctactcccttttggcaagccttattgtggcgttgacggttgtgccggcaatgagcagcacaatgcttacaaacacaaaggaaaacccggacggtttctttgcaaagcttgtaaagggctacacaaaacttttggattttgttttaaatcacaagtggacggttgtttgcctgtctttgggtctgcttgtattcagcggatatgaggccacaaaaatgcctatgtcctttattccggaaatggattcaacccaaatgacaatgacctacaccctggacgccgaagaacacaccaaagaagaacttttggcagacagcgaaaaaatagcggaaacagccgccgctgttccgggtgttgaaaccgtaggtgttatggagggttcatccggcataagcagtatgatgtcatcatccggcaacaactcgctgaccacaacattttacattgttctgtcagaggacaaagagcttacaaacaaggaaatagccgatgaaatacgccggcagacaggggattataatgacaacctgtccatagaaacctctgcaatggacatgagcagtatggccggcggcagcggcgtaagcattaaaataaaaggggacgacctggacgaattgcaaaaaatagccacggatatgggggcttaccttgcggatgttgaaggcgttgcggaagttgacgacggcagcgaaaacgccgacagtgaaataagaattgatgttgacaaaaccaaggctatgaaatatcagcttacggttgcacaggtttaccaaaaagtttccgccgcccttacggacagcacaacggcaacttccatgacaatcgacggcacggatatgaagacgattatacacgcctcacggatttatgaccgcaacagcatagaaaacttaaaagttgccacggaaaccgacaaaaacggcaaggaaacggatattttgttaaaggacatagcctcaacatacatggctaccagccctacggccataaatcgtgaaaacaattcaaggtacaaaaccgtaactttgacattggaggagggcgcaaacgcaacacttactgcaaggcaggtacaggcaaaactgcggtctttcgatatgcctaagggttacacttatgagatgtccggcgaaaacgaaaccgtaaaaagcgccatgaccgatcttgtaaaaatgatagccttggcctgtgtgtttatctatcttataatggtggcacagttccaaagccttaaatcaccgtttattgttatatttacaatcccgttggcatttacaggcggattgcttgcgctgcttgtaaccggcacggaactttcggtaattgccatgataggcttccttgttctctccggcgttgttgtaaacaacggcattgtgtttgtggactatattaaccagttaagacttgatggcaccgaaaaacgccgggcgattttacagaccggccgtgacagaataaaacctgtcctgatgaccgccatgacaactgttttggcaaacagcattatggccgtaggtgttgacatgggtgcggatatgacaaggggcatggctattgtaaccgtaggcggtttgacctacgcaaccttgcttacattgttccttattcctaccttgtatgatattttcaatcgcaaagaaatgaaaaagatagaggttgaagatgaataactttacatataaacaggttgaagttttaaaccgggtagttcacccttatagaaaacggggcagacataacaaaacttaccacatcggaaatcgccgctcgggcaggcataagcaaaagcacattgtttgacagatttgccgataaaaatcggcttttggacagtgcccttgagtatattttaggcacaaaactgaaaaccgatgtggacgatatattcagtaaacagagctgcaaagaaaaattttacagcctgcttgaaaaattcgatgatatacaaagcagaaaaagcaatgttgtgacatcaataataaaatcttacggcggagtagaaaatataatcgaaaaatacagagtaaaatacggagaagaagttgcccacattcttgcaaaagtcgccgacgatgttatgaacgatattatttctgccggtaaagcagagaaaattataaggggcgaattgacttatcggtacacaaaacaagtcctttacagtgccgtggcaagcataaggatttgcccgatatgcgccgaaaaccgagaaaatgtaaaagaaaacgcttttaatatgtttgtaaaatctctcaattaaaggcaataaaataaaatcacactttttcaataagcggaaaggtgggtttgggaaaaggttcgggaaaccgaaccttttttgctgttatcattcaagtgtaaagtgacaaaacgggaaatcaagtgatatttcgttgtcatttaattgaaaacacggtt

SEQ ID NO: 2274 - DNA, 9867 bp, Unknown
  16S sequences of unknown bacteria
gcggaggatgcgataaggctttcgccttataaagacgacaaatgaaaatacgccgaaaatacgccgtttgggcggattcggattattctcgcttgcctaatatattatatgccattccgcaccgccttttgttaataaaagataaataaacttaatatattttgttttgtcctaaggcgtttacaaaacggcggcagaaagctttcttttaggtgaaaaacgaaaggaagttttacattatgattgtttgttcggattgcggaagcgaatttgaaaagcctgaaatttacagggaggcacactctctttcggcgccgccgtttgaggaaaggcgctgctgtccgttttgcaaaagcgaaaacatacacgaaaagagcctcacgcactgccgctgctgcggcgcaaggcttataaacggcgacgaatactgcagcgaccgctgccgtgaaagaggcgaagccatgtggagaagagagcgccttcgcaggcggcttttgaaagcaaacccgataagccgcataattaaagccgccgatgaatacaatgcggctcacggaacaaattacagctacggcgaatttgtggcttacattatgccggaagaagagatatgagagcggaggcaaagaaatatctttccctgtatttgctgcagcacattaaaattcaaagacttgaggatcaaattgcgctctgccccgaaaaggcggataactaccgcagacttatagcgcaggcggaagcgataagacgcgacattgaggaaaagatagagaaaaccgacggcgggctgctttcggagatactctatctcaaatatgttctcggaaaaactctgtacgaaataagctttgaaataaactacagccagcgccaaaccgaacgcctgcactgcatggcgctcgaaaaattttccgctttacaggataaggaaaataagctataataagaacagatgttccgggaaggtggggtggcaaaaacggaggaaagagtaattcttcactgtgatcttaataatttttttgcgtccgtttctttgcttttcaatcccactctgcgttccgtgccggtcgccgtatgcggggacaaggagcagcggcacggcattgtgcttgccaaaaacgaggctgcaaagcgctgcggcgttaaaaccgcggaggcaattttcgaggcgagggcaaaatgtcccgagcttgtaattctgccgccgatgatggataaatataaggagtattccgaaaaggcgcacagaatttacgaggaatataccgatatgatagagccgttcggcattgacgaatgctggcttgatgtgacgggcagccgcctgcttttcggcagcggagaggaaattgccgataagatacgccgcgaaataaagcaaaaactcggaattaccgtttcggtaggagtcagctttaacaaggtttttgcaaagctcggctcggacatgaaaaagcctgacggtataacggtaatatcccgcgaaaacttcagggaaaaaatatggcgacttccgatttccgatctgctttttgtggggagaaaaacaaccgacagactgcattcctgcggaatctgcacaataggcgacgccgccgtctgctccgacgaaatgcttgaacgcctgctcggcaagaacggactcgaattaaagcggtacgctttaggcgaggataattctcccgtttcgcggcagcatgaaaaggcaacgcccaaaagtatagggcgctcggtcacacggcagcaggattttaaaacgcctgatgaaatatgggggatgtttttgtctctggcgcgcgaaatatccgattccctgcgcgagcaagggctttatgccggcggcgtgcaggtgcatatacgcaacgcggcattatccgttaaggaattcagccgcagctatcccgattcggtcaacggagccaaaatcattgcagagcgcggaatggagcttttaaacgagcatttcggttttacggagcctttgcgctcggtgggactgcgagcaatcaatttaaggggataccaaactgcgattcaggaggatattttcggtgattccgagaaacggaaaacggaagaaaaaatagaaagctccatttacgagctgcgaaaaaaattcggcagcacaagcatcacgcgcgccgccgaggataaaaagcgaatctaaagcaaatattcagaaccattaaagaggaggctgccgtattaatgcggcagcctccttaaacaaaagcttttctctgagatgcattttaatgtaaaatgtcaccgtgcgtatggatagattttatattatttgaaagcgttcttcggtcggaaaaaggctgattacagcccggctatatcggcaagcagagaattcacctctgcaatactcgtcgcccagcttgtgcagaaacgcgccacagtaccctgcggaattgtacccatctcctcaaaataatagctctgtgcgagcgtattcctttgccgttcattcagtattacaaactgctgattggtaaagctttccgcccaaaacggtatgcctttggcctcaaacgcccctcttatctgcattgcaagcttatctgcctgtcttgctctttcaaaatactcgccgttttccagcattattgcaaattgcagacccataagccatccctttgcaagcaccgcgccgtgctgcttcatatacgccttaaagcgatatttaagggaatcctcggtaataatcagcgcctcaccgaaaagagcgccgcactttgttccgcctatatagaacacatccgtaagctgtgcaaaatccttaagcgtcaaatcattgctttccgcgcccaagccgtagcccattcttgctccgtctacgaacaaatacataccgtattttttacatacggttcttatttccttcagctcgcgctttgagtaaagcgtgcccttctcggtcggaaaggagagatacaccagcttcggctcggtaagatgctccggcgcgccgccgtcgtaatactctgccgcgcactcggcaatctgctcggcggtaatcttgccttcggtattcggaagctcaagaattttatgccccgtattctcaatcgacgccgcctcatggcagttaatatgccctgtatcggcagcgataacgctttgaacggaggataatgccgccgcaattacaacaatatttgcctgtgtcgccccgggaataaattttatcagcgcgtcatccgatgaaataagcttttttataatgctttccgccctgccgcaccattcatcctctccgtaacccgggtagctgaccgtgtttgcgtccgctaaaccgcgtaatacagagtcaaaagctccccgattgtaatcattgttaaatcttatcatttaaagcccctccttaatgtaagccaagcaaaaaaactccgacccacaggcacataaatttattttttccgcacctctttgccgctgatatgctcggtctttatttcaaacagctgcgccgctttacccgcgcgccgtgaaaatatatttttttctaatcgccgtcataaagattatttataggaaccgcataagggcagccgttttcccggttcactgccaaaataccgcgccgaccgcgccgtataagagcctctgccgcttctgtactaatttccttttttctgcgaatttctctgaactcggtaaagctccttgcaccggtttcagttgctttcaagcagccttataatctcccccagattatttgcaaagaatattcctttttgccgcctttcagaagacagtccttttttgatcataagctccagcagctccttcagactgtcataatatccatccaaattataaagtatgcacggagcgtcaagctgtttcaaggacaccttcgacataacctccgtaatttcctcaagtgtgcctgtgccgccgggaaacgctatgaaagcgtcaccgagctcaatcatcttatttttgcgctccgacatatcctttgtaacaatcagctcggtaagtccgtcgtgttgaaactcgctttcaataaaaaattgcggttcgaccccgataacctcgcctcccgcattcaaaacgctgtcggctgcagcacccatcaatccgctcttcgatccgccgtagataagcgtattgccgctttgtcctatccattctccgagctgcgttaccgcactgtgcaaattcggatcattaccctcgtttgcaccgagatacactgtaatattcatattgaaatgctcctttatttttcacaataatcaaccgttcataatcggcgaaacgataggctttccgtctctgtccaaaagcggagtcatgccgcccgcggtcccgcaagcatgaaacagatagttgacccccgtttccttagtgtgacaggactcgaacctgccgcggtttcgctcgccgccttttagattgcggctttgcgttcatttttgcaaggcgttagccttgctgcaaatttctcgcttcgccgaatgaaaaattcggcggcagaaacttttaacctaccgaaacaaaaaattttgtttcgtaggcgcgacaggttcgagtcctgtcacactatccacccaaatttccgtggttgtcattgcaccctgagtataaatcttttcaaatctttgccctttactcatttaatttgcctcctgatttccgagccgttatgcagctcttaaacagattatagcacaaatccgcaaaataatctaccttcacatacgctgtctcgatgcgtcccttttgcattgcggttttatttcgcagctcaaataaatcggcaggatccgcgcaggcccatcaattccattaaccgaaatatgcttttatcggtcgtagcctcacagggcgacttgttgccgagcaaaacagcgtcaggttcgagtcctgtcacactaggcaaacgagaataataccgtaggcaccgcggcaatcatagaacagggcgcagattacacattctgcgcccctgatattggaaataatgctcatataattccgcttacaaacacggtggataaaatgcctacggcaattcccgcccactgcttggcggttagcctttctttgaaaccgaaaacggcgtaaagcattgtgagcagcatagggcaaagatttattgtggggaaaaatacaaccgaggcaagcctgcccgataaaaacaggtttattgtgtgcggaaaggcaaagcaaagccccgaaaccgcaggaaaaagcaaaacagcgagggttaatttaataagactctcacccgatttttttattcgcccgcgttctgtaataagccttatacctgaaagagcaaaggaaacaaagaagcatgtaagcagtagtgcgggcatttccgccttgtggacggcgttgttttggtgtattttctgcacaacgcccaccgcgcccgaaaacacaaaagccaccgcgcagaaaagcagccatttaaggctgaacaagcgtttatcaccttcatcttttgcgggtgagagaagaatacatatcaccataagcgctatgcccgcgaattgcgaaaaggtcaccttttcaccgaaaagcacgggtccgctcatactgggtattattgccgaaagcgctactataacggacgtgtaggcaaacgagccgcaggcctgagcctttaaaattccctcaaggcttaaaatgttggcgacggcaagcagcgcgccgagcagcacggaaaatacgctgaagctgaactctgttcccgaaaaaagatatatcaacagtatagataaaaaacaaaatatgttctgataaaaattaaaccgccataaatacacgccggacatcgggtagcttttggcatatttaccgcgcaaaacgctgataagcgcgcctgtgattacggataaaacgataagtaacggtattggtaaagaaaacataggcacaccccaaaaaaattatagctttactttttcagcataatgtggtataccataaacaaaagcgaaataccatgagatttcgccctaaaaatatgatatttgtttcaaggtgcggctgtggaaatacattatttaaaaaatatactgcctgacggcggactgtgcgcggtaacggaatacggtgagcataatattaacggttcgctgcacccgacggatgacgcacatattcacgattactgcgaggtttatttcaatgtaagcggcaacgtttcatttgcggtggaaaataaggtttatctcgtaaatacgggggatattataatttccaagccgaacgagatacattattgcatttatcactccgaccaaatacatacctgctattgcttttgggtaaaggcgtcggcggagtattcttacctgctttcgccctttttacagcgcgcggcgggcgagaaaaaccgcataaccctaagccgaagcgataaagaaaaattgcgcacgctttttgatactatgcttgcctgccaggataaaaagcctatgtcggcggaaaatctggcggcggtggctggtgtgcttgatataatagaaaaaaacagggacagaacagagccgtcggtaggaatatcggcgcgcttgggcgaaattttggaatatacggacaataacttcgtcggcggctgctcggttaatatgctttgcgaaaaattttttataagccgcagctcgctttacagggcttttatggatgagcttgatataaccccctcgaaatatatagaaaatcgccgcctcgcaaacgcaaaaaagctgcttgaacgcggagatagcgttcaggcagccgcggaaaaaagcgggtttcccgattattcacattttatttcactttttaaaaggcgtttcggaataacgccgaaaaaataccaaaagcgataatcgtcgttttctcaaaattgcaaagatccgtgccggttattttataaagcaagacgagaagtaaatacccaaggttaaaaacatagctgaaattaaaaacgaatggcgcttataaggaattgtgtaaaatattatgttttcaaatacggcaagcccgaaatttaatatcttacctcaaacgcagcaaaaccgtagggcggaatatcgcaaagccgcaccttatccccgcaaagcataccgctgcaattaagaaaggatatacccgaatattctctgtcaagttcaaccgtcggttcaatagctatatcggcaaagaagttccaaagccccaccgccatagcgttcttatcctttttacacaaaacgtataattcgggatttccgtaagcatacgccgggagcttattgcccgaaagccactgcacattttcggcatactgcctgcttcttgcatagtgcttcagcacgttgtccatgtcgcttctggtatttacgtttaaaattaaaaacctatttccgttcccattttcatagcggaaagacatagggattattccgtgcgacgtttccgtatcgctcaatatcaaagctccgtttttaagccttatatcacaaaccggaacgccgtctgacagtatgtaattatcgtcatttataaaatgttcgcatgtaccggcggttacgggctcacctatcttttctattcccacatctatcccgcgcgacataagaatttccgcagcggcaatatctattataagcccgttttcaaaggcttcggcgggtaaatgccgcgcgttttcatcaaaggctatgccgcagactccctgtccaacataaaccgtgggcacggagttataagcaaggctgcgggcagcttttgagaaaaacatatattcaatgtttatattcttattaacagcggtgggcattacagtatccgccagcttggcaggagtctcgtacactcttaccccgcagcagtttttatcaccgaaaagcctgtctattcctccatacagttccctgtttcgttcatgaaacgcggcatatcccgtttcataatcggtatttgaagaataatccattccgtatttcagaataccgtcggtacaacccgaagcccttatagccatgtcgaacccctctaaatagcttgcggggcagcgggttctgggtctcggggaggaatccccctcagcgaatatttctatattctccgacttagtccacgaactttccattctttcaagctctataacgtcctgaagtttactgccccatgcgccttttgccgcccaatacggcgcgcctataagccgcgcaaacgggcgggtctttcccgcaagtatttttgcaagctcggcggcgtctgttccgtcaatatcccatgaggtaaggcatgcgcacgccccgagccttatttcggggtttaccgaatccaccgctttgcgcatttcggcggcaaaggctctgaaagcgtcgccgttagctttaaggtatgcgtcgcgatatttgtttttttcgccatttaatatatgcccgcgtatttcctcgcgggtaacattaccccccgtcagcctgcatatttccgatatgtgcctgtcgcacaggcaggcgggggaattgcccaaaaagccgtagcgaaaatcatcgtcaaactggataatatccacgccggtttcggctatatcccgaatataacccgccgcgaactcaacaaattcttcgtccagcgggcatatattttccctaagctccgtaccgtttattgtgcgcatacatgtgtagctgttatcgccgtttatcataaacgcccatacccacgcgcccacttcaaagccgtttgccttaaaatacgcgcagttttcacgcagctctttcattacccgcctgcgcttttctttatccgcctcatatctgtcaagcgccagaaatacacgttctgtatcgaatcttttaagctcttttaataccttttcccgcccgcagcgcgttacatttgcgttcattaccggcactgaaattttatacattaatatcacaaccatttattatttatcaaaatataagctcgtatctcggatttaacatcgtatatagcttttcgctattttcataataactccgtttttatgaatttatttgcagggaaacactttaaactttaaaacaattgtaatataccataaataaaaacagaatactatgaaatattacctcaaaaatatgatatttgtttcaaatagtgagtgtgggtatacatttttaaaagagctgacggcgggcggctgctgctcggttaatatgcttcgcgaaaaatttttaccgccgattattcgcattttatactcactttaaataatcaaagaccgcttacatcgtgtaggcggtctcttttcgtgttcaggtatattttatcttgagccttcttatcttggcagaaagcaccttacagagaacatcgtcaatttcatcagtgtatctgccttgtgctatcaagctgttcttcaaacggataagtgattgcaacacttcgctgtattcgtcatcggaaaggtataaatgatatttctgttctttcaatacaaccacctcctgttaccgcaattatataataagaaagggcatagaagtagtgtgcgattttctcttgccaacccttaaatgaacgaattaacagggtaacgaccgccttgtccattagcaggatttttggctcggtttttcccgccattagcagagagtgtattttcattagcaaaacggcgatttttttgctgatttttattagcaagccgtccaccccgaaggcggacgacattagtcctaatttccattagctgacggagaatttgctaatgaaaatctgtgaatttcacgattttcctcttttcccgtaaaaatgaaaaaacgccggaaacccttgattttacaagggcactgaaaaaggtgtgtttttcacaaacgaaagacataccttttttcatgcgtgagcaaaaaccgggggtaatgcagc

SEQ ID NO: 2275 - DNA, 12298 bp, Unknown
  16S sequences of unknown bacteria
cagccccggaataccgggccagcgaagcgcaggccggtacgaagaccccagtgaagcaggaagtaccacaagcgagcttgcgagcgcagtggtacgaccattgcgaattgtggaatgctgtcagcgaagctgactgaggggttgccgcctgagcggttgcaaagggcggcaggcgccaaaaccggcctgccgcccacgaaaaacgcgcctatgcgcctcaccgctccagggcgtttttcaacccgcccacgatttccagcggcgcgtatttgaagacttcaaagttgtaggttccgccatagggcaaggcgatcagcgcggcaaaaatttcgcgccaatgcaagctgccggttccgggcacccaatggcactcgtcctgcccgtttaagtaatccgaaaggtgggtgttgatcacccattttccgcagcgccgcaaaaagtcctgcggcgtttcgtggaacatgtgggtggtatccatgcaaatgccgcaaagcgcgccgctttccgtgatgcgctccatttcctgcgaggtgcggcccaggcaggtgcgcggcagattttccagggcgatttttttgcccgtttcctccgccacgggccccaattcccgcaggctcttttggcaggcggcgatgtgcgcctcgcgtgcgccttcctcgatgggctcgaagctgggatgcagcacgagattgttccccggatagggggcgagcaggcgaatcaactgggcaagcgcttgcacagcgcccgcgcggatggtttcatcgggggaggaaatgtcccaataggtgccaaagggcaaatggaagctggcgattcgcaggcccccgtccgcgatccgcgggcagacctcctccagataggcggggaaaatggagagatccacttcggcgtggtagtgtacgggcaggcagcattccgccgcctcgaatcccgcccgcgcgaattgcgcggcgttgcggtaggtatcctggttcaggctaatgctgaggggcaactcttggctgagcaaaatcatggcgtttctcctttctcgatggtgatgtgtacgcccggcgcagaggcgtcgcccggggtggcgctggccaggccgatggcgcgaatttgttcgcccgatagcgccagcgttccctgggaacagggcagcgcgacggaggggccgcccaataggtcgctggcccaggcgcggcaagggcccagtcccgtgatgcgcaaagagcggtagcaaccaaagacggccagggcggaaaccgcgcgcggcagatgccattcgacatccgccagaggcgcaaagcggcgccgctgcgtgcggggcaacagggcgatggcggcgcaatccccatggcaggacgcggcggcaaacggcggttcgccctcgcaacgcaccgtgggcaaatccgcgccgcggctgatgcgcgcgggcgcggcttgcgttagctcctgcccgatgaggtcgctcatccaggtttcgccgcgcgcaaagcgccaggaatcgcgcaaaacgcggcgatcgattcgcacgggttcctccgctgcgccaaagggcggcatgacgctttgccaacgcgccaggcgcgccacttcatccatgcgcaattttgcgtcgtccgccgtgggcggaaacgccgggtccatgtctcccttgcagcgcagtccccggagcgggtggcgcatgacgcccgcgcacagccccagcgccgcggccaggtagcactcgtcttcgcaattgatcagcgcgcggcccttgggcgcgcgtccttccatggcatggagcagcgcgccaacgcgctccattgtttgcgccgcggacaggggctggagaatgtcgtacgtgcgcagcacgtccgcttccagcagcaaatgggcttcctgtccggcgatttcttcgcgcaggcgtccgtctgggccgtcgttcaccggcccttggcacaccgcgtgctctatggtcaggtgcggcgcgtattgccgcgcccagcgggtcaggcgcgcgcgaaattcccagtcctgcccgtgcgcgccccaatccactttccaatattccacgcccgcgcgttcgctccagcgcatccgctccgcccaatagcgctcctgcgcttgcaaatcgccggccgcggcggagaatagggcgggcgcttcctgcgccgccacccacaggccgagcccacgccagcccgcttctttcacttgctggttcagccaactcaggcgctcccacggcgcttccggcccgccgggaaagcgccccgcgtccggaatcagcgcgccgaaccagcgcgcgtccgcgctctggggcacgtcccagccgtcgtccagcagaaaatagagctgtccgcgcgcggcgggataaaagcggcgcgcccagccctgttcgcccagcaaattttccaggttcatgttggcacgcgcgtgcgcggcgcccgtcgcgccttccgcttcttccggctgaaaatccgccttgccgcatccgtacaggtagttttgaaccgaccaggtgcaaaagtaattcatcttgcttcctttccgccgcgccgctatacaaatgtgatttcccgcgcgcaattttgaaacccgccgcccgtcacgtattgcatggtgccgcagggcagcggcccttcatagttgtaatgcaggtggcccgccagaatggcgcggatttggggctggctttggatgtaatcgatcatggcgagggtatcccgcgtgggctgctgctgaacgcgccggtccgggggataggccgctaggcattcttcgggcgcgcccaccagataggcgcagggctgatgcaattcttccatggcgtgggcgcacagcgcctgcgtatataggggcgtgtgcatcatcagcacgatgggcaggccgcgcgccacttcggctttgagttgctccagttggcgggcggtgaaatcgtaatagacgttgtccagggccacgaaattcacgccgtgcatcacgcggctggcaaagagcaagtcgttgccgcaaaaggattgcacgagcgcgaagctttgcattttataggcttcgtcctcgaaggcctcgccgacgtacaggctgtattcgtggttgccagccgccataaagcaatcgcgcgcgcccagcgtgtcgcgcatgtattccaaattggggtgcgaaacgaaatcgcagaagtcgcccgtgtacaaaatgggcaggtggttttcgtcggcataggccagttgggcgcgcaaaaaccgctcgctgcggccgggcacgccggcgtcgaattccgcttgccggtgttgggccagcgccattttgcgcgcgccgtcgcgcgcgtccgcccggcaaatgtgcgaatcgctcaggtgcagcgcgcgaaaaggcgctgccagaccgatggaaatggtggtgtgtaggcaatccataggagttcccctttccgaagcacgcgtcgtgctacagtccgtctatatcttaacagacaacgccgggccatgtacagccctggcagaattttttacatggttgaggctgtgaaaaaacagcaaaagttctttcgcaatccctccgtcgcggctacgccgcgccacctccctttgagatcaaagggaggctctgggttagtgctacttcatacggttgtgccactttccaaaagggggctgtgaaagaacagcaaaagttctttcacagcccccgaaagtctaggaaagattagccgagcgcgtcgtaagcgtcctgatagatctgcaccacttcttccagacccatggaattgagcttttcgatgaagtcggcccattcggcctccacatcgccttcgcccgtgcaccaggcgacttcttgctcgatcatggcgttctggatgggcgtccacagcacggcaatgcgttcgttcgcctcttcagagagcaccacagagggatagtattccgtcacggcgtaaggcgcggtgatcgtggcaagctggtatttgatttcatcctgcttcgtgccggtatggccgtcgggatacagcacaatcgtgtcggcgaccatttgatcggtcaccaggccggggagctggcgggtggtggtctgcagcagccattcatcgccgttcacatccgcgggcggattgatgcgcgtccaggtgccgtcgtcgttcttgaggttgtgcgtgccgtactggccccagatttcctcaacgctggtatcgggcgtgaacagcgcgtccacccagcggcagagcagctcggggttttccacggtggaagcgatgcacaggcggttggcgctgatgccgctggattcattgccccagatgcaatcgccgttcgggccggtcagcggggccatggggatgtaggtttcatcgccggtgagcacgttgtcgctgcccagcactttttcattgccgacaacgctgccgccggaccaatcgacgaacacgccgtagaggtcggtttcttccaggcccttcgcgtaatagcgcgacgcgtcctgcgtgaaggcttcggggtcgatcaggccttcatcccacagcgtgcggatgtactggatggcgtcgataaagcgctcgtcctggatggcgtagaagcacttgccatcctgcacattcatctgatagctcatgccaatgatgccgaaggggccgtagagcagggaagcgggggtctccgaccagccgctgtacacgaaggacagcgggatttcgtcggcttcgccgttttcgttcggatcgctggttttgaaggcgcgcagcacctcgaggaattcctccgtggtggtgggcacttccaggcccagcttatccagccattcgcggttgatgaacacgctggatttctgatacacgccgttgcccggccacacagaccacatgttgatctgcggcacgccatagatcttgccgtccggcatggtgatggcggccttcacatccggcatggtttccaggatggaagcgaaattgggcatgtactccaggtaatcggaaacgggcagcagcgcgccggccgggccataggtcagcacgttgttgttgtccagcatgttcacgaacagatccggcagatcgcccgaggcgaaggtcgtggcgatgcgttcagccttggaggtgctgggcaccacggtccattcgatgttgacgcccgtcgtttccgcgcgctcaatgtagagagacttttcattgggatcgccggtatccagcgcgtggggaacaatcatggcggtgtaggtgacgggggtgtcggtcaggggcatttccggctctgtgatcacgggttcggccagagccgcgccagccaggcacagcgtgagcagcagggccagcgacagggaagccagtttcttcatgggaaaacctccttatggtttgtattgatatcagccctttacagagccgatcatcacgcctttgacgaagtacttttccacaaacgggaacacgatgagcagcggcagggtgccggcgatgacgacgatgtatttcaccgattcggaaatgcgcaacagttctaccacggccatggcgctttccgagtcctcgccgctgcgcgcgctttctagcgcgacttcggccttcagcaggatgtcgcgcagcaccaactgtaggggatacctggtttcgtcggtgatgtacaacatggcgttccagtaggagagccagtgatccaccgcgtaaaacaaaccgatgacggcgatgatggtggtggcgttgggcagcacgatgcgcaggaaaaagcggatgttgttgcagccgtcgatgtaagccgcttcttgcaattcgttgggaatgctggtggcgagaaacgtgcgggtgatgatcaaattccaggtggaaatggcgcccggaagcaccagcgaccacacggtgttgagcaatttcaggtctttcaccagcaaataggtggggatcatgccgccgccaaagaacatggtgaagagcaccatccagttgagcggcgtgcgcagggcgaaggtgcggcgcgagagcacgaacgcgcccgtcatcgtcaaagccaggttgatgcaggtgcccagcacggtataaaaaatggtgttgaggtagccgcgccacagcgagtcgttttcgatcacgcgctgaaacccctcggagttgaagcccttgggaaagagcagcacgcggcccgcgtagacctcttcgggcgaggaaaccgccgaaatcaggcacaggtacatcgggtagaaaaacaacagcgtgatcaggcccagcacgatcatgttgaccacatcgaagcggaaatccccctggattttggatttgcgcgcccaggaatcagattgcatatgcccgacctcccttacagaatcccgctgccgctgaacttcttggaagcgacgttggcgatgagcagcaggatgaaattcaccacggaattgaacatgccgattgcggaggaataggagtattggccgttgatcaggcccgccttgtaggaatacgtggaaataatttccgaaacggaaatgttggtggcgctttgcatgaggtacaccttttcgtgtcccacgctcatcagcccgcccacggccaggatcagcgtgatggacatggtgggcacgatggcgggaatatcgatgtgccggatgcgctggaatttgctggcgccatcgaccatggcggcctcgtacaattccgggttgacgctggtgagcgcgcccgtgtaaatgatggtgctccagcccgcgccttgccagatgccggaaatgaggtacgtgggcaggaaggaggacgccttgttgaaatcgatgcccgaaccgccaaacaaacggatgatctggttgatggcgcccacctggttgttggtgaacagcgtgagcatgcccaccaccaccaccgtggaaacaaagtgcggcatatagaaaacggtttgcgtcgttttgcggaagcgcttggcgggcaccgcgttgaacatcagcgccagcagaatgggcagcggataagagaaaatcagcgaacacagagagatgcgcagggtgtttataatgtattcaaagctggtggacaggctcaaaaaattgcggaagtgcttcaggcccgcgtaagtgctgccctccattcccttccaggggttgtagtccataaaggcgatctgcaagccatacatggggccataacaaaaaattacatagtaaaccaccaatgggatggccaaaagatacaaatcccagttgttgcgcatgtcttttcgcaggtaacgcaagcgttgcatgtgcatccctccttcgcactataggcatcatagcacgttttttcgcgctgcgctatggaaatttccatcatgcgctatggaaaaacctttcacaaaccggccatctcttgacttgcggcagggatttgttataatgaaagcatacaaaagcaacgggaaaatcgaggagggcgccatgcgcaaagggaaaagaatccgaagaatttttgccgccatcctggcgctgtggctgttaagcgcaccggtgctgggcgaggaatcgcagccatcgcccctgttcatcaccatcgccgggccttatgccgattccctttccagcgcctacgaggatccgctgcgcgaatttttggaagaaaagtttgccatttcgtttgtgcccttgcagatcgacgatgccaacgcctcttacgcctatcgcctgcgcgccgccgccaatgaatttcccgatattatgctctatgacgcgcaatgggattttctgtattttatccaggccaattccctgcgcgcgctgccggatgtgatgtccgattatccccacttgcgccagtatatcacctatccttacgccaagaatttgcaatacgacggcaaaatctggggcattccccgcagcctgtacgcggaagagcagcggttgccaggctattgcgtgctggtatataaggagtatctggcgcagacgggcgtggaggagcccgtcaccatggaggattggcaggcgtttttccgcgccattcgcgaggccaatccggatgtgattccgctggccgcgcaatcgccctgggccatgttcaatttcagctatttctacgcgccgttcgccaacacctggatttgggatacgcaaacgagcagctatgtgccgggcttttacacccaggaatacagccagcgcattgccgccctgcgcacactgtgggacgagggcctgctcgatcccgattttatgaacgtgaactgcggccggccctcgggcgtggatcgctttttgctggggcaggccgcctgcatcgtctatcccacgtccgtccacgtgctgcaatcggagctgatgcacctgtgggcgcagctgtatccggacacgccgatggaagaaaaggtggaagcgtttttcctgccctgcgacgccggcgggcaatattccgaattccacgagctgaacatgtccgccatttatttcagcgccaacgtgagcgatgaaaagctggatcgcatcctgcaactgctggattacctctgttcgcctgaaggattgctgttgcggcgctggggcttgccggaggtggattacaccctgcaggaaggccagcccgtttccctgctggcggaagggacgacgctgtacgacaaatatccttcctattgtttgctgcgcatcctgcccaatttggacgaggactacatccgcagcgatcccgccctgccggcctttgccgcgaaggtcgcggaaaaatgcaaggagtgggaagaattgtgcgtgagccaacaacggcattggacgtccatgcgcgccaataccatcctcaccgattccggcacctatttcaaccccaacctgacggagatcagtttccgcatgctcacggccccggaaggcgtggaagcctgctttgaacaaatcaaggaggaatttcgcgcccagggcatcgaacaactcattctaaaagtgacggtaagtttactgcgatgaaaaagcacacgtatacagtaacgcatcagcagttcctacgctttgtggtggtggtaacttttgcgctggcggccatcatcctcgtaacctgcctgctgtacaccatcgtgatcctgcagcgcaaccagacctatgtggacatcatgctcgatcaatacgaaaccagcgtggatacgcagatggaagaatacacgcaactcgtgcaaaccgcggcttacgacgcctccgtgcgcaactatttgcaggcggaggaaccctatgcgcgctatctggcgggccaggaagtcagcacgctgttttccaacctgaaaatggtgcaaaatggcgtggcggatttttatttgttcgagcgcgacgacccttccacggcctatgtcgatctgggcgcgcagcaatccgcgctgatggagcgcctgtggcaatgcgccaagccggaagttttgggaatctatgcctatacgccctcctatggccaggcgcgggcggattttgtgattttggccgcttgcccggtgtatagcctcacggtcgatggtccgcaatcccgcgtgatcggcgcggtggtcgtggccatcaaccgcctggccattgaaagcaacctgcgcgagttttatcaattggaaggcatgcgctatgccctgctcgatcagcagcagcgggtcatcctgggccggccgctcaccgtatcgcaacaagactatcgcctggcctgcgagcagggcgatgtggcgcacaacactttgacctcttccaccattcttacgagcattcccgcgatggacgcggtgctggtggtgcagatcgataagctggtgttgctggaggacttgttcaccatcacgctgctggtgctggcgctcacgctgtgcctgttgggcgcgatgctgtatatgtcgggccgcatcagccgcgaggtcaccatgccgctttccagcctgacggaggcggtcaagcaaatggacgctgatcccacgcacacgcgccaggtgcccgaggagggaaacgcggatttccgcatgctctccgccagcctgaaccgcatgctgaaaaccgaaaagcggctgacccatgaattgctggaagccaaccgcaatctatatgcaagcgagctggcgcaaaagcatttggagttgcaatttttgcgcagccagatcaacccccactttttgtacaacaccctagaaaccattcgctccatcgcgctggtgcgcaaggtgccggaagtggcggaagccgccaaaaatttggccaaactgctgcgctattccatcaagggcggcgaggtgatgcagctttccagcgaactggaaatcatccgctgctatctttccatccaggaactgcgctttggttcgcgcatgtattcggtgttccgcgtggaagaagcggcgcaggatctctatatcccgcgcatgtgcttgcaacctttggtggaaaacgccgtggtgcatggcctggagaccgccatggggccgggcatgctgatcatcacttgccgcaaagaagagcaattgctgtggatcaccgtgcaggataccggcgtgggaatgcccacggaggaagtggagcggatcaatcgccagctcgccaatccgtttgatgagaaagtggcgcaaaacggcggaatcggcatgctgaacgtggcccggcggctgcagctttccctgggcggcgattttgtgatgcgcgtggagagcgagctgaaccggggaaccatcgtgacgctgcgaatgccgctgagcaagttaaaccagacgggaggggacgcgcgtgtataaagtgctgttggtggatgatgaggcctggattttggaaggactcaaggccatgatcgattgggaaggggagggcttttgcatctgcgcaacggcttcgaacggcctggaggcggaaagcctggtgcgggaacagcaaccggactttatcctggccgatattcgcatgcccggctgcgatgggctggcgcttctgggccgcctgcgccaggcgggctgcaacgcgctatacgccatcatcagcggctacgcggaattctcctatgcgcaggaatgcatcaagctcggcgcgtgcggctatttgctcaagcccgtggaagaggaagaattgctatccctgctccgctgcgtgcgccagacgctggggcagcgttatgaaaagcggattatggaggagttggagcaggaaacgggactggtcgagacgctttttccccgccagtgctatcttgccgtggtgtatggcggcgaacggtttacgcccgcaattcccgcgctgtgcgcgcggcttagcaggcgctcgcgcttgtatctgagcgagcaaccgctgttttccggcgaggcggatgtgccggagggcgcttgtgtgggcgcggcgcgctattgcccgggaaacggtgcctttaccgccgcggtggccgcctgccgcgaagcctcctggcagggatttgtgcagccgcaaaagcgcttttttcagccgcaggatttgccgtccgcgccgctagcgccgtccatgcccgcctcgccgcaagcgctgctgcggcagtgcaaggcaaaccttccccaggtcacggtgcgccatttgtacgtgctgtatttggccatccagggattgctggaagggatccagcccgattcgccagaatggcttttggaacactttgaaaacgcgcagcagctcttggaaacgctggaaaatgaatgcgtttcggaagaggaaaccgccgatgaggcgggctccgtggtggcctatctgaaagagcattttcgcgaagatctttcgctggatgccgtcgcgcgcgccctgtatatgagcaacagcagcgtccggcgggtgctgatgcgggaatgcaacgatacctttcaacactatttggtgatgttgcgcatggagcaggcgcgcgttttgctgaagcaaagcgaaaatagcatcaatgaggttgcgtatgcctgcgggtttcacgacgcgctgtattttcgccgcgtgttcaaaaagtggttcggcgttacgccctcggaataccgcgcgaaggagtaaagggtataaggaattgcagggattttggtttcaaattgcataatcttgcggtttgcgcatttccaagctttcatcggcgaagctgatagcgtgcccccctcagtcggctgaagccgactgaggggggctggtttgtccgatccctccgtcacggctacgccgtgccaccgttccacagttcaacatggtcgcctcgcttcgtgcgcaaagcgcacttgtgatgctccctgtttcactgggcttacttcgcgctgtttcgcccacagggcgcgcgcttcgtgcgcccctttgcacaagggagactctgggacagggctgctccctacggcgtaccactaaccaaaaggctccccttggaatcaaggggagctgtcagcgaagctgactgaggggt

SEQ ID NO: 2276 - DNA, 4376 bp, Unknown
  16S sequences of unknown bacteria
cttaatatttcctgccagggggcttttttgtactgtccgcacaagatggggcagttcagccaaagaccggagagggccctttttaaaactcttttttctcatagatccgccgggaaaccaaataggagccccacagcaaaagcagcaatagcagagcaagcagcacaggaagcagctttcctatccagggcgccagggtaggcagggccagcccggaaccaaggtaccaaaggaacacgcccatgggcaccaaaaagaccaccataatggccagacggctgcgctccacacccaatttataaatacaggggatcatcagactgataatgacgataccggtaaccatcgtgcttcccaccagggacaaaagttccatccaatctatggtctcccaataggccatgatcccaccagcgatcaacgcactgaccacggcccccagcaacaccatggccagagaaagcaggtatttggcctgaacgcaggttttccgggtcaccggcaaggtcagcccataggcgtcccatttggcattttcgtcataggaaaaactgaccatacacaccagaaaactggtgaccccgcccacaccggacacataggaggggcttttgagaataaatcccatggctcccaacaggacgcaaacgcccagcaagcttttcagatatctgcgcatggtcaacagatctttcagcatcaacccaaccacgattcttcctcctttgccatcatcaccatgatatcctccagccgggccggctccaccagaagggaaggttcccgccgggctgcctcctgccggttattcaccaggcctttggcgtgataccggccttttttcatggcaatgagcacatcaggccccaagcttttcagcgcttcttccgtcccctgggccaggccgtattcctccagcacccggtctttctcctgggaaaacaccaatttcccctcatgaatgaaggtgatatagtcggctgcctgctccagatcggtggtgatgtgggtggagaggaacaccgagtgctccccatcctgaatgaattccaaaaacagatccatcacctgggaacgggccaccgggtccaggccgctcatgggttcgtccagaatcagcagcttggggtggcgggccaggatggtggccaggcgcaattttgtgcccatgcccttggaaagctcccgcaggtattttttccggggaatctggaagcgatccagcaaaaaggagtaatatcccttatcccaccgaggggtaatgcgggacaaaatggaatcgatgtcctgcacccggatgacttcattgaaaaagctgccctccaggaaaacgcccacctgttctttcacttttctcaggccatagccttccttttctcccaacagatgcacctctccgccgccctgcacaagccccagcaaacgcttgatggtggtggtcttaccggcgccattctggccgatgaatcccatgatacatccttggggtagtgtaaaactcacatcctccagagtaaatcctggatactgtttgcttaaagagattgcttcaatactatttgtattcattttacttttctccttgatacagctcctgcaaaagctgggtcagttccgcaaggcccatggcgcagttcttagcctcttccacaccacggcgcagatactcctccacctgtttctgccgggcctgatcccatgtgccctccgggcgtggtgccacatagcagcccttccccggggtggtgatgacaaacccttctctctccagctcttcataggcccgcttggtggtgatgacgctgatgcgcaaatcccgagccagcaggcgcatggatggcaaggccgccccttcgcaaagttctccccgcaggatcaggcctttgatctgtcgggcgatctgctcataaatgggctggccgcttgtttgactgatgacgatattcacggtgcacctcgttgttatactgtatatatactgtatatacagtatgcatccctttttcctgtttgtcaagaacaaaataaaaaaatgccaaagcggaaaccgctttggccagattgccgaaaaacttatataatgaaaaagattttctgccctacccctataaatttgcaaaaagccgcgacctgtgcgcggctttttgcacttctcaagggacaagtgtacgccaaaggcgtgcacgcagacccttgtaaaaactcgaaaaagtggccggaggccactttttcgacacgcttgccaaagcggaaaccgctttggcaaggtctttttccattacagcccttcttcccgggcatcccgggcgatgaggcagcgcagcccttccacagccgcccggatggccaggtcggtgtccatgcagtggggatcgggcagcccggcgtttttccgctcctggttccacagcacggcaaacaaagccccggcccgcagccccagcaccgaggaaaccacaaacaaagcagcactttccatctcgctgcaaaggacgccggcctgcttccaggccttccatttttcttccagcatatgggccaccggcatccgggaaggctcatgctggccataaaagctgtccttgctctgcaccacgccggtgtgcacactggctcccgtagaggccgcgccctgacgcagggcatcggtcacatcaaaatcagccacagccggaaattccagaggcatatagtggaggctggtcccctcctggcgcacggcgctggtggccaccacaatatccccgccccgcacggccagatcaatgcccccgcaggtacccacccggatcaaggtatgggcgccgcaggcggccagttcctctacggcaatggccgtgctggggccgccgataccggtggaacacaccgacacccgctgcccggccaatgtgccggtataggtgacaaactcccggttgcgggccacaaactccgctccctccagataggaggcaatatgctggcaccgttccgggtctccagggagcaggcaatagccccccacatccccctgacgcagggcaatatgcatttgccggttcatgacctccatgctcattcctcccttttctcaatggcccgaatgcttttttccgccttgagccggggcaccatcacttctcgcccacagccgcagcatttcagcttgaaatccatccccacccgggtgatctcaaaccggtcacagccgcaagggtgactttttttcatttttaccacatcgcctacccgataatccatggaactccctccccatctgataggggtattgtaccacagccctttccaaaagaaaacagcaacatcctagggaaacatgcatatagatgaaaggcaacggacaaaacaaaggaggaatgaagatatgccccagggaccttatctgccggaaggtttccggctgcacaccccggaaaaccgctgggtgaataccccggccgccatggatcaggctgcggaggaagaacaaatactggaaggcatcgtcacccgatgcgattgtgcccacaacctggtggtggactgcaacggcatcaccggccttatcccccgcagcgaggcggcattgggcctcagcagtggccgcacccgggagatcgcccttttgtcccgggtgggaaaaccggtttgttttcaggttatcggtgaagggggcggccaatacctgttttcccgggccaaggtgcagcaaaaagccctgaactatctgatggaaaacctgctgcccggggatgtgatctgcgcccgggtgacccatctggagcccttcggggcctttgtggacatcggctgcggccttacctccctggtgggcatcgagcacatctcggtgtcccgcattgcccaccccgccgagcggttttaccccggccaatggattcatgtggctgtgcggggagtggacccctccatgggccgggtgcatctgacccaccgggaacttttgggcacctggctggaaaacgcccagcgtttttccccaggagaaacggtgagcggtgtggtgcggggcaatgaggattacggcgtttttgtggaactgagccccaacctgtcgggcctggcagagcggaaagaaggcgtctcctccggggatggggtgtcggtgtacatcaaatccattctgccggaaaaaatgaaggtcaagctgatcctcatcgacaagctggagaaggctcccagcaccctgatccgcccggaagattaccagatcacccagggacggctccagcattttctctattccccgccggggaaagaaggccgtctcaccgaaacggttttctattaaaacatcgcaaaaaagcggagaggaacttttgaaccgccccagattatgcggacagcacaaaaaagcctctatgtagggaaaa

SEQ ID NO: 2277 - DNA, 32759 bp, Unknown
  16S sequences of unknown bacteria
gtccttgtccaatgcggcgtctttcattaaaatccactgactttggtgttgaccccacaacctttggtgttgaccctaaaactgtctaacacccttgcagtgtgaaagttataaacgcggagagggggggattcgaacccccggtgggcttttgacccacacgcgatttccaatcgcgcacgttcggccactccgtcacctctcctaaaaattcagcgcaaacttctctcatttgcgcctcctattgaaatttatgccagagagtggatttgaaccaccgaccaaaggcttatgagtcctctgctctaccgctgagctactctggctcttttaaagattcgttaatctacattttgtctttgcactgtcaagttatatttgccgttttttttacttttattctttagccactgccataccggcaaattccccaacccgcgcgtagctctctatattctccaaactcttttcctcaagttccttccgccactttatattcgctcccctctcaaaaatacttaccacgcacgacccgccaaacctaaacattccagcctccgcccctctatccacgcgcgccgacaccttgtcaaaatttactattgtcccaacatttgtagcccctatctccacaaatgcgcacacccccatttcttctgtttccagtaaattcactaccctcttattctcccatattatcgacagcctctttaccaacgctatcgggctgaccgagtacagcttcccagcaactgccctgcgcgcgcatatctccccgcttaccggatagtgaaacctatggtaatccatcgggctcaggcgcgatatcagcatatcccctcctacatatctctctgcaagcgctgcatcacccaaaaatttacccaaattaaaacgctgccccttcgcataaaaagagtcgttttctcctatccccctcaccaataaatgccgaccgtcggacggaaacgaaaccacattcttttctccggaaagctctattttcctcgccccgcttttcagcgcacgcgtaaaaaattcattaaaagtattatactcgccgggctcttttaacatttccgacgtttctatttcattctcccgtataaatctctccactgctttgcggctaatctttgaatctgcccataatccgcatgccttggaaaatattccgcgggatatgagaagccacaatgcagcctctcccattttccctccatataaaaaacgcattaacttctcagcgcatactttttcttcttccaattcgcctttggatatattgtaaatttttaaactcatagcgattcaagcctgtgttttaaatatgtcttacgctcagccgcgcgagaattcctaaccgctgccgcccatgcggtgggatcccccacgacaaaaactttcttccgcgccctcgtcaatccggtgtacaacaaatttctttgcaacattataaaatgctgtctcaatagcggcatcactactatcggaaattcgctcccttgcgatttatgtatgcttattgcgtacgcctgtttaaaatccgaaaggtcgttcttcgataaaaatacacgcctcccgtcaaaatccgccaacactccgcttccgtcgtcctcaacgcgcacgacgcgccccatgtcgccgttgaaaacgtctatatcgtaattgttgcgcgtctgcattatcttgtctcccacgcaaaatacggtgcctgcccatctcataccgtcctttcggggattgagcgcctcttttatcgcagagttaaaattctctatgccagccgcccctttgtgcattggcgccaacagctgcatatcagatatcggatccgcccccatcttccgcgcaaaatcgcctgacatcagctctatgcacgatttgagacagctttcaggcgtagatgcaaacacaaaatttacgtccttcgacaaatcgaccccttctatcgggcgcggcggaaattcggaagttgactcgttcccttcgagaactgcgcgcgccgccaaaactatgccgcttctttccccctgcctaaaaatatgctttaaccgcgtgacgggaaatttcccgcagcctattatatccttcaaaacattccccgccccaacgctcgggagctggtccgtatcgccgacaagcacaaggtgcgcgccttccggcacagcggaaaataccgccgcggcaagtttcgtatcaagcatcgacgcctcgtctatcacgacgaatctcgcgggtatcggattgtattcgttgtgcttgaattttccgttttcaatgccgagcagcctatggattgtctgcgccggagtctttgcgctttcgcccattctctgcgccgctctccctgtgggagccgccagaacgggcgtgcacttttttgcttttagtatgtcgcaaagcgcccgcaaaattgtagttttgccagttcccggcccgcctgttatgacgctaaatttatttttgagagcagacaatatcgcttctgactgttcgggagcaaagtctattttcgccctttcttttgcccattgcaccgctatctcggcttttatgggcggcagaatcgacattcctttttttattcgggcaaggctttttactatctttctttcggcgtagtcaagcggcgcggactgcacaaagttttccaggcgtttcacatcgcccgactctacaagcctttccagcccctgcgcgcatttttcggcatcgacctgcaataatgacgccgcccgcgcgattatttccccggcgggggcgcaagtgccgccctcgtcttcgagctcggacatcgcatgcaatatgcccgcctcgattctttcggggctttcgtttgatatgccgatattcagcgctatcatatcggcggtcttaaagcctattccgtctatctcgcggcaaagtttgtagggtttcgagcgcactacttccgcgctgtcggaaccaaagcgcttcattattctcacgcacagcgccattcctattccgtaaacgcggagagccaccacaatgtcgcgcagcgccctctgttcgtcccaagatttttttatgcgccttgcgcgctctacgcctatcccctttacttccataagccggcgggaatccgtatctattatacgcaacgtatcttcgccgaatttctttactattttttttgcatacacagggcctatgccgtccacgagccccgatccgagatatttttcaatcccatagacgttggacggcaaccgcgactcaaattccttcacatttatccgcgcgccgtacgccgggtggtttgtccactcccctttcacgagcaccgtttccccgcactgcaccgcaggcattatgccggaaattgtgacattttccctgtacgaaggatcagacggccgcaaggatgctatgcagaagcaattttcctcgttaaagaaaatgatgcgctccaagactccttctattatcgcctgttcgccgtttttacgcatagacacacaattatacacaaggcgtcacagcgcaatgccaaaaacagactccgagagttttgcaagattttcaaatactccgagggattcctggcaatttttagccagcgactccatcgagtcagagcccgttgcaacgagcgccgagtccaccccgaccgagcgcgccgcgcggtagtcgtacggcgagtctcctatgcccacgcactcgcccgccccgacgtttagtatggcaagcgccttttttgtaaattcgggctccggcttgcgcggggaatggagggccgttcctatgacggcgtcgaggctctctatcagcccaagcttttcgagaatcgcgtctgcgccctcctgctgtttatttgtaaagcacgccacttttactccgcgcgatttcagcgcggacaaaatttcccgcgcatacggcattatgcggaggccgtcgaacatcttttcgggaaatatttttaggtaatgctcgcatatagggcgcgcgagggattcgtcgttgccgtgcgccgcaagtatttttcccgcggttataagtatcgatcccccgacagttttaaacacctcgtcgtacgacggctccgggattccgtacaatgaaaacgactccgcgagtgcagagtgtatggcattgtaattgtcaacgagagttccgtcgaggtcgaaaagcgccgctttgtagagtctgatatccatactaaaatttctgttcgccgatttccataaagaatgcgtccggcaagtgtttagacaaatattttttcaggtagtcgcgcgtggaatcctcaatttcaaccggggccttcgggaaagtattgtaaattattccgcacaccgatatgccgcgcaacttgcatacctcaaaatttaaaagcgcatggtttaggcttcccaaccgcgaagacacaacaagaattaggggaatttttctgtcggatataaaatccgccgtgaggtaattttcttcgagaggcaccatcaatcctcccgcgccttctattattacatgcgaatatctttcggacaatatcttagtgcaggcgtcgatttttgagtagtcgattttaactccctccatagcgcacgacaggtgcggagaggcgggatatttaagcacgtacgggcacgtggtaaagtccctgtcctcgggcctcagggggattcccattactttgcggtgctccaatatgtcctcgctgattccctcgcagccggtctgtatcagtttttgcgttatcggattcgctcctttctcggcgagctttttggcaaaaactcccgttgcgaccgtcttccctattccggtatctattccgcttacaaaaaaaacattcatattattttttaaacgctattataaatataggattgtacgtcaaggcgaccctcccgtcggcgtctccgaagatttttgcgtatttatcggaaaattcgcggaagcgcgcgggagtccaaaaagtagtgaagcgcccgtttacccctgtgagggcgatatgcttgacgacatcccgcggccgcgggaagtatattttgcggacagattcctccaccgtgtcgcactcaaagcccgcgcgggaaagcatgtcacggatttcgagggcgtcggggtaatagagcgaatttccgcagagcatttttatctcctcgtaattgcgcggcccgaatgtcgaaaacgcgaataccgcgccttttttggaagagtcggcaatgcgcttaaacagcgcgggcaaatccggtatccattgcagagttgacgacgatacgaccaccccgaggtcttttggaatttcgcaccgccttatatcgccctccaaaatctcgcatttgcattcgataccctgcatcgccatcgtgcacattttggcagacaaatcgtttaaataccaaactgacggcgcgagtttcggcgcgagcagccgcgtcaaaaatccagtaccgcagcctatttcaagaattttttcgccctgcggaatgcctaacgccaagactgcctcggcaagtttttcggcggcgtctttttgcacgtgcgcattcgattcgtacgactgcgcatttttttcaaaagcccctccgactttcgagagcgggcgcgccgcatggacgagcgcgcggcgtattaggcgcatatccagatggtcgccgtccgagaatatcggcgggattttgctccatgcgcgccttaaattttcagcggggaaaattctgtcgccctttgcggcgagcgtaagcgtccagcggggtttgggagacggcatttcaaaaaacgctttcccgagggtttcaagttcttcgcgcagctcgcccgcgcttcgcttggacagcctgatttttagccctacgttgcgggcgccgccgcaaaccctcgaataaaacttctcgcgggaggtttcgtcgaacgcatttaatgtggcgttaaaaatttttggaggtatgcccatatttgcgtcaaccggatacggagaaccgcaaacagcggcgcgtgcgtcagccctcgacagtttttcggaaaaaaagtcggcgacccacactccgaaggaccacgccgccacgccaatctcgggatacgccgacacgtcaatatcgaaattcaggcttctgtaatcgtaaaaggcgacggcgtcgcagccttcggggatatcctcctcttttaagaaatcggcgtcgcacgcgaatcccgagaagaaaaccacgagtctgcgcgcgccgttttttctaatccatacgtgtttcatagggccctctccgcgtatttgttcaaagtgtctgcaataaggtctaaatgcccgtctgtgagcgccgcgtttagcgataggcgtaggcgggcggaattttttgggacagtcgggtagcgcacgggcggggaccatatccctgcctccctcatagcgcgcgacgcctcggcggctgctgcgttcgacccgagcacaaccggcaaaatttgtgtatttcccaaagttttaagcccagagagtttttttctaagaaccgacgatatttcgcgaaggcgcgcgcgcctgccgcccatatttgcgactttttttaagacaaaaagcgtccacattgcgtttatcggcgcgagggctgtcgtaaaaataaaagtccggcatcggttcacaagcaggcttttttgaatcggagagcagacgacgtacgccccggcggaagcgagcgccttgccgagagtgcacattataaaatcgacttcccctgcgagcgacaattcgtcgcacaatccgagccctgtgcgcccgaacaatccagtcgaatgcgcctcgtccacatagagcgagcaatcgaattcgttttttatccttacgagttctgcgatgtcggaagtgtctccgtccatgctaaaaacgctttcggttgctataaagacattttcaaactccgagcggcgcgcgccgagtatccgccttagcgcggtcatatcgttgtgcggaaagcgcgcccatttgcaaggaagatttcctatcgagtctataaggctcgcatgggagagcttgtcgtacagcaccaagtcccgcggagaggctattgcgggcaggattccagcgtttgcatggtatccgcaattaaaagacaaaaccgccctctccttccccgccgattcgctgtacgcgcgaccgagatattcttcaagctcctcaaatgcgggattgtcgccgccaagcagccgcgacgagcacgcccccataataaatcccttgccgcaatcgagcgacgacagaaattcgcgctgcaaatcagcgtccgcagaaattccgaggtagtcgttggaagccaaattaatgtactccgcccctccgaagctcgcatgcgcgccgcttattaccgacggaaaaagctcgcggaagagcccgtcctcacgcagcttttgcaaaacttcgcatgcggcagagtcgttcatagttcggcgcactcctccacggtctcgaccatggcgcgggctatggttttgagatcgccgtcgtcgattatgtaaggcggcattgtataaagcagcctgccgaacggccgcagccatacgccccttgcagcgagggcgtcttgaaatttccgcatgtccacgctctttttaagctcgacaacaccgatagcgccgagagccctgacgtcggcgaccttcttggatcccacaagcggcgaaagcccctcgcgcaatatgccctctattctgcgtatgcgcccgagaagcccgtctttttgtatcaaatcgaggctcgcgtttgcggcggcgcatgcgagggggttgcccatgaaagtcgggccgtgcataaaaagtccgggaactccctctgaaatagcgtctgccacggcgtctgtcgcgagcgtcgccgcgaagcttacgtatcctccagtgagagccttgccgaggcacattatgtcggtctccacgccggcgtattcgcaggcgaacatttttccgctccgcccgaatccggtcgcgatttcgtcgagtatcaagagaatcgaaagctcgtcgcaaattttgcgcagccgcaaaaggtattccgggtggtagaagcgcattccccccgcgccctgcacgattggctcgattatgaacgcggcaatttcccccgcgttttcgcgcagcattttttcgagctcggcaaaggaagagccgttccactccgcgccgaatgctggctccgggcgcggggcgaagaagctgaccggaaggcctcccgcgaacatcgagtgcattcccccgacagggtcgcacacgctcattgcgtgccaagtgtcgccgtggtatcctccaagagacgtcgcaaatttgttttttttggggcgcccgaggctgtgccaatattgcagggccattttcatggcgacttccaccgagaccgatccggaatcgcaaaagaacactttttgcaatttcggcggagtcatatctattaaacgcttggcgagcgttaccgcgggctcgtgggtgagccccccgaacatcacatggctcattttctcgagctgcccgcagacggcgtcgtttatgtgcggattgttgtatccgtgcgctaccgcccaccacgacgacattccgtcgatgagctccgagccgtccgccatttttagcctcaccccgcgggctgattcgacaagccgcgacgggagcggattcttcatcgaggcgtaggggtgccaaacatgaaggctgtcgtaatcgattatctcgcgggtatccatataatagattgttaaaattcgtaccccatgcgcgaaagcatggcaaaatcctcggagacgtctgagccgacggtcgtcagcatgtcccccattaaaattccgcttacgccggaatgcaaagcttcctcctgaaaattttttatcgaaagccttccgcccgcaaacctgatgtgcgcggagggatttataagcctgaatatcgcaaaggtctttaaaatttcctccttcgagagcggggcggcgttttcaagcggagtgttttttatgggctgcaaaatatttacagggattgagtcggcgccgatttcgcgcagcttgcacgcaagctcaaccctctggcgcatggtctcgcccatgccgattattccgcccgagcaaatcgacattcccgcggcgcgggcggcggaaattgccgcgattttatcgtctattgtgtgcgtggagcacaattcggggaattttgaaggagccgtttcgagattgcagtggaatctttccattcctaccgccctcaactttcggaactggggctccgtaagcaggccgaacgagccgcataggccgattccgcccaaagagcgcattgcgcggaaacattcgcacattttgtcaatgtacgcgtccgggatagagcggccgctcgtgacgagggaaaatcttgcgatgccgaggcgcttggcgctctcagcgtgttttagggcgtcctcaacggacgagtagtcgtacacttcgcagccggtatggaaatgtgcggactgcgcgcaccacttgcagtcttccgagcatctccccgagcgcgcgttcattatggagcatgtgtcaactttgtttcccagaaagtgcttcctcacggcgtccgccatttcgccgaggcgccgcgcagacaggctgccgcacaattcgacagcctcctcgaagggaaggacataaccgtttatgattttattttccatatagagttttcaatagcgcaattttttccattttacgcaaatagattttctttcaagacaaaacgaaaaaacgcgcaaaactaccctcaatgaaattcctccgcgctcgggaaaaaacgacggcaatcccggattgcgtgcgtaagcggcccgccaatgcgaagaatcaagcatctcgcggttgagccaactctttaaaaattttcaaaaaaacttgaaaaatatgcgcggcaaacaaaaatttccccttttaaaaagcggaaaattatgaaatttacaaaatatcacgccctcggaaacgactatctcgtactcgaccccgtcgattgcccaaaaatgccggaaggcatagacgtagtgaaaatctgccaccgaaacttcggactcggctcggacggcatactatacggcccggaaaagagcgacaaagccgacttcaagctccgcattctaaacccggacgccagcgaagccgaaaagagcggcaacggcctgcgcatattttcccgctacctcttcgacacgggcagagtcgaagaaaacaagccttttacggtagacaccctcggcggagtcgtcaaatgcgtagtctcaaaaggcggcgatttcatcaccgttgacatgggcaaagtgagcttcgattcggagaaaattcccgtcataggcccgaagcgcgaagtcgtaaacgaggagtttgaaataaacggcaaaaaatacaaatactgctgcgccactgtcggcaacccccattgtgtgctcccgatgaaggaggttagcgaaaagctcgcccgcgaaattgggccggtaatcgaaaatatgacatcgcttttcccaaaccgcacaaacgtgcaattattgcaagtcatcgaccgcaacaatattaaaatagagatatgggagcgcggcgcgggatacacgctcgcctccgggagctcgtcgagcgcggcggcgtcggtcgcgcacaagctcggcctgtgcgacggcgatattaccgttcacatggagggcggagacctttcgataaaaatcgcccccgactactctataaccatgagcggcccggccacaaaggttggagtatatgaaatgagcccgtccgtgctaacccagaatgtgccgataaaaatgtagcgcgcatttgcgcttcaaattataaattatagaatattagaaggcgcgtttttatacgcgccttttttcttgcggggcgtttgggaaattatattataaattccattatgcatatgaaattttttataattgccgcagctgccgccctgctgcctgcaattttgtgggcgaaagaatctgcttccgccggggtcgccgcaataatggacgaacgtctcgcgccaaaacccgtaaagacggagtattttgacggacttttcaacctcgtaaaatcctcaaaagcgatagtcgaaacgcccagtggtctatccgaagcccaaaagcaaacaatccgcaaaacttttgcggattattggaaaattgtccccgaattaaattttgtcgccgcggagaaatccgccgactcctcccccgaaggctattcccttaaagtatcgaaagacgcaataaaaatctctgccggaggattcgacggcgttcgccatgcgctaaaaaccctgcggcagctgtcggagtacgggcgcgacggcgacggctactatatccagctctgcgaaatatccgaccgccccgccctcgccttccgcgcggtgcatttgtgcatatatcctgaaaccacgcccgccgagctcgaaaagcgcgtgaggcttgcggcgtattacaaattcaattatgtagtgctcgagccctggggaactttcccgtttgaatcgcaccccgagctttcgtttttcaacaaggcgttcagccgctccgagctccgcagaatcgtcgatcttgcgtattcgctcggaattacgccgattccgcagctcactgttctggggcacgcatccggcgggacaaacgagggcggcaagcacgcgatactcactcgcaaccctaaaatggcggaattgctggaaccccacgggtggtcgtggtgcatgagcaatccgagggccgtaaagctgcttgaagaggcggttgcggaaatgcacgaatttttcggcaaccctccgtttttccacataggctgcgacgaggcctacgacatggcaacatgctacaaatgccgcagccgccccgtaggggagcttttggcaagccacataatccatttccgcgactttctcaaaaaacgcggcgcgcgcgctataatgtggcacgacatgctcgtcgaggagggggatccgcgctgggacaaatgcaccgcaaacggtcacgccggaaccggcatgggcgagatttacaaagagctccccaaagacatcgttattgccgactgggagtacgacgagcgcggcccgcttccggagggcaaaaagccctaccccacctcggcattcttcaaggagaacggcttcgacacgctctgctgcccctactacaaggtttcgaacatcaaaaacgcgtcggccgccgcgcgcgaaaacagcctcttcggaatgatggcgactacttggagccgcacgatgggctccaccggccgcgtgctgttctacacgtcggcgaacgccgcatggggctccgacccgtcgaaatattcaaattcctggaaggactaccgctgcaattacaacacccatatgcgcacaatggatatagactcgggaattgaaaaatacgaagacttgggcacaactcccaacgtcggggttgtcaggcacctaaaccagccgctctgaacaggcttttccccgccgacgcgcgggatcggaaagcggggcatttcaaacaaaacggaggaaaacattatgaaaatcgccataacattcgccgcgcttgcggcggcgtctgccgtgtcgttcggcgcccagacagtatttgtcgcccccggaggttcggattccgaggggcttggaacgaaagaaaaaccttttgcgtccctgaacagggcgataagggaattctattcgtcaaaacccggcgactttgaaatttgcgtcgccgagggcgaatatttcttttcaaagggcgtttcgatcgtcgcccagcacaccaacggcaagacgctatccatcgcagggccgaatttctccggagagccgaaagcccgcttcatcggcggaataaaaatccccgcaaaataccttgaaaaggtgtcggacaaggaaacgctctcgaaaattccgcaagacgccgaaggagttctctataaaatagacctcaaaaaattcggggtttcggaagtagggaaagtcgaaaagcgcggatggggttcgtggaaaaccaacggcaatcccctcgagaccgaggcgtttttcaaccgcagtccaatgacgcccgcgcgctatcccaacgacgactcgctgctgaaaataggggaggttttagacaccggcaaagtgacggactttgcggcgtcagactcctatgaacaggaggacaaaagcgtgaggggggcgactttcaaatacgatttcgaccgcccttcgcgctggctcggcgcgcccgacgcttatctgcgcggaaacttttccgtcggctgggcgtacgaccaaatcaaaatcaagaaaatcgaccccgcggcgaagacgattacgctcgccgacccgcacgcctacggggtgcgctcgaacaccccgccgaaagggtcgcggctctacgtcgacaaggccgacctgaaagtgcgcggctatcaggcgttcaacctcatcgaggagctagaccgcgtcggcgaatactacatagaccgcaaaaacctcgtattctataccatgctcgcctcggctccgaaggagggcgacgccttctacttttcgctggcgccagacccaataataaccatgtggaacgcaagcaacgtcaaaatccgcaacatagaattcgccgtcacccgcaattcgccgattaaaggctcgtactgcaacggcgtggaaatcgacaaatgcgcgttcaggagctgcggaaagccgtttgcgctcgacggggtaagctacaagaagcccgaagaaaaagactgcgcgacattcgtttccaaaaacaacaagataacaaactgcaaatttttcgacaacgccatgggcggggcgagaataggcggcggaaacaagcgcaatctcgaaaagtcgaacgttctggtgtacaattgcgacttccgcagaaacgccctgcgcctgacggtgggcggctccgccctctcaatatccggcgtcggcgtgcgcgtcgcaaactgccacatttccgaccagcgccaggcgacctttgggtttaccggcaacgaccaccttattgagaacaatcttttcgagcgctgctgccagttcgcgagcgactacggggtgatatacacatactcaaatttcgcccaaatgggaacggtaatacgctacaatttcttcacgaacaaccactccgaactcggatccacggcgggggtgtatgtggacgagtcgcacgcgggggtattggtgcgccacaacatattctgcaacaccggcagccgcagcgggggctcgagctttggggcgatatacattcacggcggctgcgagacgtgcgcggaacaaaacgtattcataaactgccagtctgcgttcggctcgcagacctggacggacgagcactacgcacggaagcttgccggggaagcggaatggcgcaaaaaccatgtggacgtcgaaaccggcgtatacccgaaggcatatcccaaacttgcgcagattctcgacccgactctcccgcgcgtaaactacgccttcgacaacaaaattttcaattcctcaatggcgatgaacgggctgctgaagctctacgggaactcatacataaagcccgcctcggaatcggacgcggacgcaatcaggaaaaacccgaatttgtccatcggggacgtgagaaagtacttcggttcagatccgctcgtaaagcacattctcggccgcaaaatagggctcgtaaaagatccgttctccggagaatagttttttgggggaaccgcgcgccgcaaattccgcggcgcgcgcgatttttttcaaaaaatatattgaaattgccgggatacgcggcattattgtattttaaattttttaattaaaggaaacaccatgcccagagaaatagtaataatcgaatgcacagaagcgcgcaaggaaggcaaatcgccctcgcgctacatgacaacgcgcaacttccgcaaaacgcaggaaaaagtagagaagatgaagtacaatccttctctaaagcgcagaaccctgcacagagaaatcaagaaataagataagctcaatcaagccaagattctcttgaatttaagcgcgcatatttttgcgcgcttttttttaacaattattttttctaaaatatgctcggggaccggcattctccccaaaaaatttttcgcattctcaaaaatcgggcaagtgccaaaaaagctttgcgcggtaaatctgcagacaaaaaaaagggacgcttaaatttgcgcccctaaaaaaatcatacctcaaagtttccgctacacattcgccgccgaaggcaggaactccggacggtaggagtatagcgacttcacatatttgtcggcctccttaaaattcgggaacgacatagtttttgggtcgtactccaactcaactcccgggtgtatgcaggaaatcatgctaagcaggacaatctctgtaaatggagccgcgtagccgaagtttgattccggcattctgccctccacaatcgcggacgcccaatctgcctggggattgaacgggaagcggttgcgtttaatcgtcttaggcggaattttaccggctttcataagctctatctgagcgtccctctcggtcagctttacgccggagcccgtgtaggcgaacgtcatcgtatgttttgtgccgacaataaatatgcagttcttattttttggatctttcaagaaagccggatcgactctctttatttccttcgggcggcgcaacccgtcgtaccaatgcaattttacaatgccgtccttgccaaatttgtttttgaagaacatgtctatagacgccgcttttggccagctgaaatccttggcgggaagcgcgtcggacacaattttatagggcgcgcccaagccaaaagcagaataaggattgtcgaggaagtggcagcccatatcgcccgcggagcctgtcccgaaatcgcgaagtccgcgccagttgaacggcacaacctttccgctaaaaggcctcggatgggccacgtttagccacaggttgtagtcgagagtagcaggttttggggtctccgggggcatggagtcaaaaccccaggagcggtctgtccacgcatagatgtcttcgacttcgcccattattccactctcgaaccactcgcgaatagtgcgccaagcgtcgtttgtatgaacctgattgcccatttgcgtatatacgcccgcctttgcagcgagccttttgagttcgtgggcctcccaaattgtgcgcgtcaggggcttttcgcagaaaacgtgcttgcctttggaaattgcccacgcggatatcggatagtgcgaatggtcgggggtgcaaacgcagacgccgtcgatgtcggagtccattttatcgagcattacgcggtagtctttaaatttcggaaggctgccgatgttctgcatcaaaaatttgcctctgtcgtcgcggtagcaataagccgcatagccttcatcgacgtcgcaaagggctactatatttgcgtcgttgctgttaaagatggtgtccactgacgatttgccctgcccgccccatcctattattgcaatatttgcgcgcgagtttgcgccctttaccttggcggcgagagccgaaggcaaaatcattacgcccccgaagagcgctgaagctttcaagaagtctcttcttttcatatttttcctcctatcgtcggcgcgcgagcattctatccattaaaatagaatgggcgccgcgttttttttctaaacgtttatttatgcgcgcggatgtcaaataaaattgctcttattcgcgataatatatcggataaagtcaatatagttcaataaagtcgaaattttattttcaacaaataatttgactaaatttttataaaaatttacgcttattggataaatcctgcaaaattgcgaaacgcgatactgttattggcttatgcgacataaatattataaatgggaagttctcgcgctactgtgggtggcatttttcttaaatcaggcggacaggcaggtttttaatacagtactgccgctgattcaggagtcgatgaagcttacgtcggcggaagttgggttgatagctacaatatttaacttggtgcttgcgcttctcgtgccaatatcgggttatctgggcgacaggttcagcaaaaaggcgctgatagtatcgagcataataatatggagctcggctacaatgctcaccgggttgagcacaggggtgcttatgttcatagtctttcgcagcttcgcaaccggcctcggagaggcgatgttcggccctgcaaactactccactatcgccgactaccataagtccacgcgtgcaatagccatgagcatacaccaaacctcgtactatttcggagtgatcgcaagcgggctaatcgcaggctacataggtcagatgtggggttggcggagcgcatttttcgttttcggcgcggttgggttggtgcacggcgtaataatgtattttagactccacgacaagaaaagcgaacccgcggaagaatctggcgatgcaaacgctgcaagccatagcggccacgcggccgaaaagattaatttcttggacgcaatgcgcgtattattccgcgtgcctacggcagttattttgactttttgctttgccgggctgatatttgttttaacaggatatctgacgtggaccccgacgtttttatacgaaaaattttcaatgaacctcgccgaagccggtttccattcggtattttacacgcaccttgccgcgtttttcggcatattgctcgccggagaaatgtccgacaagctcgccgtaaaaaagccttcttacagaatactgttgcagagcgcggggctactgttggcagttccattcatagtagccatggggagcgcgcaatcgctttttgtcgtgtacattgggttggctgggttcggctttgcgagggcgtttttcgacgcgaatacatatcctgttttgtacgacgttgtgccggaaagataccgctcttccgcggcgggggtaatgctcatgataggctttgcggtgggatctctcgcgccgcttatattgggcatgctaaagccgcatctggggctgtccgcaggaatatcgatgctcgcagtgatatgggctgtgtgctccgctgtgctttttgccggatataagattttctacatgcgcgattatcagaaggcgcgaaaggccgacgaggaatacgcaaaaatatgctagaactaaaaaacaaatttatagaaatatcgcttttcccggaattgggcgggcgaatattgagattttcgctctccggggaaaattgtctatttgaaaaccccgcgcttgcgggagtggagaatatccagccaaccgaaaagtgggacggcaagtggctgaattacggcggggaaaaaatctggccggctccccaaggctgggacgaccccgaacgcgaatggggcggcccgcccgatccttacatagacgggggaatctacaaagtcgtagattccggcgaagattttataacactcgaaagcccggccgaccccgtgcgtgggattaaaatcaggcgcaacataaaattgctaaaagacgaggcgcgcataaaaatatccgccgaactcttcaacctttccggagtttcaaaaagatggtctatctggcccgtagcgcaaatggcgcaaacttcgggaaactgcgaggcgtcggtgcccgtcgggggatccgcttggaggataatgcacggagttgtaaataaccctcaatactcattggacggcgatattttgagaataaaatatatgcggatagtcggcaaggtgggatcacttgcgccggcaggttgggcgtcgttctcggatctgtcagccgggcgggtttttgcggcatcgtttaatttcaatccggcggcggactaccccgactccacttcggtgcaagtctggacaagcggcattggctcggtattttcccgcggaaagctccgcacctatccggagagcgaggccgagaatcctccgtacacagagcttgaattgctctcgccgctctcggaaattccagcggggggctcctgcaaattcgactattgcctcggggcgtgcaaaaccgccaagggggaatcggtaaaaggcgtctcgcaaatttgcgccaccacagttcccctccaaaaaacatcggacggcggatttaagtttggcgccggattctttaaagaggggaagctttcggttgtcgccctgcgcggcgcggaaagcgaaacgattttggaatcggactgcactccgctctctcccgtatttgcaaagggagaaataccaagcggcaccgacgcagtcgcagtaaaattttccgacaattatcaaaattcaaaaacaatagactcaatacgaatatgaactcaaataacttaaaagataaaatagcactcgtcacaggctcatcgcaaggcatagggcgcggaatagcccttgaactcggaaagcgcggcgcggtcgtaatagtaaattaccgcgacgccgacaacctcgaaaaggcaaaaaacgtcgttggcgagataaaagactccggcggcatagcggtcgcaatggagtgcgatgtcacagactcccgcgcagtggctgccctcttcaaaaacataaaagacaagtttggaagactcgacatactcgccaacaacgcaggcacatcgcagccgaaggatatttttgaaataaccgacgaagattgggataggctgataaagacgaatctgacaagcggcttctactgctcccgccaagcgatgtttatgatgcgcgaccaacgctacgggcgcatagtattcacaagctcggttgtcgggcaccgcggcgcgctgttcgggcatgtccactacgcagccactaaggccgggcaaatgggcatggtaaaaacgctcgcccgcacgggagctccctacggcatcaccgtaaacgcagtcgcccccggaatagtagataccgaacttctgcacaaaacgcacggagacgaaggggtaaaagagcttgcaaaaaccattcctcttgggcttggaagcgtttacgatataggcaacgccgtcgcattcctctgctccgacgaggcgcactacattaccggcataacactcgacgtcaacggagggacttattttagataatatgccgtatcagataacatggctctctcagggcgggtttctatttgaatacgaaaatttgaggataatcgccgacccgtacatgtcggacgtgctttccgcgaggggttttgggaggatgagccctcccccgctttcgtacgaagaattgaagcccgactgggttttgttcacgcacgaccatatcgaccactttgacgaaacgagcgtgtcgggcatatgcagcatttatccaaaatgcaaatttgctgggccgcagagcacgatggaacatttttcgaagctcggattttccaacgaatttgagcttttgaaaaagggtacgccgctcaagttttccgaaagcgcatgcgcaattcctacccctgccttccacagcgaccaacatgccgtcgggctgcttttcgatttcggcggaaaacttgcgtggttgagcggcgacactctgttcgacccatctcttgcaaaatctgtaaatgagcttgcgggaggcaggaaaatatctgccgcaatgatatgcataaacggcaggctcggtaacatgaacgcgcaagaggctgcggaagtaatatcatctctgcgcccggagttggcgataccgatgcactttgggctatttgccggcaacacggcagaccccgaaccgtttgtagaagcgctcgaaaaagaaaatataaaaacgctcgtcgccgaggcgggcaaaccgtataaaattagctaaaaaatgaaagtaacgcaaattaagacatttatatgccatgcgtataggacaaattgggtgtttgtaaaagttattacagacagtgggctttacggcgtcggggaagcgactctcgaataccgcgagcctacggttgtccaggcaataaaggaattggaacgctacctcgttggcaaggatccgcacaacatagaggctttttggcacgacgcataccgcgacgcatattggaggggcggagtggttttgatgagcgcgctcgccggagtggaaatggccctgtgggacataaagggcaaagacctcggcgttcccgtctatcaactgcttggcggcaaggtgcgcgacagcgtaaagtgctacgcaaacgcttggtttgccggcgctaagaagcccgaagaatttgcgcaaaaggcaaagattgccgtaaagaacggttttagcggcttaaagtgggatccgttcggcaaggaatacctgaatatagaccccaagcacctaaacgaggcgctcgactgcatagcggcggtaaaggacgctgtcggcgaccaggttcatctgataatagaggggcacggcagattcaacgttcccactgccgtccgcataggcaacgcgctcgaaaaattcggaatactgtggtttgaagagccgattccgccggacgacaagaaaggcatagcatgggtaaggtcgaaaatagcgactcccgtatcaggcggcgaacgcctatacagccgttttgagtacgccgactacctcagaatggaatgcgccgatttctggcagcccgacgtttcgcatgcaggcggcataatggaagtgcgcaagatagccgcgatggcggagtcgcactacataccggtgtgcccgcacaatccgagcggcccggtcgccaacgccgcgaccctccagcttgcggcgtgcataccgaacttctacctgatcgaaaccatggcaaacgatattccgtggcgggcggacgtaagcacagaaaaggtaaaatttgagaatagcgagatgtttatacccgaccttcccggtctcggcatagacataaacgaagaggagattgccaaacatccgtacgaatgccgcaacctccgccactatgtcggaacgctaaccgatattcgcccggaaggttcaacgggatattttcaaaaataaccatatttttatcaaagcgggtgcaatagcgcccgcttttttttagcgcaaaatatatacgaaaaaaatatgcgcaaaaaacgctatttctaaaattctaaataaataggacaagacgcgcagatttattgagggtaaaaaacgggcaaaaacaaaaactgccacgctgctttaaagcgcaaagaaagtaacccctccgaagacgcaatacgtaaaaattgcttttgtatccgtaaaattgggcggcgcatacgaaaaaataaaaatgtccaactgcccgagataaaatggagcatatttaaaaaagtacaaaaagctaaatgagaattttaacatgcaataaaaagtatgaattgcgatttcatggcgcgcccatctggattgcgcgccaaaaaaatgctaaaactttttatcaagcgcggcaagaaagccgcgctcttgcaaacgcaggcatacagccaaattttaatcgacttcgccgcggataattttaagcaattcgggcgacaaaatttttctgttgtcgtcatcgacaaggctgaaacggttcccgtcgttcggcgtgctcaggtagttccatacgcaatactgaatgccgttttccttaagcatggaaattatatctctcatataattttcgcgcgagcgcatcggagcgtgcctgattgtgccgaattcaccgcaccaaagaattttgtcgggatgtttctttgcaaagtcgaaagcgggctggagcattttccgcaaggcctccttgtccatgcgcgcaagctttttataagagcccaagtcggcgccgacacactctctgtattccttatacggggcaatgtcggacgggtaatgcataaccctgttgtagaagagcggcggagcctgaagcaccccgcgctggtgggtaaattcaaatggttcgtagaaatggaacgtataaactatattcggatcgtcaaagagttttattctacccacggcggacggagaattccagtgcgtgccgccgataattataattctgtcggggtttagttttctaatttccgatacggcgcgcccggcgagcgaattccagtcgtccgccttgacgtccctaacctcgtttaggagctcaaacgctacatagtcatagcccgcaaaacgcttttcaaactccctccacagcgccacaaacctgtcttgcaactcggggctttcaaggagagtgacgtcctcttttatgtcgcaataattgccgagcgacttgtgcaggtttagcacaaggtttaaatcgtattttttgcaccacgaagcaaagcgttttattatttcaaaaatctcgtcgcggtacttgtagggcgactcctccaccacaatttggtcgaagccaagccttatgtggtcgagccccatatccgcgatgtttttaacgtcggcttcagttatgtacgagcggaagtgctccatgtcacccacagttattttcattctccatttgtcgggaagcacattgaagcgcttgtagttggtgagccagccgccgatgcccattccgcgttcaaatccattaaaaactgccctctccgcgcctgaggcaaagcccgcgcctgcgaaaattgcaaatgccgccaaaatcctaaaaaaagcctttctcgtaattttcatgcgccagaatctaaatttttttagtgcgccggtcaatttagtacgccacaatatttacgcaaccgttgcgctataaaatcctctgtttataagcttcaaattaaaatattgagcattttacataaaaattttaaagatttttcatggcgcggaatagaactgaaattgtgtcactcaaactgttggcgtccctcgctggcgtatcgaaaagctctgtatcaagatgcctttcgggcaagtgcggggtttcagaacaaacatcgtttaaaattagggaaattgcaaaaaaacttggttatacaaaaaacataccgctctcaaaggcgatgtcgcaaataagaagcggcggaatgcgcggaagcgaaacgatagcctttgtaaacgccaaacctgtccgcgatttaaaggcttattctgcggtatcaagatacgtcgctgcggcgagaaaatccgccgaaaaatacggatactgcgtatgcgacatatggctgtgcgaaaaaaatttcaccgcgcaaaaatttgagaatctgcttttcacgcgcggaatccgcggcggcataatattcgggcactactacaaaaacagcattcccgacggtttttgcagcgcggtgaaaaagctaaaattcgtatccatgggagttaattcaaacgcccccgtaaaaggctccatattcatggacagattcctgctcgtaaaaggttttgtaaaaaaaatttttaagctcggattcgatagagtcggattcgtcatagaaaaattcgccgacaaatacgaagacggcaaattttctggcggttttttatcggcgcagcttgaacgcgggaaaagaaatataattccgccgcactactggggaaaatcggacttaaaaaacgccgaagagttgtcagcatacgtccgccggcacaggctcgacgccctattctgctactccaccgacatttctgacatcatatcaaaaaatccgcctatcggcgcaaaaattttccactacgacgaaaggtttgccgaaaagcataccccgcgcatatcaaaccaaaagcaagtcggcaaagaagccgtaaaaatgctttctgaaatgctttcatcacacggcggggagatttgctccccaaaacagctttcgctcaccccggagtggagccgcaaaaattcctaaacagaaatttaaatcccccaccccgacgcgggctttatcgccttctgctactccgccggcattttttgaatcatatcaaaaaatccatctcttggctcgggtccagcagcgctcgcccctcctttatattgagggaacgcgtcgcttccctcaaacctatgcttcgagtacggaagcgactattgacggaaccggaattttagcccccaagagcctgtcgcgcaaaagggcgtcaatccactgcctgtcgcacgatatatcggttatttcgagaatttttttgtcgccctttgtggatattgcgtacttgccgatgttcaccgtaattggcgcgctttcccctgcgagggttgccgtcacgcggcacgacgcgttttctgcgttcaagtccaccgaaaacgccccgtcctggaaatatttcggatacttgttttttacatatccttctatcgccatagatttaaatttgttcatcataatatcaccttctcgaatttttaattttttcgtacgcttcgttgaggcgtttgagctccgactccatcgcctctatcgcgtattctccaacgccttttgagcgcaatatgtcggggtggagctccttgcattttgccctgtaaacctttttgacttcttcaatcggcgtgtcgaatggcagtccgagagtcgcatacgcctccatgagttcgccgttggggacctcctgccttcgcccgtactcatcgccacccaagccgggaaattttgaagcatttacgccaagctctgcggcagcctcgattagcgcctcgcgctcgcgcccattgagggttccgtcgctaagcgccaccctcaaaagcataataaaaaacccctcatgcgcctcgtagttcggaaatacggcgcaaaatctgcgcgccacactccccagagtttcattggaattcttcgagcgcctgaaatggccaacagccttcgcgcgggtatcggaatcgagtctcagctcgacaaatattttttcgatttccgatatttccgcctcgctcaccctgccgtcggcttttgcgatttttgaaatgccttcgcacgcaagctctataaatttagagcgcgccgcaagcgacacttcggaagaatctgcgacggaatcgcacacatgcccaatcgcgacgccaagcgcaatcccaaacggcccgccaaaacacgctcccaaaatgccgcctattagtttgcctttaagcttcatattgtttcctttccgaaacctctattttgcggcgcgcgcaaatgctttctatgacaagctttacttggcgcgccaacttagaatccggagtgtagtcagccataacagcgtagttaaccctgttttcgtcgagtagcctgtgggcctttttgcgcttgtcgggcgagccgtcgtgcaccgctatcgagtacccgccctgggtctttacgagtttcattgccggaatatccgtggtgccgtcgccaaagtatatcattctgcgaaatgggacggggcgggtatcctctggcatatagccgtttattgaatcctgtatattgaatatccctttgtttatgcggaatagaaattgcatttttgtcgtgtaattaacggcaagcgacggccagaacgccgctccgtccgcgccgtacataaagctcgacgcgtatattttgtcgaattttgaggctattgcagttccctctatcatttcccgtatgccggaggaaattatgtaatgttttaccacagccccgtattgcgccccaaaggcgtttatatgctcaaaccagtcttcggagccttcgcagacgagcccgtcgaaaaattttacgctcctgccaaactccataaaatcttcgcgccttattttaacgtccgcctcgcgcgcctccttgcacattaggtacatgtacgcaaggatgtcgtcggcgtcctgtttgcgggcaagggcgcaagtgcgctcccaaaaatcctgcggaggagtttgaagctttgggaagaaggcgtattcctgcatgtttgtcggcgacagcgtgccgtcgaaatcatagcatagggctatcgtaaaactgtcgggacttttttccattgccgttttatcaaatacattttttctccgtttgcaagacacaagcgggacatttaatttgcatttgcccgctatttagaaatgagttcaagcaacctccttttttgccgttattttatcgattcttttgcctgcctaactgccgctattttgcctgaacgcgaattgttttagtgccgattaaattaggttctgcaataaactcaaaagatttccatataacggcgccgcacaggcaggccgcaacggctttgcaatctgagcgttttgcgagcgcaagaaggcagacataaaaattttagaagccctccgcattgcgaatttccgagacgcattgcgaaattccgagcgcacaatttttttaagacaaaaaatatttcagccagaaattttatattcacattgcctctcttggcgacacagagaggtaattcatctaccccgtttcctctattcggatattttgtgatttgcatctacgcaagcttggcaatccatacagcttgcgaagtgcacaaaataagttatagcaaaacaaatgaatacagccgtatgcgctatatcaaaccgtaccccaatcgcacggaaattatgtcggcgtaagagcggaccttcgcgccgatttcatcgaattggctttccttaatgcgttcgccgggaccggtaatccatatagacgctatcgggtatccgtgggcatcgaaaatcggggccccaacgcaatttacgccctctatttcttcgccgttatccaccgaatagccttttgcccttactttttcaagctccgccaaaaagctttttttgtcgagtatggttctcgggttaaattttttaaatttcatcgccgatatgcgcctgtcaagctcctctttcggcaagaacgcaagcattgcctttcccggagccgaagcattgaaacaaatgcgcattcccacttccccgagaaatttaaacgggtatctgccgggagcctgctcaagcaaaacgcaatcctcctcaagcattgttccgagcatcgcggtctccgccaaatcgtcgcgcatttttctcaaaacatccattgcgcgctcaacaatgttcgactccccaaaagccgcataccccaaagccgccagcttgcgcgacattcttattttgcggtggtctttattttttaggacatacccgcagtcttcgagagtgcatattatcctaaatatgctgttcttggaatatccggtaatgcgggctatttcagaaagagtaatcccgtcggtattttttgcgagcacttcaaatacttcgagcgccctttttaagtttggtatatggtatctctggtgagttgttgccactacggggtgttgcataataatattctctattttttgttatatatatcaaactcaacaaatcaaatcgccgtcattttagtcaataaaaaaacgcggtatttcagcgcgccgcatttttagcaaatctgcataaacgcagtcaccaaacctgtcgaattgccgattttcgccgcacgcaacaaaaaatctttccgcaaggcttttgcagaaaaattacctttaagttacttttatgcttttaaattttataaaaaaaacggcaaaatttcggcgcactccaaacctaaaactcgcaaaaaaaatgacctctataatgcccaaaatattattccctgccacactgcaaaatttttaacgcggtagccggcatcaaacgccgcggtattgtaagacattcggaaatttagcgcatagacaccgcgcgtacaagcgccaaattgcggcgagcacaaccgccttcagcagtgttttgcccataaaaaaatgtaattgcaatgagggccgccggcatttttacaacccggcagccctccgctgaaaaatacaattagaatccgacggacggatttgtgtacctattgttgtcgttggaatggaaagttccgtactctgtgacgacagccccttccggaccggcgatctgataatgccttgcgcctattctgcccatccataccacattgccctttttagcatcggcaaccgacactttgtgtacggtaatgaatttcttctggctttcgggaacttttacgtcgggatatttcgatgcgtcctctccgttttcgccgaagcagtacgaagttcccgcgcgcgcctgccagcattcgtttttagccggcagcccattgcccgccacatggtagtgctctatgagcatctggttggggagcaggagtatttcgtggccgaaaacaccgtgcacgttttcttgcgcccagaaaattccgcccatgccgaccgcggggaaatccccgagggcgaagtcggacacccacatattttcgcgcaaattgtcgcttatcggataaccgagattttccatcatttcgatataggctttctttgcggcagcctcgtcgaattttccgtctttatagaacatttctttcgtaagtttcatattattcttagcctcattagaattgcattgtccggctattttcgcctgagatcccgcagaattatttccacccgcagaacctgcgcacgacacaaccgcaacgctcgcgcaaatcgccatggccgcgcttgcaatagcctttattttatggaatttattattcataaatattacctttttacaatttgaaaatccaaaggcaggggttttgtgtccctgggtttgtattccgggagggcgtctgccttcttaaacattttggcagccttttgtgcgtcgttgattacaagcctaatgccgacattgtagactttctgccacgggcggtattcgcgccttaaagacgcgcgcgcaaacttcattctgtcgcgccacgagccgccgcgcaccaccttgcgatcctctactttctttccgccgagagtctcggtgtagtcgtcctgcgtccattccgcgacattgccctgcatgtcatacaatccgaatgcgtttggagcgtacaagccgctctttaccgcaagcaggtttccgtcgtcaacatgcctgtcagcgggcatattgtcgataaacttgtcggggcggactctcggctggggatctatgccgcttacggcaaatttcttcgcgttgaaatccataaggttttcatagtttccgaaatcgtcgccaacttttccgaaccaaaagtcgtctgcgcttcccgcgcgggccgcccattcccactgtttttcggtggggagcgaaacctcaatgccagccttttccgacagccatttgcagaagtcgcgcgcctcgttccaagatacgcgcacaacgctctgctccggaagattcgaaggataaccgggattgacatggtctttccacagcctgtcctggaagccggaatcgtgcgatttgtcgaacagggaatattgggcgttgcttacctcaaactgccccatatagaacggtttttcgaccttttctagttttgctgggccctcgtcgtagaagccgctgtttgagcccattacgaaagtaccggcgggaacgagcgtaaagcgcatctggactccatctttcattgggactaagatttctttcgggagtccggcagcggcgattttccgccccgcctcttctttatcgaacgggaagccttccgctttcggggccggctgcgaatgtttcggagcctcgccgggctttacaaattccctgacgccgccgtcgtaatttatcacattggggtcgtcgtggcggttggcgtattttgcgaggaagaacttcctgcgctcgtagccgttgtacttcacttcgggatatatttccttccaagttcctatgcaaggcacgttcaaatccacccatgtaatgagaatagacatcgactcggggtcgagctttacgccattgtgcccctttttaagcatctggataagttcgctcgtgtccgcgtggaattcgagcggcgaaagcaggcgctggttgctttcggggccagagcggcgcacaaacttgctgaggtttaaatacgactccgggaagtttttccatatcttggggtttttgcgcgacaaattcggaatgtccgcgtttgtatccggattgtggcagcccgcgcaatattggtcgagaactggctggacgtcgcgaacgaaggagtatccgcgcaccggcgctatgaactgctttatttccgatgggcgctttctcgcggccattgcgggcgccgtcgatggagtcattccctgcccctcgtggcagccaacgcaactttgcgtttcgccaggcataaccgtaaaccagctgcgcatgagcgcaagcgccttgccctcggcgtcaagcggctgtatcgcaatcggcctattggcgggtactttgaacatcgcagagccgtcgggctcgacggggacagtgccgtgtatgcgctttacgtcccacgatgcttcgttgccgattatgtcgtggcttccgatttcgcggtagcaataaaaatactcaaaaattctaagagccttcaccgttccgcgcggaacacccttcaaaccgggcccctggtatatgtcgttgaggaaaacgtatccatagtcgatatcggggttggtcttgtccataatctcgttgggcagcttgcgcggctcgacgggaacgggttcaaacaggtaacctttgttcgtgctttcgatgagagtcatgttgtcgaaggcatcgacaaggtaaataccctgcggataatctccgtgcgcgaatacggaagccataatatacttttccgagagcggatacggatgcagaagcaaaggagattttccgtcgacaagcctgtcctttatttccgctttatactcccttccgtaagaggggtatttatggactctgccgctatcctctatcgtgcccttagagacgtcgaaaaggtggagttcgcccttgcgcgcagtgccgtggtggccggaaactatgccgacaaacttgtttgggtctcccggaatttggcggcaatagaaaagcgagttaggccagtagctcgtcgagccgtagaatgacgactgcgcggttccgtcgggattcatgtgcatgagtatgcgcgaaaaatagtgcgagttgtccgtatattcccagcgggtgtagaggacacgcccgttttcgagcattgtcggagtccagtcggcatcctgttcgaatgtgagctggcgtatcgactcgtcgatttctttttcggagccggcgttggggtccatggaatagaggtttgcaacccagtctgttccttcgacgcacggcactccaacatgggttgcagtggagcagaatattatttttccgtcgggagtatacgcgccgtcgtagacgtctatatcgtcgtaaaggcgcggggaaacctgccgcgttttttgcgttgcaacgtcgaattcgtcgagctgccagcagactttgtcgtccactgtggaatacaatatttttgtgccgtcgtacgaaacatctatgtcggcaactgcgctgttgggcgcgagcgcgagctttccggcgccgggcttggagatgtcgtcggtaatccacagttcgtccttaaaatcttgggactttatcttgcccttgtgccatccggcacttgtgagcgacgtattcccctgccaattttgcggaagccccatgccccgcgttccccacgggcggaatatgtacgcccacttcgggtgctttttaaggagaggattggccaaaagcgactgggcggcaaattttttaaattccgcagcctgggctttcgcgttcgcgtcgtttttgaaaagccccgcttttatggaggggatttttttctcccactcggcgagttttgagaaatctcctgcgtagtcggggaaggattttttcatatcctccattgccgcgcgcacgtttgcgacatcgtacccgagctcattttcaacgcgccttgtttcaatcatatcctccaacagctttacgcgctcggcgtc

SEQ ID NO: 2278 - DNA, 15023 bp, Unknown
  16S sequences of unknown bacteria
acggtgtcggctggtgcgctccccagcagggtgcttgtaagctttcgctcaacgtcaaaaacggcgttatcgaggaggctcttgtcgagacggtaggatgttccggcatgacccattcggcagcaatggcggccgagattcttcccggaaaaaccgttcttgaggctcttaacaccgacctcgtttgcgacgctatcaacaccgcaatgcgcgaactgttccttcagatagtttacggccgtacccagtctgcattttccgatgacggtcttgttatcggcgccggcatggaagatctcggcaagggtgcccgttccatggtcggaaccatgtacggcacaaaggataagggtgttcgttatctcgaaatgaccgaaggttactgcacaagaatggctctcgacgaaaacggcgaggtcatcggctatgagtttgtttccctcggaaaaatgaccgacttcatcaaaaaaggcatggaacccaacgaggcatacaagaagtctatgggtacctacggcagatttgacgaggccgccaaatatatcgacccgagaaaagaataagaaggaggaaaattctaatggcacagtttgaaggttatgaaagacgcgaggccaaaatcctcgagactttaaagaaatacggaatttcctccattgacgaatgcaaggaaattaccaccgcaaagggtatcgacgttgaccagatcgttcgttcgactcagcccatttgctttgaaaatgccatttgggcatacaccgtcggttgcgctatcgccatcaaaaagggctgcgtaaaggctgccgatgccgccgccgcaatcggtgagggacttcagtccttctgcattcccggttcggttgccgaaaaccgcaaggtcggtctcggccacggaaatctcggtaaaatgcttctttccgaagaaaccgagtgcttctgcttcctcgccggccacgagtcttttgctgccgccgagggcgctatcaaaatcgctcttaacgccaacaaggtcagaaacaaggaccttcgcgttatccttaacggactcggaaaagacgccgcttatatcatctcgagaatcaacggcttcacctattgcgaaaccgagtttgacccctataccgagcaggttaacgttaaagaggaaatcgcattttccaagggcgaccgcgccaaggtcaaatgctacggagcagacaatgttcccgagggcgttgccattatgaagcttgagaacgtcggcgtttccatcaccggtaactccaccaaccccacccgtttccagcatcccgttgcaggtacctataaaaaatggtgcaccgaaaacggcgtgaagtatttctcggttgcttcgggcggcggtaccggacgtaccctccatcccgacaacatgggcgcaggtccttccagctacggcatgaccgacaccatgggacgtatgcattccgacgcacagttcgccggttcttcctccgttcccgcacacgttgagatgatgggtctcatcggcatgggcaacaaccccatggtcggtgccaccgttgcttgtgcggttgccgttgaagaggcttccaaataagtcatttcacaaaaattaagaccgtcttatccagacggtctttttttatactgtaactgttctaatgctctttatggcgtttttttcaaggcggctgacctgcgcttgggaaattccgatttgttttgccacctcgacctgcgttttacccttaaggaatcttaaataaagaatttgcttttcccttttgcccagtttttgcattgcgtctctgagcattattccttcaagccagcttttgtcgtcgtttttatcccctatctgatcctcaacataaattgtgtctcccccgtcggaaaaaacaggctcgcttaatgaaagcgggtcgacaatgctctcaagcgcgattacgatttcctctttcggcagtttcatctcggcggctatttcctcaattttcggctcgcgttgaagtttcatctgaagcttttccttaacgcgcattgcatgataggcggtatcccttatcgagcgtgatactctaagctggccgttgtcgcgaagaaagcgccgcagctctcccaaaatcatgggtacggcataggtggaaaatttcacgtcgatgtcaagattaaaacggtcgattgccttgataaggccgatgcacccaacctgaaacagatcgtcgggattttccccgcgggaggaaaatttctgtactgcgctgagcacaagccgcaaattgcattttataagcttgtcccgcgcggcagagtctccattatgcgccttctttaaaagctcgattttctcactttccttaagcaccgtgagcttggatgtgtcgaccccgcaaatttccaccctgctgtattgcataatattaccgccttttttgttgtcggtaatattattgtcagaagtgaaaaaaagatacattcggatttttattttaaaacatataaaatccataatttatgcaatttaaccatttaatggtttcagtttgactctgattgtcaaattatacaaaacacaaatacttttaaaaaaagcattgatttatactgtaaaaagtagtataatttgatggtaaaaaacaagcgggggtgtgccttttgagtgatgtaggcaaaaaaacatctgtaatgaaaattgttattatcgctctttccgttttgcttgcggtgagcattgcggcgctcggaatcgttatcgtgaaaagcaacaaacgttccgaagtgtccgtttcgggagaaaatataatcaccgacaaggaggaaaccacgggaacatcaaaaaacattcccatgatgattgacgcgtttcccgcaatctttgctgcaaaaagcgtccccggaaacagaacggtcatttccttcagcaccgaaaacaccgaggaaactcttcccttctcggttgcaaatatgttccccggcgattcggaaaacaaggaattcaacgttgaagtttcccacaaggacagcgtgacacttcattttcatgctgacgtgcgcgaagggtatgaaaagcttgccgaggttatgatggtcaaaataagcgagctttcctccggcgagaccctttatgacggcctgatgaaggatatgccctcatcggttgacagagtactttcgggcgccgaaaaaaccgatgggcttgtatacagcataacggcataccttaacacctccgtcaacaatgattatatgaacaaagagcttgttgccgatttcagatggtggattgaagaggatgatgttaaaaatcttgacactccgccaaaaacctttgatgtatttaccgtcggaattccggcggcgctcatcgttgcttcggttgttgtgtttattgttatgaaaaagcgcaggagggataccgaaaatgtctgaaaagtcaattcagaaaaaaatcaaagcgcagatcattacaataattgttcttttgctttgccttataattaccacctttgcgcttgtctactccaccctgactcttgaggacaactatttcaaaaccggtcttgtggacataaatttaaacgacggaaaacccgttatttcggaacatgaatttttgtttgaaccgggtatgacagtcaaaaaggatttctttatcgaaaataacagtacctggtcggtttattacaagctttattttgaccatgttgacggcggtcttgccgatgtgcttgaaataaccgtcaaggacggagacgacaccttatacagcggaaccgccgcttccctttcgagagaaaaatccgccgtttgcgacgacgttctgtcggtaagccaaaagaaaagtctttcgatttatttccattatcccgaaggtgccggaaacaaaactcaggaccagacactgacctttgatttctgcgccgacggtgtacaaacaaaaaacaatccgcaaaaatctttttcttaacatatttattttaggagagaaaataaatgaaaaaggctttgaacattgtaaaaaacatacttgtgtggctcgttgttgtctttgcggtgcttatgatggtgtttaccgttgtgtcggtgaatacattcgaccgctccgatagaagtctttttggatataaggcgtttattgtcctgtccgactccatgaaagccaccgattttgacgccggcgaccttgttcttgtcaaagcggttgaccccgcaacgcttgaggagggcgacattatcgcatacacctcacaaaacacctccaacttcggcgagacggtgacccataaaatccgcactttaacggtcgacgaaaacggcaatcccggatttatcacctacggtactaccaccgataccgacgatgaaaccattgtaacctatgattttgttatcggaaaatatcagacaaaattaaagggtgtcggttccttcttccaattcctcaaaacaacgcccggatacatctgctgcatttttgttccatttgctcttcttatacttgttcagggcataaactgtatcagactgttcaagcgttataagagcgagcaatattccgaaattgaggccgagcgccaaaagcttgagcaggaacgcgccgaatctcagaaaatgatgagcgagcttttggagctaaaaaaacagctgcaggacagcgacgctcaaccctccgaaacagacggcgccgcagtttccgccgacgacaactcatccgaccaaagcaaataattttcctgttttaaaacacgaaaggagtcgagcttaagtgtccgacaaaggttttgttgaaaaacttttatatgtcccgaagcatgccgaaccggagaaaccggataaaatcatggctatgattatgccttcgataatcggtatcgtgctttgtcttgcctgtcttttcggattgacatgggcgtggtttaccaccgccgccacaagcaaaacaagcgccgtggctttttctaagttcgattataccgtctctgttgccaaagtgacgacggatgaaaacaatgttaaacaggaaaccgccgttgcctgcacctcaacaagtgaggaaaccgaaaaaggaatttttaaattttattttgaggctgacaccgactatacaataacctttgccgtcaccgaaagcaacacggccaacggatattacacccttgaaaaggacggcacaaagtattatgtcggtcccgtaaccaccgaaaacatcgcctcctccccctttgtcagaagtattcggcccggtcaaagcggtgaatacattttgaccgcgcaatggggctctcatgcgggagggtataatttacccgaagtgaccgcgctttatgccgtaaattaaaatttaaattaagcatactaaaaaaagcctttgagtttttctcaaaggctttaaatattttgcagctcctttttcagcatggaaattatttttttctcaagccgtgaaatgtaggattgagatatgttcatgctgtcagccacctgtttttgcgtgtgctccctttgcccgtcgaggccgaaccgcatatacattatttctctgtcgcgcttcggcagtttatcgagaacaatgcgcagcatcctgcattcgtcgtccctttcgacgttcattcccaccatatccgggtcggaaccgagcacgtcggaaagcagcagctcgttgccgtcccaatcggtattcaacggctcgtcaagagaaagctcgcccttaagctgtgaattctttcgtatgaacataagaatttcgttttcaatgcaccttgaggcatatgttgcaagctttatgtttttttcgggtgaataggtctttaccgccttaataagtccgattgttccgatagaaattaagtcctcgattcctgcaccggcaacgtcaaattttcttgcgatatatacgacaaggcgcagattgtgagttataagctcttccctgacgccttcatctccgtccttaagcttttccataagactcgcttcctcctcctttgaaagcggcggaggaagggttgacgaaccgaatatgtaatctattctgttcggttgaaaaagtttaagcttaatttttaatatcagccgtttcagtttgtttttcatgttgctttatcctttcaatcacattttttccgaatataacgctgtaatcccctgccaaatcgtcgcttacggcaagcagacaatcatctgacgagccgcaaaatttttttgactttactgttatgccgtccggaacaaaggccggcaaaattccctttccgcctaccacgctgtagggtatgtagcgaaatccattcaaattttgggctgtgcagtttaagctgtcggtaaaaaccgaaagctcctttgccgcattgccgcttattataattaccgggcgctgtgaaaacgaatcgtagagcagatttcccgtgtcaagaaagcccttaaaatccttggttgctccattgtgatttataatcacatcatattcgcacgtctccaaatcgttttttacaaagtgctttttcaaaatccataaaatcacatagcaaattgccgctgtcgatacaagtacaataggtgaaatatcaaaataaaccacatcgttttttataatcatttttgacggcttaaaagctgtccaaattccaaagcatatccccgcataagcaaatgaaacagaaaaaaaaccgcccacaatccccacaaatcttctgagatttccgaatccgaaggctgctaacaccaccgtagatgaaacggccaatctcagcgcaattgaaaacactacccctaattcgggaagaaaaattgcaagtgagcaaagcgacgcagcaatgtcggatataatcattcttatgggttttattttttccttgcaaattttttcggtggccgaaagaatgaaaaaatttactatcatattgacaaacacaagcaaatccacatagatgattttcattgccgctcccctctttacaaaaaaattatacccccgcggctcggctttttcggtcgaaccgcaggggtataaattatatttatgtgtcgatattattggcttgaggcctcatcggcgtcaacccattcatactcgctttctttataagcgtcaaatgcgggtttgcttattggctcaatgtcaacatattgaccgcccttgggctcgggcattgagctgctgtcgcgaagggtgctgccatgctcgcaaacaggcgtgtaatcatccttaaaatagcccatggatgtggaaccgcaggccgttgtggcggcgcttcccgttgaggtgcagtaggcgcgatagctcacggtatccgaaacgcggaagtcgcaaagggacttgcccttgagaattttttccatggttgttctccaaattacgggagaaggattatatccgtcgcggacgttttgcgaaatgtcataaccgcaccaaacgccgctgacataatagggcgagccgcccacaaaccaaaagtcgtggttgttatcagtcgtaccggtcttgccgtagagcggccaatcgccgatttgggctcttgttccggtaccgtcctcaacaacggtttggagaattttattcatgatcgtggaggtatcggagctgataacctgcgagccctgctcatcctgctcaagaacgacatttccgaaggtatcgtaaacgacggtataggtcgtgggagcataatacacaccgccgttgccgaaggtggcaaaagcagccgtcatttcggtgaccgaaattccgttgaccgttccgcccagagccattgaagaataggtcttatcggtatgaataccgccgttttcatcctcatagctgtccacaagggtggaaattccgaaacgtcttgtcaaaaagtcgaaacaggtgtcgacgccgagcttgtcggccatacggacggccgtcgcattgtaagaattctgaacggcgtactgaacagttacataagaaccggttccgctcttttcgggataataggaattaccgatttgaaggtggaaatcgtataattttgaagaataggtgattatattgttttctattcccggagcataaaccgaaaggggctttatactcgaaccgggctgacgggtcgttccgtaggcacggttgagcgagcggttttcggtcttttcccctcttccgcccacaattccaacaatgtgaccggtgtaatccataatgcattgagcggcttgaggacgttctccgcttccgttcatggggaaaagctcgtcattttggaaggacttttcaaggctttcctgaacctgcttattcatggtggagtaaaccttaagtccgcccgaataaatcatgctttcggcctcggaataggaatagtcatactttttctgaaggtcgcttatgacattttcgatgacggtatcggtaaaatagttgttgattttacttttgcttgcggggttgtcggtatcggtgggaagatcgcccgcgctgctggccaaaacaagggtttcggacatggcctggtcatattcagccttggtaatatatcccgcgttgagcatttctttaagacagatctcgcggcgttccttgttctcttcgggaccgtcgatgggatttttaacattaggggtctgaatggtggccgcaagagatgcacactcaagaagggtcaggtcctttgcttccttgttaaaataatactttgcggcagtttcaataccgtcgcagccgttgccgaaatgcacggtatttatataacactcgataatggtggattttgtatatttgctttcaaggtttcttgcgcggacaatttctcttatcttacggtcggaggtctgctcgttatctttggtaaggtttttaacaagctgctgggttatggttgaaccgccctgcctgtcgccgtagaaatcaaagaacatattcaaaaacgcactaaatgtacgcttccagtcaacgccctcgtggtcgtaaaaacgtttgtcctcaatggaaacaatggcattttcaagatacggcgaaaaatccttggcgtcgacccaaatgcggttttcggttccgtggaagcttgccatttcataatattgctcgatgtcggtatcgtatgcgtaaacaatacttgtatactgaagctcgagattattaagatcataaggaatgtcgccgtcgataaatgcgaagacataaattccgaatgctccggtaacgagacaaacggttattatgcaaatgaggaagagagacaagaaagttctcttaatgcgccccattttcttcttctttttcttacggctctttgagcttttggcgcgcccgacgggaacatcttccctctttttgtcggttcccgacggacgaccgctgtaaatttcgtcggtatcgttaaaagaacggccgctgtcaatttcggaagacgaaaaaatgtcgttgtcctgatttttaagtatggaatttatactccacggatcagacggattgccggaagaagtgttatccggaacaccgttttgtccgccgtatttacccttttcattaaagtcgctcacttatatgtagcctccaatcaagtcggtaaaacttttcggagatattataccacagtctttgccaaatgtgtgtaacaattttttaaacaaaggcgattattttcattttttcggggaaaaataaccccaataaaggggctgagagaatgaaaataaaatcaaaagtctttgaaattgcttttttggcaattgctttaattttcgccgtgattttattgacttcaattttaagttctccgcatcggcaaagcaccgaaatttccgactcacaacaaaccgaattgccgaaatatatcatgaaaacctataacgacattataggtgtttaccgtttcggtgaggacgagcctttcaaactgctaaatgtcacggtggaaaagcttccgaaaaacgacatatcggcactaaacagcggaatagagattttcaccgacgatgagcttttttcattgaccgaggattttagctaagggacgtgcaaaagatttaatcttaaatcataaaatatatcggtgataaaaatgataagctatataatcggaattcttctttcaaacatcgcatactttgcccttcacattacaaacggcggaggtttcccccgccctctttcggaaaaagaagaaagtgaggcaatcgagcaaatgaaaaatggcgacagggcagccagagaaaagcttattgaacacaatcttcgccttgtggctcatcttgcgaagaaatattattcggtcagcaaggacaccgacgacctgatttcggtgggaacagtgggccttataaaaggtattgattcctttaacagcgagaaaaactaccgtttggtaacatatatctcacggtgcatagaaaacgaaattctcatgagccttcgcctgcggaagaaatccagtcaggacgtttatatgaacgatccccttgattacgacaaaagcggcaatcccctcactcttgtggatattatcgccgaggacgacaacatcgtggagaaaatcgacagcaaaatcaaaatttcaaagcttgcggaatacatagatatgtgcctttctccgaaagagaaaaaaattatatgcgaaagatacggggtgttcggcagccccgaacggacgcaaaatgaaattgccaaggaccttggaatttcgaggtcttatgtttcgagaattgaaaaaagagcgctgaaaacgctctttaatcggtatgaggggcattaaattcggtctgcaaccgcttcaacggcctttctgacgctgtttacgccgataaccgtcatgccttcgggaatatatgtgagattttttttgtttgaataagggatgatacagcaatcaaatccgagtctcgcagcctcgtttatacgttcggaggcacggctgacccctctaatctcacctgccaaaccgatttctccgaaacagagaagcttgtcgggaataaccaaatccttaagacttgaaacaagcgccatcgcaaccgtcaaatcggccgcaggctcgtcgattttcagtcctccgacaatgttgacatatgcgtcaagattggaaaagaaataacccgcccgtttttcaagcaccgcaagcagcacattcatacggttatagtcaaaacccgtcgacatacgtctcgggttgccgaaatttgtggaggaaacaagcgcctgcacctcggcaagaattggtctggttccctcaattgcgcaggcaacgcaggttcccgcggcgtttttcggacgtcccgagagaagcatggacgaaggattttccacctggcacagcccgtcctcggtcatctcgaaaacacctatttcgttggtcgaaccgaaacggttttttaccgctcgaagaattctgtaagacaggttgcgttcgccttcaaaataaagcacggcatccacaatgtgctcaagaacctttgggcctgcaatggctccgtccttgttaacgtggccgacgataaagaaaggaatgtcgttttccttggcagtatgcaaaaaggcatttgtcgattcgcgaatttgaggaacgcttccgggagaagaattaagctgggagagattcatggtctgaatcgaatctataatgaccgcgtcgggtcggttgcggttaatataatcaacaatcgacaaaacatcggtcgaacacatgacagagagattatcacccgtaacgccgaggcggtttgcacgcagcttaatctggcgcgaggactcctcacccgaaacataaagaacattaagttcggaaagcttttggcatatttgaagcattatcgtggacttaccgattcccgggtcgccggaaatcaacataactgctcccttgacaattccgccgccgagaacgcggtcaagctcggaaaatcccgttttatacctatgctcgcccgtggaggaaatttccgaaagcttcattgcacgggcgtcggaggacggctttgcggccgaagggcttttggagggggcagcggaaaccgaaataccctcctgcatggtgttccattcaccgcaggaaggacattgaccgctccattttggggcttcgtatccgcaattttcacaaatataaacagattttgatttttgtgccattacattcaccgtttttaaagttctatttttcctaccgcaatctgcagcaccgttaaggcatcggacggcgtgacctgtccgttgtcatgcacatctgcggcataaaaagcaagatcgtcaagctgaattttacccaccgaatgttggagcgaaagcagcgcgtcgccgaccgtcacctttccgttaagatcgacgtcgccctttattatactcttgaaggattcaaaggtttcatttgaggagattaaaatgtcggtcagctcataaaaaccgtcgttctcgatgtttataaacccgctaagccgttcttttgcctcaaaagcggactcaatagtcgactcagacctgccgtttacccttcctatggatttaacagccgcgtcaaaggcggtttcggcggtttttctgttttcggcatagttttgggaaacaagagcaagatttttaatcgaaaaatcccccgaatttgtttgagcaaaatgaagcaaattcacattgtcaaggctgaattccgaagatccctgcgccgccgatggtgaaatgtcggaaattttaatttctattctctgccattttccgcccgaaagctcgacttcggcacaatactgccactccatgttgtttttttcatttcccgccgaaacaacaagggtattgtcgttttgtgaaaagacaagggcttccaacaagtaatattttgaaaaattataatatttcgtataatccccgtcgccgtaatttcttccgacgcggcaataaaaaagattgtaaagcgcgtctttcccgggaaacgtgttgcttttcgaggaaggaacaacggtgattgcggaattttgaacgccgtggaagttttggcaaaaatcaaaaacatcgtcgctgtccttttcgcagctgcaaagtatatcacagtcggagggaaaaacaggctttgaattgtcctcaggctctttcggttcggccgcctcaatctgttccataagggaaattataagatttccgtaattgtcgtttcccgcagatgtccatccgcgaagtcctcgatgggcatcgtcggtatattcgatttgattgccgcatcgaccgtagagatatgaaaaatgacgcggatcgtatgtatcggccctcgggtaaccgggagcaccggcataaagagccaaatggtcaagatgagcggaaatgcccgtctgccaatcggggaaacgtttgtgcgcgtcgggttcgcggtcgctgtcggtgaaaccgcttgtgtcggtcaccttaagcccgcagggattatgaaaagaggcgtcgattattccgccgaattttccgtagcctgtttcaaccgccgcctgacaataggccatgacgggatttattccgatttccggtgcctgctgccaataaatttttgcaagggaaacaaattcatcggtggcgccccttcctctcgcccaactttcggccgtttcaagggaggcggtggggctgctcattatcggtgtcacgccgttggagtttttttgagcaaatacgggacagcacaacagccaaaataccgaaagagaaacaagcagagaaacggtttttttacaggtccttttcataacaaacgtcctttcccttatatctaatccgatgtgccgtcaaagtcaagcactccgttaagaatacaaaagcaaagctttttttgatattccgccgacaaaaggtccgaaagctcgtcggcatttgaaataaagccgcactcgaccataactgccggcttttgcgaatgaaaaagaagatatatttccttgccgaccgcctttatctgacggtcgttttgtggctgcagcagccttgacacatccgactgaatacagcaagcaaggctgttgctcaacggattatttgaagaataaaacacctgtgttccgctgtattttggatttgaaaacttattttgatgtatgctcagaagtatcgaattttccgcctgttcggaaatctcaaggcgttttttaatgtcgctgcgtttggcgtccctgacgctgtcgttatccaggttgccgatgagattgtcgtcgctccttgtcattatgacattatagccgaaggcatttagaaaatccgaaagacattcggaaaccgaaaggttaatatccttttcaaaaattccttcggccgatacggcccccgggtctattcctccgtgccccgcgtcgacgacaactgttttaaggctttgctctgcggcaaaggattccgccgacatgattttcggcacctttataaccgaaagaatgacacagaaaagaatcaaagccgaaagaactccgaaacaaagtgtttttgctgttttattcatatatttcacccgctaaaaaatattcggcgggcgaaaattttagtacagcaaaggccgggctaccaaagcttgcgttctcttcttgcctttttgtcaataagcttttgcttatgcttttcacgggactcgggagtgcgatagattattttgtcgattatggaataatcataataaccgaggcgatatgaaaagccagcaatgagaggcataataaggcttgtgagggcaacggcaaaaacggcaaaaatagactgctcggcgcccgtgagcgtttgcggcatgagggtcaaaaggaagggataaaacggggcgtttaaaatgccgtataccgccgtatagactctcggaagcacctcggcctttgcgagaacaagcaatataatcgtgagaaaatcgggaacggcagccaaaaatcccgccttaaaacctctgttcaaatcctcgtttaaagcgcctgacagagtgcggtttctgtccttgtttccgacctcaaaggaggtggaaaagattatgacggcgagaataataaggtcaaaaatttgggtaatgaccgttcctgcctttcccctcaccgccataaagaaggtgaagaaaagcagaaagcaaaacagctttgacacaaga

SEQ ID NO: 2279 - DNA, 1614 bp, Unknown
  16S sequences of unknown bacteria
aataaaaaacatgtaaatatagaagttacgccgacattgacgtcgtggcgccgcttcatcgcgttgaacactccgcagcctatcattatataaccgaacgccgtgaagagctcggacattgacgccgccgcgagcgcgcttccggtcaggaatatgtcgaaaagcccggtcttcccgtactcggagaacaatccgacgagagtcaccgtgaagatcagcgtcagcatcgcgagggatatcttcgagcaggtcttcttcagcgcggcgagtaccttcaggttctcatgcgtgacgatcggcttcgtcttgccgagcgacgctgagaccgtgttctttccggtctcaacgacgatggcgcgtccgtttccggcggtgacgatcgtcgcggcgtacgccatgtttgcgcgctcagagagcggcagacccggcgcgaaatggttgaacgcggcgtccttgcgcctcgagctcgcgacgccggttatcagcgcctcgttgatatagaggttgtccgacgcgaagagacggcagtctgccgggacaatgtcgcccgctgacagaaatattacgtcgccgggaacgagcgcgcgcatatcgacaaggctcagctttccgtctcgtatgactttcgcggtcggcagcgagtacgccgccattccctcgagcactttctgcgccttggcgaaggtgaagaccgacgcgatgtgatttatgatgagcagaacgattatagtccccgacgcgaccggcagcccgaatatcgccgcgagaatcgccgcgacaaaaagcagggtcgacgcgaagtctatgaatatatgcgagcggtatccgaagaatccgctcgacggggtagggtagatatcgttcgcaccatattcacggcggatcttctttatgtcggcgcggccgagcccggagcctcggtcggtcgagaacctgtgctcaagctgctcgatcgaccggtcataccacgtctcccgcatatcagatgaaatcgaaggtcagctcgccgtccttcgcgccgatggcgacgccggtgagctttttctggtagctcgagattatctcggcggcgatcctgtcctcgacgtcggtctctatgcggcggcggagatttctcgcgccgtactttctggagtacgccttcttcgcgatgagcccgagagcttcctcggagcacttcaccgtgatgtctttttcggcgagcgccttcgcgaggtcgtttatcattatcctcgagatctctatgaagtccttctcttcgagcggtctgaaggtgattatctcgtcgatgcggttgatgaactcggggcgcaggaaatccgagagcgccttttcggtcttgttctcggtctgcgagccgccgtttccgaagccggcgtagccgtttccggtctgcgagcccgcgttcgtcgtcatgacgagcaccgtgttcgagaaatcaaccgtcttgccgtgcgagtcggttatctttccgtcgtcgagcacctgaagaaggatgttcatgacgtctggatgcgccttctcgatctcatcgaagagcacgaccgaatacggatggcgtcttatcttctcggtgagctgtccagcttcattgtagccgacgtagccgggagg

SEQ ID NO: 2280 - DNA, 32759 bp, Unknown
  16S sequences of unknown bacteria
caaaatttcttagaaaaacttcttgctttttccttgacttttttttgcaggtctcaatctttcactgcggtatatccgcaatacactaccacgcaagagcttgtcgcttgattattcattattcctttcctccgccgatgttaatcccctcgataaagtatttctgcacgcatacgtaaagaagcagcaagggtatgatggcaacgagcgccgaagcgcactgtgcgtttccgtatccgccgccttcccgtgaaagagtaaggacgagttcggaaagcgcaagctgtaaattccataattccttggtgttatataagtacatcaacgctccgccgtaactgttatatccgccgacaaagccaaaaaggaactgcgcgataagtgcaggtttggcaagcggaattacgatataaaagaagcttctaaaatttcccgcgccgtccatcctggcagcctcgagaacctcgtttgcaagcgcgctgtcgaaatacgctcttaagaaaaacaccatgcttgcgctgccgaacaatcccggaataattaacggtaaaattcctctcgcaccgccgacccagcctatcttcatgtagaacagataactcacaaatccaaatgcgcccatgggaagcatcatcgtaagcaccgttatgagaaacagcagctttcttccgggaaaacgaaactttgaatagataaacgcagccaacgccgaagtgaaaagtccgccaagcgtggggatcagcgtctgccacatcgtgttaaagaagccgacgagcagcgagggtatgccgtttatgatgttaggatcgaacttgaacaccagctcgtacccttccaccgaccattccttggggaaaagcgcaaagccgcctctgtttgtaagctcgtaatcggaagtgaacgaggtaaacacgataatgacgaagggcgcgaagataagtatcagatacaacgccaacatcacgtaggctgcgcccgttgcggcgcgaagcttaggtttatgcttttgccgcgaaggagccgcgttttcgataacgctttcgacgttttcaatcattttatttatcctccgcctccaggattctttttttgataaggaatacggaaggcaccatcatgataataaacagcagccagctcataaccgaagcataccccatattggagaattgcaccccttcgatatagatataatacataaccgtcaagccggcgttgtttaatcccgcatttccgtcccagtcgggcggcgccatgatttttgccgcgtcaaaggttgtaagtcccgccagaattcccgccagcaacaggaaaaacgtaatcgaggaaattcccggcaaagtaatataacgaaatttttgaatcgcattcgcgccgtccagatccgccgcttcgtacagcgaagggctgattgccttaaacgacgaacagtacatcacgatgccgtacccgggcgcctgccatacaatcgaaataaaaatagcagccgtcaaagtcgaaggattttcgagattgataagccaattgatatccgtacccaatatcgcattgataacgccttccatcccgaaaatattgttccacataatagaaacggcgacagttgaacagatataaggaacaaaatacagcgtctggaagagacgcgttcccttcacgttctgacttagaaaagccgccattaaaagcgcgattgccagagaaacgaactgcgcgcacgtaagaattatggttacctttaacgcttgcagcaatttcgcgtcggaaaacattttcgcaaagttcgcaaaattattccacttcatcgtatcgagctggttgtactccatttcggaaaacattgccatgattgaaacaataatcggaaaaccgctgaatatcaaaaatcccagcaaaggaatccccacgccgatccaacaaaagagataggtgcggttaaactttttcttcggccttttgctacccgttccgttttccgtaccgctttgggcgtaagagatcaactcttccatatcagcctctcccgttcaaataaatatctacgtttccgatcgcctcgtttgcggcggattgtttggcggctaaaaaaccttctatcgtcgtataacctgccctgagctgattgttaaagagacccgaccaatcctccacccaatcgccgttgacgaaatacgcccagtcgccgatttcaccgtgcgacgaaccatctgcaaacgcccagtagttcttggttgcgtccaccgcggaaaagtacgtatcgctctttgcaatcgaagtctgatttggaacctgccccgtctttgcatagatcgcctgtccttcgggccccgccgcccagcgtataaatttccatgcggcttcgtattttgcggaatcggaacgcttgggaataaccagcgcgtttgcgctcgaaaacgccgcctgccgtccggcgattgcaacgccgtccatcgattttttcaattcgcccgtatattcttttccgtcgtaagtttttccgattacttttaagtgttcgtttgcaaacgtttcctcgcccttataatagacgctgccgtcctcatattcgcgatattgcgtagtcggagcaaagtcgtaattttgtttataccccacgttgagagaggtaacctgcgagccgtcgctggcaagcagcgcaacttttcctttggaaagactgcccgcgaggttctcctccgaatagacgcccacgccatatccgccgtcctcgcccttatccgcatcgggcggagtcgttaaccgtacaaattcctccaatgcttcccgttgagaaggaatttcgtataaccccgacttatccgtaatcctcgatttgtccgcgtagcgtacgatttcgcccgccgcataggacgtttctcctacagtgacgccctccgctgcaacgacgagataattttttgaagcgtccgcaacagtaaattcgtattttttctccgcctcgttatagccgacgcaatcgccgccgaccgaccagccgtaggagaaccaccagtgcgttccgcttcccgtttccgtcgtggagccgggattgtagtcgtccgtaaaacacttggaaagataacggaattcctcccagttcatagggatgcggttattgaatactttataaacctcttcccctgccagattcgcggatttctccgcgccctcataaggcgcctccagatattcggcatagccatgcgggcgaaccttcggatattcctgcgaaagtttttcttcctcacaggagataatgttaatcttttgcgaagcaaatgccggtttggaataataatagaccatgggcgtattcccgaacgggacgccctgaatcgccgcgtctttacccgccatgcgttttccgtcggcattattcgcggtatcgatacgaaaacgttcggtaagtgttttcggaacatcttcttccttataatttccgggcatttcgttatagtaatcggtcatatcctgatataatccctctacggcatagcccttaaattctttatcgctgaacatcaaaacgttcggggcatcgacgaataggctcgatctgtcaatctgctgacggttatcgggttttaccgtcactccgtcctcaacgccttgccccttgttgtaagcatccaccatttctctgatgatcttattatcggaaatagaagcgctataccaaaacttgatttcgcccgaaccgccgcctccgccgcagcccgccgccgttccgaccaataccgcgctcatggctatccccattgttacagacaatacctttgttaatttcctcataatttactccttatgtttcttataggtttcgaattttaccttttatttttcatctaaaatcgatgtttctatccttcagccatccaaacggatcttctttctgctgatttttccgatactcctgcggcgtcatccctttctcctttttgaatatcctcgaaaaatatttttcgtcttcgtaccccgcccaacgcgatacctctcctacgttcatctccgtcgtctgaaaccgctcgcacgcgatggaaatgcggtaagaagtgatatactgtacgggagtcatgttcaacacctccataaagagtgacgtcagcgtacgcaccgaaatgccgctttctcgcgcaagcgtttcattcgacagatccatatagaaattgttatttatataaatcagaatatccctcagcatccgtttttttcttatatctttcgaaaagtgtttcttctcgttttcccgttcgataaaacggctgagcaacagtaaaaaataagcggcgcctttcaatttttgcgtttcgctcgcgtcgaatgcggcgagcagctcctgcatcaaagacacgtagccgtcaaactcgttaagatacatacagcagttgtcttttctgaatccgcaaaaagaaaatattttatcgagattttttcccttaacctctacccacatatacgaccagggatctctggggtcgggataataattgtaatgttctccctcatacagcagaaaagcctctcctctgtttacggtatatgttttatcatctgcgatcaacgttcctttaccgaaaagaacaaaatgaagagaataattcggccttatcctatcgaccaccccttttttcggggaacaatgttcagagcctacctttacaatatctaacgtacatttttcttcagataaagattctatggatatattcataatttcccttttccaccttgtaccgtagctgtatttttaagtatattacaaccttttgccgtaaatatactttgtctgttctgaatagacaacgccaaagagttcctcgtctatatgaatatattttaacatctaccgtttgaagcgtcaatagtcaaatagaaaatttgccgaataatccacctttttcttatttttcacaaaaattatttatttagaaattaataataaaaaatgttccttataaattcccccttatggacgatgatgacgtcactccatattatctccgtcataccttcgctaccgtacattctcggttgcggcctttatttttcctgattttacaacgactttaatcacccccgccaatcagcgacctattatcgattaagtcaaaagtcatatacgttttccatgtaaaaacaggcacaaaaaaaagcagattaccgagtttctattcgataatccgctttttttgtgcatccaaaaggaatcgagctaaaattaaaaatcctctatcccttttgccgtaaggctttcggcaatgttccgccgtttttaatatcaataaaaaattactttcttgtccgttttccgacattcaattttatcgaacgagtatatggcctcggaaagctttgactttgctcgaataaatttcggctttacgaaatatacgtacgccttagccgttattcgggctttgtctccaaagtaagctcgtagtccccgagatgctttaccttaaatccgctctttttataagcttcgtaatcgaaagcttccagctcgtctatcgccagcttatgaaattcgtaaaaattatgccaccattcgtaaccgctgccgagctccgcgttcaggtatgcgtccgcaatatcgcagcccatctgcggcgccacgtaaaacgcacccatcgcgagaacgtttactccgttgcccgtgatcgcgcgcagcgccgcgggaacgctctctaccacccccgcgtgaacgtgcggacatttacttgccgcgatatggattcccattcctgttccgcagaagatgagcgcgcgttcaaattcgccctccgaaattttacttcccactctaagccccacgcggtggaacatattttccgtatcgtcgggatcgctttcggctgtaacgccgagatcggtgattttccagccctttgccttcaaatgcgccaccaccgcttctttcagcggataccccgcgaaatccgcgcctaccaccagatacttgtcctttatcgttttcatctttcagttctcctttttaatgatatgattccgcgccgcaactcacgaaaaaaattcgttttccagcatggcgcaaatacaatgatacacgggcagatgtaattcctgtacccgataggtttctttttcgggtacgatcagggaaagatctgcacgcttcccgatcgcgccgcccatcccgcccgtaagcaatatggttttcatgcctttagcctttgccgcaagcacggcatacagacagtttacggaattgcccgaagtggaaacggccaggagcacgtctttgtcccttcccagcgcgcagatctgctgggcatagacgaacgccgcgtctttatcgttggcgtaagccgtggcaaaagcaggatgcccgcaaagggatacgacgggaagcccgccttccgttttctccgcgacccgcctgccgtcttcgcccatggaaaggagcgcttctctgaatttcccgggcaaaggacgggaaagcttgaagcttttcagaagctcgcccgcgatatgctcgcaatcggcggcgcttccgccgtttccgcaaagatataacgtaccgcccgacaaaaaacagtccctcataagcgccgccgcaagcgcgatcgattcttccaaaggctgcaaagagggaaagcgccgcgacaaagccttcagaatattcatcgtttcttctttcatcttttgctccccgcgacgcacagcgccgcatagtctcctatgttttctttcagctccgcaggtacgatcttacatacacgataacagtcgggcagcgcttctttttcgatcgtctcgtacatcgcgggctccaatagctcgcgggaacgcatgaacacgccgccgagcacgattttttcgggattgaaaagatcgatgagaatactcacgcctcggcccagcatctctccgctctttgcaaatacccgctttgcaaaagtgtctcccgcaaacgcccgttccgcaagctgtttggtcgttatcctgccgcccgcttctacgatacattgcggaagctttttgcggcgtcttgccattacctcggccaagcccgcgattccgccgccgctgcaaaagccttcgaacgatccgtatttcccgtaaccgaacggtccgttcggcgcaaggcggatatgccccgcttcgcccgcgtttccgttggcgccctcgtacagctttccgttgagaataagccccgcgccgagtccggtgccgaaggtgagaaaaatcatgttcgacgcacccctgccgccgccgtatttccattcagccaaagcgcacgcgtttgcgtcgttttgcaaaaacgccttgacgcggtacctcttttcgaggtactccgcaacgggaaaaccgtgccagcccggaaggttgggcggcgtgagaatcacgcccttttcgctgtccagaggcccgccgcagctgattccgatcgcctctatttccgcgtttttcaaaaatttttccgtctcgcccgacagtttttccaaagtggcttccggcgaggatagcgtaggcacctcgtatcgctccgctatttctattttttcgccgagccgtcccaaagatacggcgcatttcgtgccaccgatgtccaatccgatacagtacatagcgatttctccaaagcagggcagcccgccgttatcagaacgaaaaacatctgctcgacacgacgctgccgtcctcgtccgtcacctttacaaaggcgaacaacgcttcttcggggacggaaacggtaactttaccgttttcgcacgcggcttccccgcgcgtccatacgtttcccgaatcgtgccaatattccaggggataggaggaccagaaaagctccgccttgatttttcccgacgccccggaaacgttcagggaaatggttccgttttcgaacgttccttcatcggcgcaaagcatttcggcgcccgaaacctgataatcggcaaaatcgaatatttcgggcaatcccgagccgtcgcccggctgctgtccgtgcgtcagcctgtcgcgccaggaaaagaaattttttcccttgttcaagtctgcgcatttttgattgcaggcgagagaaaaagcaaaatcgtttgcgccggcaaaccacatgagcggaatttcgcagtttttcatatacgccgcgggatcgaaacgctcgcgataaatattcaaagccgcgtcgtccatggcaaatacgcccgcaagctcgctggtgggatcttcgtccatgtatcccgcgccgtaaacgggaacaccgaatttgaagcgattatccaccccgaccgttatgcaggtgagataggagccccaggaaatccccgtgattccgatattggactcgtccacgtcatcgcgtccgcggagaatattgttgcaggcgataatgttcgccacgctgatatattcccacgagtttttcggatttgtcatatccgcggcggtaacggaaatattcggcccgcctttcgggtttgccgccgccttattggcgctgtccgtgtaattcgcgtccacggacagagaaagggcgacgtaccccctgtccgtccataattttacccaatccgcatacgcctgacccagccccccgtgcaccaataccatggcgggatagccgtcggcgggtttttgcgtttcgggaacgccgagataggcaaaaatttccgttttctcgccgttatattccgcacccgtaaaatagattccttcgatgttttcgccgccgtcataagaatatcccgcttcgcgcacctcggggacctgcgccgaaagcgcggaaaaatcccagagagaatagtctttttccccgctcgtctccccgccctttccgcaggcggtcaacccgctgcagcaggccagcaaaaccgccgcggccaaagccgtttttctcaacatattctgttctcctttaaggacgcgccgccgccatagactgcgacggcgcatgcttatgcatattttatttatcgtcggatttcttcttcgcagccaaagccgcacccgcagccaaaaccgcggtcgccatcaacccgccgagcgccccgatcgagcttccgcagcccgaatcggccttcgacgagcttccgctttcggagccttccgagctctcctgcaatgcggcgtagtcgctttccgctttttccagcgcggaaaggccggataccagcgctttcgcttccgcgctcaaagcgtcgtaagccgcgcgagccgcgtcgattttatttttgcaagccgaagtattttctaccctgccgatgcccgcgatgagcgcgtccacggcttccgcggcttccttaagcgtctgctgcgcttcaaacgccgaaattttttcctcgagttccccgacgagagaatatttctcggagaaatccttctgcgcctgcgtcaaagcctcgtacttttctttaagcgcggcgacgtcggcaagcgcggccgccttattttcggcagtgatttccgcataaagccccgttttttcaaccacttcccggtcgaatgccgcggctacggaatagtcgatctggctctgctcgaacgccgcgattttctcttcgaattcgtccgtttttgcgaagtttgaaacttcctgtttctggctttccgtcagttcctcgtaagccgagcgaaccgccgcaagagcctctttcgcctcgttcttattggagctgttgatcgtggcgtaatccacgaacagcttttcgatcgcgttttccacggactgagcgggatcgtaagcgtcgagaagctcgccgtacgccgtaaagtcgtcgccgtttgtcacctgggccttatacttctccgccaacccctcgtaacggactttaagcgccgcgtattcctcacgcagagtttctatcgtagccggcagaggagtttttgcgacgagcgccgcgatatcgtcgatcacgcccttcgcaagcccgcagcccgcgatatcggcctcgaccgcggcaacggcgtccgcgcactccgcataaagctctttctgagaggcagtgacgaccttccattgctcctcaaatttcgtaagcgcagtccttttctcgatatagttatcgggcgtgactccggccagcgcattcatctggcccttgaaataatcgatcgccatgacgtcgattttcgaaagatcttcggcgctgagctccgcttttttcgccgccagcttttctgcttcgtagcggcggagaagcccttccttaacggcgatattttccgactttgcgtttatgctccgaatttcgtcgaaggtgagcgaggttttgcccgaaagcgcggctatgcttgacttgtacgtttcaaaatccgcaaacaattcgcgcgtaaaatcggcgtattcgtcgctgatctgcttaaccgtcagttcgatatcgctgtttccgctatacgactccatgccctcgcccacgctgaacgtaagcgcaagcttggacgtatcgatcgcgcccttttccgtagcaaatacggctgccaggtattcgttcgtaagcagaatggaagcgtccgcactcccctccgcggaaacggtgagcctgacgcccgcttcttccgccgccatgcgcacggtaatcgttttgccgacgatgccttcggcgcatttcaacgaaccgaatccgccccagtcgttggtaaagccctccagagccggcgtgtccggattgctgttgggataaatcccgcccttggtttccgtgagcgcaacgccggcggaaccgggtccgtcaaatcccatacggaagaacagggaaagcccgggattgctctcgtcgccgtaaggaagcgcggaacgatgcgatacgaaattgattgcgaacctcgcgttggctgcgctggaatcgacggtgaatttcatttcaaaatcggataagttcaccgcgtaatccgtccatttgccgtcctttatatccgtaccgtaaacgagacggttcgtcgtatcgtcggaaagaagcagcttggtgcttccgtcctcattcctcaccgcgcccgcataacacttcgtgacggagccttttccgtcttcttccgtatagtcgtactcgttggtgaaatagcttccctccgtcgaataatacagtcccttcatttcgacgagcgtttcctctttccagctttccagagcggcatagttgcttaccatgccctttgcaaacgcggaaagcgcagcgtactctttcagaaccttgtcataatccgccagcgcgggcttatagttctcccgtaccgccgccgaatatttttccaaaaatccggcgatggaagcctctaccgctttctgtccgaaatccttttcggacaaggcctcgcggatatgatttgcgattgcctcgtattccgtcagccgatcggaaaatttcgtataaaacgcaaacgctccgatcgcgtcgcgctcgttcgtaatatcggaatcgacggtatatccggcaaatacttcctctttgagcgccagcgctttttcgtcgaagcccgccgtggaaatgctctttgccgcgtcgtattcgtaacggtcgctctttctcatgccgctcggatcgacgcccaagaaattcatctcggtataatagtattcctttacgtccgcgcccgttgcagtctctccgcccagcgcgtttgccgcaatacggtattcttcggtatagcgcgcggaattatgatattttccgccgtacttttcataatacgcgtttgtcgcaggctcggaaatatcctccaccgtcatattcatgccggcgccgctgttcccgatcatgaaataggatttcgtataatcgaacgcataatctcccgtaacgggcagaacgttcaaaggaagctccgcacggtaatcgtaagccgcgccgttgtttccgtcgcgcacccaatcgatttctatgttcagtttatcctctcccgcgaagatatgcagcttcatgtccttttcgaggtaggaatcgcgaggagaggtattgttatataccagataatcgttgcctgtcgtagtatagggcgagtagccgccgtcgagagaaaacgtagaaaccctggggcaaaagcccgtattatttccgccgctggggtcgtcggcgagcagtacgctgaatccctgtccgtacccctgcataggatacatgtctccgttctgtctgaacgacatgaacgcgagctctattccctgacccgcagccaggctatctacggaaaaagtaatctccgtatccgtcagatcgagtaagtacgcattttccgcgcccccggacacataatcgccgtaaaagagccgggttccgccgccgcccgtcatctgagagaccgcgtagctgccgtcggagcgcttggtcacgctgctcttatcggaacacatcggcccgtcgtaaaaaggcgcgttctcggccacgcccgaagcggcctttacggacattacgctccccgccgcgccggcggcagaggcgacgcccgcacaggagagcaggcacgcgatcaacaatttaacgctttttttcttcatacattccaccttttatatatttttttactttccgcatacgagcttcttccgcccgtatgcggaaaacatttatcacttatcgttcttctttttctttgccttcaagacaaacgcaaccgcaacggccgcgccgacgaggacaaccccgccgccgacgctcagcccgataatcagccccttattcgggccttctgcgggagccggcgcgggagcttcgtcatcgaccacggtcaccttgattaccttcgtaagcgtgacgccgctgtcgtcggtatagctgagcgtaacgtttttcgtgcccttggacgtggaagtaaagcccagcaccttgattttatccagagggatttccaccgtagtgccgtcggaaagaagcgccgtcattttaatgcccgtcttatcgaacgcttcgccctttttatattccgtcttggcgggtcccgaaacgagctccaccgaaaccgtatataccggcggaacgtatccgccgaacgttttgtctccgatcatgcgaatggtaatcgccgactcgcgttcttcgggggtaaggctttcggcgaacacgacaaaggaaacgtacgccttgccgccgcggaagatgttttctccgatttcgtcccctacgccgaattcgggcatatatgcggggttatcctctgcgggattgataaaatcgcggtagtaaatgttgagtgacagagaattgacccaaagcgtatagttgctcgcttttttctccacgcggacgcggacggtgatcggctgatagggctccgccgttacgggaacgccttctattacgccctgcgccagcatgacggcgttgccgtctctattgggggcatatacattgacttcgatctgatccatctgattgaggaagaaatagacggagaagccctgcgcctcgtccttatttttccccgccgcgttaagaatgttcataacgtaaatgctttggggatatttaccgtccacctcgccccgccatatccggccgatttttgtaaagtcgaaagcgaaatcgaagccgtcgatatcgagagggtcctgaatgagcgcgaggccgtcgcagttgttttgctcgcccagcttattgtcgagacggattccgtcttccgtttcggaagcagtccagctcgtccccgtggtctcgacatagtaaagaggctccgccttcagcttttcgtcggccgcttcgtagcgtcccgcaaactcgcccctgtcttcttcgacgatgaggtatttcagatcgggaacggccgcgcgcttcgctttcgcgtttctgagggcctccacggccgaaagatcctccacggcgacggaggcttcaaattcctccaacgccgcgccgatcagctccagcgctttctcctcgtacgcagaatcggcttccgctttcatcgagtcaaacgcggcgagctcctctgcggacaaaagtttcgtatcggcttccgcaacggcaagatatttttcgtaggcaaaattcatcgacgcaaggtcggttatctctcctttcgccgcggcggagtattccgtgacaaggattcttaccttcgccgcttttactttgcggtcgcattcttccagattttcgacgacggaggaaatatcatagccgattttatcggaaatctccgaaagcgcatcgaaatcctcttttgcataagccgcgctctccgcttcgtctatctttttctgcgtcagggaagaaaggtcgtccaaaaagtccgtctttgcgctgtaatcggaataccatttttccatcaaaagcacgattttttcgccgagcgctttatcggcggccgccagcagttcttccagcgcttcgcggtcggagggcattatgtcgtcgagctttaattcggggcgctctccgtaaacgcggttgaaatctgctacggacgcgtccgcgccgagttctgccaccgacgccttgtacagattgattttatatgcctccacgtcgtaggcgttggtgcggcgggcttcgtccacttttttgtcgcacgccgagattctgttttcaaacgcggttttatcctccgcgctcaatttatccagcgcggaaagagagatcgcctgcttcgcaagctccgcctcgtaaatttgttcgggcgtcgcggaggaaggcgcggcggaaaatgccgacgtcttttcttcgtaaacgcatatctgcaaatgcagctcgcccctgagcagaagggattcgtccaacgccgcaatgagcgcttccacctcttcgagcttctctccttcgagatactttacgaaggcggaattttgctcgtattctttttttgcggctttggcggcttctatcttcgtttgcgtaacgtcggcaagatttttcagctcgttcagcgcggcgctgtaagccgttacgctgcccggcaccgccgccagcttctctgccgtcaaagaaagatttcccgagattttatcgagatttttctgctgaataaatttatcgcggggacggagtgcggaaacgtcaaccgcggcaaactcctctttcatcgcaaagtattcgtccgcgggaagcgtccctgccgcggctttttccgaagacgcgaccatcgcggaaatgctcgtctttaccccgcttacgctgctgttgtatgccacggtctttttatcggcgggcgtggataccgtgaaggacaactccgtttccggccccgtcgtaccgttttggcctccggcggaaagcgccaggacgagattgttgattttcatgtcgcggttggtgaatatctcgccgggaacagtggtacccaaagagttgcccgtcgtaacggcgggtcggttcgtcgtgccgccgaagctggcggaatccaccatgttgacaaactgcaaagtctgtccgatcgcattcgcgcaggtgagacgtcccaccatgccgtgcgaatgtccttcctccgcttcggggtcctttggataatcttcggggaaagtgccgtctttctgatacgcccattgagaatcggtatcgatcatttcctgaagcaggctcccgtccgcggcgtcgagaatatacagccttaaaacgcccttgctgaacgcttcaaatacgaaagacacccccactgctccgtcgaacggacgcttttgtgcgtctttgaggaaagaaatcgtaaacgactgacctgccgccagctgattgatcgtcagattccatctaaacgacgacatatcggcgggaaacgccgttccctccgtaccgtaatacacgcagccgtccgccgtgtagggcatggttatatccgtgagggctatatcctccgaaggctgcgccgtaacgcccgaagcgggctggaaaaagtcgctgtcctttatccccgccgagttctccgcactcgcatacgcaaaattcggagcgaaactcgccgccgccagcgcgcacacgcataagagaccgcatacacgcataagagaccgcataaaagagtttttttgttttttcatatatcctccttacgttatttatttgcctttccggcaagaagcttcatattgtttacgtccatgcccacgtcgaatgtcccggggagctcccagcctatatacatgctcgtgatgccgaggttttcgtatttcgtgtttttcagaaacccgcgggactgcgcaagctcgaaggcatgacgtatcacgggaagcatatcgcgggaaagaatgttgtgattgcccggcttgacgggcatatccaaaaaggtattccctgcgggattaaagataaacgcgccggtcgaatcctcttttccgccgtcctgcgccgcaaattcgggcgaatagtcgctgcgattgtcatagatgggaagaccgaaccaaaaataatcggaaggcttcgtaatgtcgtttatcgtgacgtaccaaaggaacatcgacgaatggaggccgggattgtatcccgcaccgcactggtttacccctttcgtgagctgaaattccagatagaacgtcaaatagtcgatatctttcaacatcgtgtattgggagaactgaggaacctccaggataaaatgaatccaaggctcgttttcctttctcgggccgtccgcatacactccgtcggcctccgcgttgcaatttagcgtaaatgcgcccgtggagcggtttaccttaagctccttgctaccgtcgcggaacacgtccatgccgtcctcttgcgtatatacggcatctaccagattttttttgcagccccactgcccgattctccatatcggctcgagacccgtttctccgtagtctatttcgccgatatgtctttgattgtattcgggacggctgtcaaagcccgtaagaataaatccctgctcgaaacagttatccggaagaagatttttttctccgcccgatgcttcgccgggtttttcggtattcgtacaccccataagcagtaataatatcccagacaagaatactgccgcaagttttctcattctgaattctcctttctcatttttttatccccggctgtcgccgtcggcgggattcatattttattgtaaagcaaactgtttttgtaaatggtggccccgcagttaaacgtccccgggacttcccagccgatataaaactgattgatgcacaaatcgtccatagtggtgttgagcagaagcgggaaatcgctgtttttgttctcgtcgagctgctgaattgtcgtcagagccttttcgagataaggaatgagatcgagggtgatacggtatctctttcctacctccacgccctcctccgtcagataaccgtcgctgggcgccatgtagataaaggtactcgacttatcttctttgccgtaatcgagaaacgcgctttccttaaacgtcttccacaattcgtccgaaaggcttcttccgtcgtacaggggaatgttcatccagaaatactgattgtaatcgaacgaatcgggattgcagtttttgacgacgaacacccattggaaaagggcggtgtgcagatccttatcgaactccgcttcgctcatcagattttcgcaatacggaatggaaaaatccagatccatccaaatattttccatttcggaaattctcgagatatccgaaacgttctggatcgtgataaagtgcagccaatccgctccgtagggcttaggcacgggatattctttctgcgtgttgcaatttaagctgtattggcctgttttcggatttacgataaattctttggtatcgtctttcagtatgtaattgtctccgtcctgcgattcttcgcccgtgtccgcaaggccgaatttcgtaccccactgtccgagcttccaaaggctgacggcatcggagggaacgctgtcgagataacggaactgataggtgactttccccagatcctctatggaaactgtgccgagcacatccaccccgttttgcatatttctgtccagtatgacctccgtaccaggcaattcctcttggggttccggcttagaacagccggcggcaaacgccaaaacgccgatgagggccagcgaacagaaacggaaaattttcttttctttcattgtgatttctcctttcggttacattttgaacgcaccgctggtaagaccgcggataaattgtttcgacgccgcaaagaaaatgagcagaagcggaatactgacgatcacataccccgcaaaaggtacgccgaggctaagataattgttataatacgattcggtgaacggcgccaggccgacagtgatcgtgtgcatcgcttcgtcctgcaaaatcagctgcggccacagcagatcgttccaggccgccagcacctgcgtaatggcaagcgtagccaaaatgggaacggacagaggaagggctatggtaagatactgtctgaatttcgaggcgccgtccagctccgccgcctcgaacagatctttgggtaggcctgaaaagaaagttttaagcagaaatattcccatgggcaccgcgcccgtaatagcgggcaggataacgccgagataggaatttttcatattaaacgcaatcatgaccatctgatactgcggaatgagcgtaagcatccccggtaccatcatgaaagagagaatgatgataaaaattacgtttttgaaaggaaaattgtatctgataaacgcgtaggacgccatcgaacacacggcaagcacgccgaaagtctggcctatcgctataatcacggtattaagaatataatccttgacgaacaaccaggccaatttgtaattttccataaaaaacggaaacgaaagagaaaagggagaagagatttcctggtcgggagatttgaagctttttatgacgagaaaccaaatgggcagcgccacgaaaaacagaaacagcaaaatgacaaaatgcacgcaaacctgccgtatcactgcgtctcgcttcgcccttttattttctttgaggccgttccggtaaggttccgcacgctccatcacataacctcctctgtcgatttcataaacttattattgatgatggtgacgatcagcgtaacgacgaacaggaaaaatccgatcgcggcggcatacccgaattcactgccgaaaaacgccctgtcgtacatatagtatccgggaacggtggtcgcgtaattcggcccgcctttcgtaaacgccagctgcatggagaagctctgcattgcgccgataatccccatcatgacgaaatattttatctggcttttcaacagcggcagatcgatatagaaaacgcgtttccatgcagtgattccgtcgaggtcgagcgcttcgtaaacggattcggaaatattgttgagtcccgccagataaatcaggaaggacgttcccgccgcccacgggaagccggtaagcaccatggaaagcagcgcgagattttcgtcaaaataccaccctttcgcgctcgccccgaaaaggctgcccagaatgctgttcaccaatccgctcgggaaaggattgaacacgattttcgtccagataagcatattcaccatgccgggtaccagcgtgggaataacgaaaataaatcgataagcgttgctccatttttcgctcttcaggttgtgcagcagttccgcaagcgtgagggggggcgagatttcccaatacaagccccgtactcatcagaatcaacagattaccgcacgatttccagaaaattttatcggaaaataatcttttgaaattatcgatcccgataaactcgacgtttaccagatcccattccgtaaacgaatgaagaagagcggacaaagcgggatatacgctgaacacgcaaatcagcaaaaaagcgggaagtatccaaaaataaccgaatagatcgctttttttataacttttcaacattactttgctcctttattcaggaaagcgaactccaaccatcaacgtcccaggcgccgctctgcttatttttttctatctgagaatcctttgaagaaaggaactggctgttgatcgacttcgccacctcggcaacgggcgtccccttgaaaaggttcccgctctgaacgacgaaattgctccagcagtcgaagcccatgatcccccaggaattgaacacgtgaaattcaaagaaatcgttctccacgtcctcgttgaactgcgcgatcagatcggcgaacagcgggttcatgtccgcggaggcggccgcttcggtatcgagaggaatcgcgtaaccgagcttgttgaccattttgacgttattctgaggcgcggtgacaaattgcaggaaatcgacgcaggcttccaccgtccctttcttcatcgcggcgttcgtgatccaccagcccgttccgataccggaaatgccgcggcgcacgcccctttcgtcgatcgtcacgcccgccacgcccgagtattcgtcgatgtcgctctgcgtcagcacgggatagcccatgacgcccagcttttcaactttcttttgctgctgcacctgcaccatgctctttccgagacaggaaaccatagccaccttgccgttcatgaactcggtgacggcagtgtttcctttcgagccctcgggcgtatgcagttgcgcgcgcttcataaggttgagataggcttcatatctcgcgtccacgttggagccgttcatgattttgtactttccgagatacgaggcgcggcaaagttcttccgtatcgacgattccgtttttgcggataacgtcgtattcgtcggccaggcttccgtaaaggctactttccagcacgatgtcgtaccaattatcgaccatggaataaggaattatttccagcccgttggaatcggaatacgcctgtattttatcctgcgcctcaacaaactcgccgtaagtcttgatgggaagctcgacgcccgcggcggtcaggatttcctcgttgtacatgacccccgcgacgttgcggtcgatccccacggaataaaaattcccgttgggggcgcgggaggcttccagctcctgcggatcgtacagatccgcccatttttcgttaccttccgcgtatttgttggggccttgcagataatcggtcatatcgacgaaataattcttttccatatcttccgcaatcgtcgtccccgtctgataaataatgtcggggccgctggaggtggaaaggtagccgagaatggtgtcgcggttaccgttcatggaattgcggttgattttgatttcgtaggtatcgtttgcgtcgctccattcttttgcgagaagctccagctgattgtacggattgggattggcgggagagggcgtcatgctgatggaactgttgtaatttcccgccacgccgccgccgtccaccacgatctggattttattccccgatcccgattttccgcagcccgcaagcgcgctcgttgccaggagcgcagttgtcaagagaatagcgaaactctttttcataattgtttcctccgaattattttttatttatataaattactttttcaagaccgaaacggacaaagccgtacctgtccgtccatacggcgtcgggagcttccgcgctggacaaatcctctatcgctccgttcccgtactcgcccgtaaaggtatgcacgcccgtgtattccacctcgcccttgaagtggtgatgaggccccagcatatttcgcaaagtccccgcaagctccagcgcgacgaggtttgttccttccgagagatattcggtgatttccagaggctctccctgcaaaaataccgttccagcgaaccttccgtttacggacacgccgcagcacgctccgtacccttccgccgaaataaacgacctgccgtcttctttttccaacgtcgtctcgtattttgcgtttccggcgtaaaaccacttgccccgggaagtgaggtcgcccggcgaacgattctcccgaacgggaaccagcctgaaatttccctccgcggtaacgcagtttatcttctgcgacgtccttccgagcggctccgaatcaaaatcgcccaaaatataaacgctttcgatttccacgggatagctgaatttatttcttacggcgtcgtgcacttcgccgagttcgtagccgagatgcaaagcgggaatttcgtattcgatttccgcgatattctcgcccgtttgcaccaaatcggtgatttcgtattttttaaaatcccggtcccggtaatattcttccgtagccacattcagcgaaacgccgttgacgagtatcttcttcgcgtttttcgtttccccgacgagaaacagtctgtttcccgcacattcgcagtcgaacgcatacttgacgcgcactttcgcgccgtcgtgcttttccgcttcgcggtaaacctcgtcgtgtatctttaccgtgggaagcggctccgagtaaggcgccccgcccacggaataccgcgcataatccaatgtgagaagattgtcctccgtctccgtcagaaaaaaaggcaattccctgcgcgagcggatttcgcatttcctatcgtccgcattttccgaagccccgacggcgcggacgaaacggatataccgcgcctgcagggcagacagctcgcagcaacagaaagtttcgtttccatccccgaaggaggacagcggcgattcttttcccgtgaagggatcgaagagataaaatttcccgctcctgagcataccgctcgaaaattatcatggtactccttcctttgaggtaccccatgaacgatgatactttttcattcggcggtatgctcaccaacttatggatatgattcggcattgcgtgcgcttctatgatttccacttcttttcgctcacatagttctctcaatattttccctatttccgcacgcaatgccccatatattatttttctatgatactttgtcgtaaacactatatggtattgacattttcatgtcgtgtgtgctaattatccttgggggttttttattctccccaaggacatttttattgttaccgcggtatatttaccgcacctatcagcttgtaaacaatccttatgtcctgcactctctgcctttctattctttcaggcttgccgacatatatcttatccataaagctgttcagaatttcgggcgtgagttcggttacttcggtatagcttttgaccaacgctatcgccgtatcctacgcgcgttattcaacgaagctgtccgctataaatggatcaccaacaaccctgtatgtgcaacgaaagtgggcgcggaaaaaggcaatacttctctgcgccccgtcgccgaaaaggaagtgttcaccgtaaaagaagcgcgcgctttcctgcgaaagctggatgaggacattcccgacgacgaaatgcacaagaaagtcatcttgaagtttattcttttgacgggcgtccgtaacggagagatgtgcggtctgaaatggtcggacatcgactttgataaaaaggttgtacatatccggcgcaacaggctatactccaaacagttcggctactatgaaaagacgcccaagacaaagacgtccgtccgcgacattcctttgacggctgcactgatagatgacttaaagaagtacatggactggttcaggctcgccgacgaggattttgacagctttcttgacgaaacctatctcgccgtaaatgtatatcggcaaccgctgtacccgcaatctatcgggcaatggccgaccttctatgagcgcaaatgggacatgaaacacgtcacttgccacggcttacggcatacctattgcagcctacttttggagcagaacgtcccgatacagacagtgagcaaatacatgggacacagcgattcgacagtcaccttaaaagtgtacagccacttcatccctgatacgcagggtatcgcggtgaacgctttgaaccgcctgacagagtaaaaggaatgacctttgcggtcattcctttttgctggatagtaaaatcttctggtataacccgatttttataccaattttggaaaatgccatctaaatatcgtggaagaaaagaaaaagaccacaatatcttgtggtcgaagtggtactcccggcgggaatcgaacccacaacggccccttaggagggggctgttatatccatttaactacggaagcttattgaattttattgcacgaagcagaaatgattgtcggaaaaaattttatgccaaaatttataccaacttttttccgccccgtgaaaaatagcataaatcaagcagttttgcccgaaaaacttgcgttttgagcaatatcttgtggatagagcacccccttaggaggcgcacgctcatatccacctgagctaatccgacagatatttatattttactcacttggcttaaaaaatcaatgatttgaaagggcttaaacaaaagaaacttaacgatacagaagttattaaaagcaattgaaaattatgtcaaaactatgctgaaatggttcttatcacaatatgttgcgttttttatagcctccgtccgcaccttaagaggaaacaaatagctttatccattaaactatggaaacttataaaaactcagagtccataaaagcatctaaacaaactctcgtcttttaactttcttattatactctattttactttgaaaagcaattgttttataaaagtttttcaaattttatctctcaaattgttgccaaacaaacgaaaaaatgctattatatatattacacaatcaatttatcgaattgcaaaactcaagaaaggagagattcaatatgaattatatcgaaaaagtattgacacagctcaaagaacgcaatcccggcgaacatgaatttcatcaggcggcgacggaaattttgctcacattggagcctgtattcaaaaagcatcccgaatatgaaaaagcagctcttttagagcgctttgtggagcccgaaagagcaattctttttcgtattccctggatggacgacaagggtcgagtacatatcaacaaaggctatcgcgtacaattcaacagcgcgatcgggccctataaaggcggtctgcgcttccacccttccgtcaatctttccgtgattaaatttttaggattggaacagatccttaaaaacagcctgaccggacttcccatcggcggggcgaaaggcggctccgactttgacccgaaagggaaatcggacagagaaattatgacgttttgccaaagtttcatgacggaactctatcgccatatcggtgcggatacggatattcccgcaggcgatatcggtgtcggaggacgcgaaatcggttatctctacggccaatataaacgtatccgcgacgagcatacgggcgttttgacaggccgcgggctttcctacggcggttctctcatccgcaaggaagcgacggggtatggccttgtctatatcacggaagaagcaatgcgccagcgcggcgacagcttcaaaggcaaaaccgtcattgtttcgggcagcggcaacgtggcgatttatgcgtgcgaaaaagcacagtccttgggcgccaaggtagtggcaatgtacgattccgacggatatgtctatgacggaaaaggcatcgatatcaacttgatgcgtcagatcaaagaggaagaacgcgggcgaatcaaagaatatgccgaacgcgtgaaagatgccgtatataccgaaggctgtaaaggaatttggagcattccctgcgatgtggcgttaccctgcgccacgcaaaatgagatcgacgcggagagcgcggagcttctcgtcaaaaacggcgtaaaatacgttgcagagggcgcaaatatgccctccactttagaggcaatcgaagttttcaggcgtgccaaaacggtgtttttacccgccaaggcggcgaatgcgggcggcgtagccacttccgccctggaaatggcacagtcttcgggcagattgttctgggcttccgaaaaagtagataaaaagctgaaagaaatcatggtaaatatctatagcaatatagacgccgcggcaaagaaatatggctttgacggcgactatgtgatgggtgcaaatattgcgggctttgaaaaaatagccgatgccatgatggcacagggcgtcgtctaatcctccaacgcgttctcttcagagacaaaagttttttccataaatcttttgtcccgaaaagacctccggcgttttccttcctcgctccgaaggaaaacgccttttgttatgctatattttcaaacgccagattatccgaaacaaaagcgacaaattctttgacaggcggcttttcttcccagcaacaagcggaagcggaaaaaatctctttaatcgaatcttttaatcctcttttccaagcaacttcaatgacatggcgcaaagctcgatcgacatttttccacttcgtttcatacctttttcccaaggtcttatacatctctactatttggttgatcaccgaacgcctttccacagccgatacaagtaaatcgcacatatacgtatagcctttgaggtgaggcggtatatgcatcgcaatgagcacgttgccgattcttccgtgaacggccttcaaatgctccctccgcgttataaaatcttcacagccgttcaaagcattttcgacgcttgcaatcgcatcttcctcggaaaagggacgcacgagataacgatatgccccctcgtcaatcgctttccccatcgtcgtatcgctcggcattcccgtcacgatcgttttggtccttaaactttcccgcctgattgtccgcaaaacgtcaaaaacgtcaattcccttgaggcttgcccccgagataacgaggtctggcttcaaaagacaaatctgccgcaagtcctcttcaccgccttcccccatgtacgcaaggtcccagccttcatgctcagcaatagcctttttccactcgctcaaaagagcctcattcgattccaacactacgattgtttttgaacgtatcatacgtcctcctttataaaatattaaagttttcgcaggttttgtcgctctccgcgttcaacaagtctattatacaacatatttttacattagtaaagcgattattatgtagaaaacataactttttaatgatattttttatttatatttttaattttttttcttaatcctcgcattttgtcgaatattgtactatatttcgatacaataaactatttttctatacagaaatagaaatatatagcttcacaattattttacaataaaaaaattgagcctcatcatttttagggaaaaagctcaattttttcaaacgaccaattcaaaaataattttttcaaaatttttttgcgcgtaagcgctgcttacgggaagcgtctattccccgttttacatcagcctttctgcgcttgagggatcaatttccgatattcttcgccgcatatttctccacctcacagaatcggcttcaaaaggagcgtaaccgactatgcagacacccccacgcaagggcaatatacgacatacagcccacctcagtacaggcttaaatttcgccgtcccctgtatcatcgtaataaaaagaactttatagtcaatgcttgaagcctcttcatctgtctgaaaaaaacagcgatatatcaaaaaaaaccgacgtacagttaacgaaatcaaaaagcaaactcccttccgctcacttattttgagtaagtaatcatagaaatttacggaaaacagcgcctgcctttgaacttgatcctatatttatttgtttatgagaaaatcgatatacttaggttttttatagggcgcttccacattgcgcttcattaccgactcgagatccgtggtgccgtttacgaaggattggaaatcgtccgtcaaaaggggcttggaatagagatatccctgaatgacgtcacagcccatagccttcagcttttcaaactgctccatcgtctcgacgccctcttgcgtcaccttcatctcaaaggacttgcccagcctgatcatcatttctaccagtgcgtcgtccttctgcggattgtcgctcgctttcagcagaaacatatccagcttaagttcgtccacaggcagctccttgagcacgccgcaggacgaataccccgacccgaaatcgtcgatggaacagcggaagcctgtctttttgagttcgaggacgatatttttcaagacgtccatgttcgtgaaggaaaagctttccgtaaattctatcgtgatgtagccgtcgggaatattgtatttcgtttttttggtcgcataaaaggatacgaagtccttttgaatggccgtcaccctcgatacattgaccgatataggagtgacgcgcagcccgtttctcaccgcgttggcgaaaaattcgcaggcatggataaacacataacggtcgagcttattgatgaatccgtttaattcgaacagagggacaaatttctgcggcggcacgtatccgttatgttccatatcgtaccagcgtaccagcgtttccgcaccgtcgagacattgcttggctatattgtatttcggctgataaaagaggtgaaaatcgcattttttcagcgcgccctccattttcgactcgatatttgcctccacgtgataattctcgtacaggctttcgtcgtaagggatatacgcggccgtcggcgtctttttatgtgccagctgcgcaaggtacgccttattgagcaaggcgtcgatgtcaaccgtttcggcggggagtatgtaatatacgcctatactgaacagacagaagaaattatttttgcggaaaggggtgtaatgattgaccagctcgccaatcagcgtcaggcgggaagaaatctccgatttgacctcgtaccgcaaaagcaacacaaacctgtcgcccgtaagatgtccgtacgtttcgtttttttgcagaacggaggagaatatcgaggaagcgaagcgtttggcgtcctccgcaatatcctcgccgaaatgatcctgcacgtacttgaaattatgtatgtcgaggcacaccaccgcatagtgaagcgcgcggttatccaaaatcagccgttcggcgtcttttttgaactttgcgtaagtgctgcatttgatcacgggatcgaactcctccgcctgcagctcctctttatgctttctgtacttttcgaggaaataaaagattaaggccagcgcaaagatcacggaaagatttatgatgaccacgacaaacttcgtatagaaattgccttcccgattcaataaaacattgcgctcgtatataacggagagataagcggaggagctctttcccatgcgggagaaagaaaacacgtactccgtccccttcgccgaaaaacacacgcttccgaaatcgcgggtctgaagcgccgaacgtatctccttcgctatctcctcggagcccgcaaaggaaaccatgtaattataaaaggacatgcactccgctttgtcggagtcgtccgcgcccgtacagatatagtagctgtcgtcggccccgacgacgaaggcgtcagcctgatattcggaaaacagcgcctccgcttcgtccgaatcgaatacctcctgcgcggaaaagataccgcatacgcatcggatcgtgctgtcggcctcctcggaaacgggcgcgtaaattgcgacgcaaaatctccccgtcgattcgctgcgcagtacggacacaatcgaatttcccgtcgtgcgggcaagcaaggccgtcacttcggaactgtctccgtaatagggcgtttccatggaatgatgttcgccgcggtcgtcaaacaccgaaagagaaagaaatcccttttccgcggcctcggctttcagcttgtcatccaaagccttatattcgtcgtccgtgacgtaaatgtcgcccttgagatcggccgcgagcaattccgttttgagtacgtattcccgcgcgcaggcgtcaaagagatcggccgcctcctgcgtttttgtttccgccgcccgttcggcatcggaagtgaatacctttacgcattcgaccgttgtcataccgaaaatcacgacgaaaagaaccgcaacggagacaaacagcaccgtgagtattcttttttcaccgaacgcataaccttatttttcatgctttactccgattttttctttccgtcgtccgagggagacgcgctgtcctcgccctcttcattccgttctgccagctcggcaagccgtttctcaagctcgccgctctccttcatccgcgcaagctccgcagccacctcgtcctctttttcatcctttccgttttttgccgcctcgacgacgtccttaaagctcaccgacattatcagcaaaagcggcagcagaataagtgcgacgtaacctatgggcttggaaaaaatattgaatatcctcgtcaaaaagctcagcgtcgccgcatacctgcccactaccttttcttccgtcacctcgtattcgtccgcagagaggttattgtcgcccttggtaacgacggcgcccgcctcggtaaacgcatagacgcgatgcgtattcagcaatcccgcaatcgtcggatcgtccgaataaaaggtgatgacgtccccctcttcaagctcggcaagctttaccttttcgataaggatataatctcccgcttgaattgtaggttccatgctctcggtcaaaatcctgaccacggcatatttgccgataaaggtcaccttattcgggtttcgcaaaaagacggacgccaatgccgccaaagccgaaaaaattaacagcagagtgcagccccaggaagcgatttttgaaaagacctttttaatcttcttcaccgtcgtctccgtcaggggtataatttttatattccgaagccgcacggcgcagcttttcttccttttccatagcggccgcggcacgtcgctcgttttccaggcggagctgcattttgcgccgccgcgtctctgcaagctttttcaaaacccgacgtttcgccctgctcagctttcggtaagccagcttttcttccgaagtcagccccaaggtttccttctcaaacgtcgccctttcttcctcgctcatgcgggcaaccgtctgcgcaagctcctgctccgcggcttctatctgaacttcggcttccgaaggctgtatcgtccgtccgagctcaaacgcctctgcgatttgagacgtctccgaaaccgcctcgaaaggagcctcgcccgtttcctcggttgcacgatcttccacgtgctccgcaacggccgctttttctatatccgaggggcaacaggcgcccgaaagggcggaaactgcaatctcctcatttataaaggcctcgtcagcggcggacgaagccgaaccctccgacggctcacaggcaataacctcagcggcgttaccccccgaagcgttctcttttgtctccgtttccgcaaggattttcctattttccacaggctccgaaaaatcggatttggccgcgtccgtcaaagcggtatcccccgtcgaacttgtcgcgcttgtcgggcttgccgcaattgtcgggcttgtcggcgtggtcgagcttgcagccaccgtcggcaccatgcgcgcgattacgaagccgccgtgcgccgcttctttctccccgctgaaaaagtgcgcggaaacgcgcccgccgcgttgacctccgtccgctttcagataccgtttgccgagtatctcgtccagcgcgggcatatcgccgtcggccgtacgcgcggcgatttcctcgtcgctcatcaacaggccgtccgaaatcgccgcttcttcctccgcgccgcccgtaatcgcgccctcgagtgcttccaccgcttcggtaagcgtagccgcggcatttgtcggttcaaatatcagctctcccgtttttgaagcctgcgttttaagccgcacgcggtaaccgagagaagcataatattccgccacggcgcgcgcgtcctcttccgctttgagccgcgcttcctcgcgcgctttttcagcggcgcggcgacgggcctcctccgcgatacggcgcttcgcttcctcgacgaggtcgtgctttttcatatacgcgtcaagctcaagagcttcgtccacggcgtttcgtatcttcaattcgtcgcgcgaaaattttcggggcggattgacgtaagagacgggcgtcaccttgcggtaaacacagtcgttgaggttaaactttttctgttcgacgggcttgatgtcctgcacgatcagcggctggaaaggaatgccttcctcctccgcaagcgtatccgccgccttggcgatctcgcggcggaacaccgtatattgcagagccagatcggcatacatgcgctcgatcaacgcgcggtcgggcttttccgccttctgttcgacggaaatgctgtaccctaccttctcatatccctcgataaactgccaaaactcgaggcattgcctcaggtcgcggtttttcatgagggcgttggtgcgcataacgggcggacgcacatacgcgccgttcatcgacttcgcaaacggggaattgtaatacatcgtcacgacggaattcagccgcatcacccgtttcaaaagcgggtcggcttccgccgctccctccgcggattcggacacggtaagcccgaaacgcacgctgctgaccagcgttccgtcgcggaattcggcggaaatatcaaactgcgtactgttttccgcgccgtttttgaccatttcgttgtagcgcttattgacgaacagatacagctgacggatcagcgtattgataaaacggttttcataggtaagcagggtttcctcgtgaaagacgttgagtattttcgagggcgttatctcgtccccttttacctctttcaagtatgctcttgcaaacggtcttatctccaacaaccccatgctccttatccctttcaagaaagctgaaagaaataacaggagagccttaacgaacgatgaacttaaaaagctttttgaacgcttgaatcttcccgaatttaaggactacaaacaaactttcctc

SEQ ID NO: 2281 - DNA, 32759 bp, Unknown
  16S sequences of unknown bacteria
cctccgtagttgaaattatttattcagaagcacagcgcaccggaaagcctgttttttgtattgtggatgataccatagcttcaaaaccatcgtagctttaaaaacaaaccgcctgctgtacccgtcaggaatgaaaaagaagctcagcgaacttgctgctgaattatcggtaacagagaagggatttgaccttgtgacagtcaaaaaacgaaagtattatgtgtaccggtatgaaggaaacctgaatggtatcgaaaatgcggttgttcttttaagttatcctgaaaaggcatttggaaaccccaaagcactgcgtgcttttaaaagaacttgaaaactactcccggatctgactgtgcattgaacgcacttgcaattgatgaaccacttgaatatgtaagattgtatcttgatggaaggatgcaaatgtgggtagatgcagaagattctttaataatatagcagtagagagtccataacaatcaatgagttatgggctctcatcatattttgtataaaaattcccatgtataatgaaatatcttttaagaaagctcatattgcatgaaattaccattatgtacaaatccgaaatctttatacaatttaacccccatatcagatgccgtaatctgtatcactccgcacccatattctctagcctcatttacaacacgagataataattcctttgcaataccttttcttctatattgtggttctgtaaacatactggataacaatcctatctttccatttggacatccaaaataaggcggcttctccacaaatgacattccacttgtcccaataatattttttccatcaagggcaagccaggatacaaatgttccgtctgccatatgacgagtataatagtccttcaaggcaggaaccaaatcaatttcttctttagccccttcttctctaagctgatttatcctcatattaataaaagtattcagttctttttccgtaagcattttatactcaatagccatttacataatgtcctttcatgtgctaatctttatgatacagctatgtttattaatgcctttatttcaaaacattttcaacatattcttggtatccctgctccaaaatactaaaagaacaactgttgtcagttaatttctgttttcgatttgttataaccatttcatatattttatttgcttttttctgaatccgctcagcattgtccatacaaaattgatattccttatttagtaacaagcggtatttttcatcctctacatctttaataaccagtctttcaatacactcctccggcactggaatcatatagttgaatcgtaaagaccccttgatttctttttcatctcccggtatacggatcaaaatgttagcttcctgctttttgtcaaaagaagatacagacacctaatagtttattccattaacctgcataactgcaccgaaagcaaatttatttcgatcagtatatctgatattaggtacctttgtaacccctcttttttctttttcatacctctggagatactgattgtattcctcatttatacgataaaaatccatattttctcctacatagtataacaaaacagggagataagagtcttatctccctgaaattaacgattcgcattttaagctgcgaagcacttaaattaaaggttcacattcaaagtagtgaagcacttaaattaaaggtttgcactcaaagtagcaacgcacttaaatcaagcaagctttcttgctcatttatattatatgcaattatcatgaaaaatgcaataaaaaatctcaatttttatttgctgattacaatttctttatcggatgtctgataaccgttttacatctttccggtgcaacttttcttgggtctgataaatagatttcgtgatggtgacgttcatccgtgaaatcattcacatatccattttctctcaaatatttatccattattgctactgtttcaggctcattatcaaatgctccaatatgcataatctgtacacataagccttcctctatactcaaaaattctgcactggaacaatccatctttttcttttttgaagcggtatctaccgcccaatcaaaatctttctttgtaataaaatcaggcaaccgaataacagaaatccaattaaaagctgacttattggaataatctacaccttcaacatgatcctgccaccaaaatccttcaagtggtggaactacatattcaaagaaaccttttattttgtaatccgttttataactcatcttgagagtgtaagcaacagaatacaaaacaccaatcgcagttttatattgtccaccctcttcatcagggtttcctttacctctaactgctacataattcatccttggcattgttacaatctgtgccttattcttgggtaaataaaactctttatattctttcttaaaatcaaatgccattttttgcatccccactcctgatacaagcaagtccccacccactgcttattgctccacgcaaccacgcaggggacttgcctgactcggttaaagtgtcccgtcatcatatcaacaaaattatcgagtttcatcatgtttacctccaaatttacgaaggattcttttcttagagtacagaaaaaccccggaaaccttaggattccggggtatcttacgcttggacacatggtatcttctgataccgatttatatattattatctgtcaatcagtgattactcgatgattgtagcaacacgtcctgatcctacagtacgtccaccttcacggatagcgaatgtaagaccctgctccatagcgatcggatggatcagctcgatggtcatctcaacgttgtcgcccggcatgcacatctctgttccttccggaagggagataacgcctgtaacgtcagttgttctgaagtagaactgcggacgatagttgttgaagaacggtgtatgacggccaccctcgtctttggtcagtacgtaaacctgtgctgtgaatttcttatggcatttgattgagcccggtttgcaaagaacctgtcctctttcgatctgctctctcttgataccacgaagcagagctccgatgttatcaccagcctgagcctcatcaagaagcttacggaacatctcgataccagttacagttgtcttctggatctcttccttaacacctacgatctcaacttcctcgttcagatgaagaacaccacgctctacacggcctgtagcaacagtaccacgacctgtgatagtgaatacgtcctcaaccggcatcaggaacggctgatctgttgcacgcttcggatccggaatccatgtatcaacagcatccatgagctccatgatcttgtcgccccactcgcttgacggatcctcaagagcttcagtgcggaaccctgaatgatcggtgtgtcatcgcccgggaactcgtactcgttcagcagctcacggatctccatgtctaccagctcaagcagctccggatcgtctaccatatcgcatttgttcatgaatactacgatatacggaacgcctacctgacgggacagaaggatgtgctcttttgtctgagccataacaccatcggtagcagctactacaaggatagcgccgtccatctgtgcagcacctgtgatcatgttctttacatagtcagcatggcctgggcagtcaacgtgtgcgtaatgtctcttctctgtctcgtactcaacgtgagcagtagaaattgtgataccacgctctctctcttccggagccttgtcaatgttctcgaaatctgtagctgtattaccagcaactcttgcagccagaacctttgtgattgcagctgtcagggttgttttaccatggtcaacgtgtccgatggtaccaatgttacaatgcggttttgttctgtcaaatttagcctttgccattttgaatgtcctccttgaatagattgctttcgcatctgttactgattaatttataccggctagattcgattatatttcaaaacgccagtattttcaagccttttttaaatatctgcattagatattcaaaaaaataaggatttatttttgatccgctgcgaccgccttatgactgccgcagcgaatggtcgaaaccgaatgaattattttgctttcgcgctcagaaccttctcctgtacggacttcggaacctgctcgtatttctcgaagaacatggagtagttaccacgtccctgagtcttggaacgaaggtctgtagagtaaccgaacatctcagcaagcggtacataacccttaaccatcttgccgccgccgatatcttccataccctcgatacgtccacgacgggagttgatatcaccgataacgtcgcccatgtactcttccggcatcgttacctctaccttcatgatcggctcaagcagtaccggattacccttcttcattgcatccttgaatgccagggatccagcgatgtggaatgccatctcacttgaatcgacttcatggtaggaaccatcgtatacgtttgcatgaacaccaagtaccgggaatccgccaaggacaccagccttagctgcttcctcaataccctcgccgactgccgggatgtactctttcggaatcgcaccgccgacaacggttgactcgaacttgaaggtctcttcgccgttcggatccatcggtgtgaagataactttacaatggccgtactgtccacgtccaccagactgctttgcatacttgctgtcaacgttgacttcttttgtgaaggtctctttgtaagcaacctgcggagcacctacgtttgcttctaccttgaactcacgaagcagacggtcaacgatgatctccagatgaagctcacccataccagcaatgatagtctgacctgtctcctgatctgtatgagcacggaatgtcggatcctcctcagccagttttgcgagagcctcgcccatcttgccctgaccagctttggtcttcggctcgattgccagctcgataaccggctccgggaactccatagactcaaggattaccggatgctgctcatcgcagattgtatcaccggttgtagttgtcttaaatccaactgcagcagcgatatctccggagtataccttatccagctcagcacgcttgtttgcatgcatctgaaggatacggcctacacgctccttcttgccctttgttgcattgagtacgtaagaaccggagttcatcgtaccggaatatacacggaagaatgcaagctttcctacaaacgggtcagccatgatcttgaatgccagtgcggagaacggctcatcatcagaagaatgtcttacaacttcattgccgtccatatcggtacccttgattggtggaatgtctgtcggagccggcatatactcaaggattgcatccaaaagcttctgaacacccttgtttctgtaagcagatccacagcataccggaattgcagtacactcacaagttgcttttctcaggacttttttcatatcctcaacggacggctcttcgccctcaaggtactgcatcatcagatcatcgtccagctcgcagatcttctctaccagctcggtgtgatacagttctgcttcatccttcatatcttccggaatctcgcaaacggtgacatcctcacctttatcatcattataaatataagcatccatctcgaacaggtcgatgattcccttaaattcatcctccttgccgatcggcagctgcagacagatggcattcttgcccagtctggtacggatctgatctactgcgccgtagaagtttgcacccaggatatccatcttgttgatgaatgccatacgcggtacgttgtacgtatcagcctgacgccatacgttctcagactgcggctcaactccaccctttgcacagaagacaccaactgctccgtccagtacacgcagggaacgctcaacctctacagtgaagtctacgtggcctggtgtgtcgatgatgttgatacgatgctccaacgcgcctgccttcggcttggtatgatcttccagagtccaatggcaagtggtagctgcagatgtaattgtgatacctctctcctgctcctgctccatccagtccatggtagcggtaccttcgtgagtatcaccaattttataattgacaccggtatagtaaagaatacgctcggtcaatgtagttttaccagcatcgatgtgagccatgataccgatatttctggttctctccaacggatattctcttccagccaaaactttttcctcctatgattagaagcgatagtgtgcaaacgccttgtttgcctctgccatcttgtgcatatcctctttcttctttacagatgcgcctgtgttgtttgctgcatccatcagctcattagccagtctgtcttccatggtcttctcgcctctcttgcgggaatacatggtgatccagcgaagagccagtgcctgacgacgatccggtctaacctcgatcggaacctggtacgtagcaccaccgatacgtcttgcttttacttcaagtaccggcatgatattgttcattgcttcttcaaatacttcgagagccggctttccggtcttctcttccatttttccgaatgcaccgtatacaatcttctgagctacacctttcttaccatccagcatgatgttgttgataagtttggtaactactttgttgttgtataacgggtctgctaaaacgtctcttttctgagtatgtcctttacgtggcacgttacttccctccttaataatcattagatcacaggtactcacaacaatagttccgacacaatcctgcgaatgtgcctgctgcgtctcatgcaaggacttctatcttacctgcagccatacggtaaacagaaactccggcataaggtgaaacaaatgttactgtctgtgattctctaaaaccaaaacgcctgataaattatttcttagcgtctttcggtctcttagcaccgtatttggaacgggcctgtcttctctttgcaacacctgcagtatcaagtgttcctctgacgatgtggtatctggtacccggaaggtcctttactctaccaccacggatcagaacaacgctatgctcctgaaggttgtgtccctcacccgggatgtagcttgtaacttcgattccgtttgacagacgtactctggcgatcttacgaagagctgagttcggcttcttcggggtagcggtcttaactgcggtgcacacacctctcttctgcggtgcagaaacgttggtctgtttcttctgaagggaattgaatcctttctggagagccggtgcagtagatttctttacggatgtctgtctgccttttcttactaactggttaaatgttggcatttattctttcacctcctgatttgatatgcagaacgcatcttctgatttctgttctgcattccaaatgcctttctgcatttgtctgagcatgtgctcgtgtggctgcaagaacaaagtgttctacaataagtgtgcataatcacgcacaccttaacattatacttagagcctcactgcttgtcaaggagattttaaaatatatttcaccagttccgtatgtatcataaggcatcctccttacgatgttagccaggagctgctttggcagcggatagttcgcgaagcgaacgtgtctgtggtctgcatacggaatgtcctggtactatataaataggaagagattcttacttttttgtaaaaccactggacagtctgcatcctcgatgttaaaatagcgtgaaatcaagaagggagtgtttgctatgaaagttatacgggctttattgaagcctttgtcttttgttccggctctgtgcctgatgtacatgatcttcagtttttccgcgcaggacagcgtcacctcctctgcactcagctataaagtcagctataaaatcgtagagaccggtgcgaaagttcttggggaaaatctggaaccttatcagattgacagccttgccatccgtttccacggtcttgtccgcaagatcgcgcacatgaccgaatattttgcactcgctgtcgccgtcgcatttccgctttatgtttatgggctgcgtggaatatggctgatgctggtagccggttttatctgcgtcgcctttgcctgcggcgatgaatatcaccaatccttcgtctcaggccgttctccgtcaaagcgcgatgttgcgatcgattctttcggtgtcttctggggtattattcttgcccgcatcgtcggctggaccggccgcaagacgatattccggccattcagcgatgaggcgctgcagaaacgggatgaaaaaaaggctcgcaaaaagcaaaaaaaatatgttccctattccggaaatgcttacgataatccaaatagttatggaacatattcaaacaacagctatgaagcgccacggaataactttccgtatcagacttcacaaaacggatacgcgccacagtcaggaaatgactataatcagcctcagtcaggcgcttatccttatcagggtaatccaaacggatacacaccgtatccggataacgcctatggcgctccacagcaaaacagccatccttaccagaatcaaaccagtggatatgtgccgtatccgaataacactgcacagcaaaacggttacacgccatacccggaaatggatgatgactacgttcccgacaagctttccgaggatatgtctttccgaaaactaatgcatgacatcaaggatcagaaacaggaacgccataacgccgggaaacatccggttcataaatcggagtaaacaacaagagctatcaccttacaggatttttcctgtctggcgatggctcttatttttatgcctgtgctgttgtttcagtcaaaacgaaattcgcaattcgctttgttatttgagtgaataacaaagcggatcttaacgatccactttgtcgctatcttattattttacatttcaaagctttactcttcatccgaatcggcagcggtatcttctgcagtctcctgctcgtctgcaccctcttccggagcatcatccgtgctcagatccacatcggatgctccgtctaactctgcaagctcaagtgtatcgtccagtgcatctgcatcttcctcaagatcgatctcttcatcagatgccttatcatctgcaaccggctctgccttttcctcatgctttacatacttgtaatcatccgtacctgatgtatcaatctgtacattactgtaacgcttcataccagtaccagccggaatcagcttaccaatgataacattctccttcagaccgatcagcgggtcaaccttacccttaatcgccgcctctgtcagaaccttcgtcgtttcctggaaggatgctgctgacaggaaggagttcgttgcaagagaagccttcgtgataccaaggatgacacgttttccttctgcaggctctttgccctctgcgagcatctcctcgtttgtatcctcataatcaagaatatcaacaagcgtacccggaaggaattcggtatctccattgttctcgatgcgaatcttcttcagcatctgacgtacaatgacttcgatatgcttatcgttgatttctacaccctgcagacggtatacacgctgtacctcgcggagcatgtagtcctgtactgcctcgacgcccttgattctcaggatgtcgtgcgggttaatactaccttctgtaagttcgtcaccggcctccagatactgaccatctacctgtctgattcgtgaaccgtacgggatcaggtaggtcttggactcacccgtctcctcgtttgtaacgataatctctcgtttcttcttggtatccttcagtgttgcaagaccactgatttctgtgatgatggcaagtcctttcggttttcttgcctcaaaaagctcctcgacacgtggaagaccctgtgtgatatctccgccggcaacacctccggtatggaaggtacgcatcgtcagctgggtacccggctcaccgatggactgtgcggcaatgattccgacagactcaccaacctgtaccggctcaccagtagccatgttcgcgccgtagcattttgcacagataccgacgtgggaacggcaggtcaggatcgtacgaaccttgatcttcttgaacggctggccatctttgtccacgccttccttcataacacgtgcagcacgcttcggtgtgatcatatggtttgcttttacgattacttctccatccgctgtcttgatatcctcgcaggagaaacgtcctgtgatacgctcctgaaggctctcaatctcctcttttccgtcggagaactgctttacatacatgcccgggatttctccaccgtggctgcagtccatctcacggatgatcagatcctgagatacgtctaccagacgtctggtcagataaccagagtcggcggtacgaagcgcggtatcggacattccctttcgagctccatgtgcagacatgaagtattccagtacctgaagaccttcacggaagtttgacttgatcggcagctcgatcgtatgaccggttgtatctgccatcagtccacgcattccggcaagctgcttgatctgcttgtcagaaccacgggctccggagtccgccatcatgaagatgttgttgtatttatccagaccgctcagcagtgctttcgtcagcttgtcatcggtctctttccaggtctcgataacctctttgtaacgctcctcatctgtaatcagaccacgcttatagttgcgggtgatccggtctacgacttcctgtgcgctcttgatcatttccggtttttccggcggtaccgtcatatcggaaatggatacggtcatcgctgctctggtcgaatatttgtaacccatggatttgatattgtccagtacctctgcggtcttggtcgctccatgtgtgttgattactttctccaggatctgcttcagctgcttctttcctaccaggaaatctacctcaagcttcagctcattgcccggaacgctgcggtctacaaatccaagatcctgcggaaggatctcgttgaaaaggaatcttcccagtgtagaagatacgttgcctgtcatggctgtgccgtccggcattgttttctcaacacgcaccgtgatcttcgactgcagtgtgatatatttgttttcgtatgcaagaatcgcctcgttgatgctcttgaagaacttgccttcaccgagcacacccggtctctcctgcgtcaggtaataaataccaagaaccatatcctgagaaggtacggctaccggacctccgtcggacggcttcagcaggttgttcggggaaagaagcatgaaacggcactctgcctgtgcttctacggtcagcggaagatgaacggccatctggtctccgtcgaagtccgcgttgaatgcggtacaaacgagcggatgcagcttgatcgccttaccttctaccaggatcggctcaaacgcctgaataccaagacggtgcagtgtaggagcacggttcagcataaccggatgctctttgataacttcctcgagaacgtcccatacctgcggctcgagtctctcaaccatcttctttgcatttttgatgttgtgtgaggttccgtttgcaacgagttctttcataacgaacggtttgaacagctcgattgccatctctttcggaagaccgcactgataaatcttcagttccggtcctacgacgattacggaacgtccagaatagtctactcgttttccgagcaggttctgacggaaacgtccggatttacccttcagcatgtcggaaagggatttcagggctctgtttccagggcctgtaaccggacgaccacggcggccgttgtcgatcagcgcatcaactgcttcctgcagcatacgtttctcgttgcggacgatgatatccggagcgccaagctccagcagtcttttcagacggttgtttctgttgataatacggcggtacagatcattcaggtcggacgttgcaaaacggccgccgtccagctgtaccatcggacgaaggtcaggcgggataaccggaattacggtcatcaccatccactcaggacggtttcccgactcacggaatgcttctacgacctcaaggcgcttgatgattctcgcacgcttctggccggtggactccttcaggcctcttttcagctcttcggactccttttccatatcgatctcttccagaagctctttgatggactctgcacccatgcctgcacggaacgcatttccccacttttcttttgcttcctggtattctttctctgtcagcacctgcttcttagaaagatctgtagctcccggatccaaaacgatatagttcgcaaagtacagtactttttcaagagtacgcggagaaaggtccagaatcagacccattctcgacggaattcccttgaaataccagatatgggataccggagctgcaagctcgatatgtcccatgcgctcacggcgaacgctggatttggtaacctcaacgccgcatcggtcgcagactacgcctttatagcgaattttcttgtactttccgcagtggcactcccagtccttgctcggtccgaagatccgctcacagaacaggccgtccttctccggctttaaagttctgtaatttattgtttcaggcttttttacctctccgtgagaccactctctgatcttctccggagaagccagcccgatcttgattgcatcaaacgtcatcggctgatacacttcgttgttagtagttgtctctggcattgatggtactcctttcacacgctactcttcgtcaaaagtctcttccaggtcgaggtaatcatcatcggaagatgcgtcagcattgctgtcctcttccaggtctaccagctcctcaccttcaaagtgctgcttgctgaagccatactttccaaatgaatcctcttctttatcatggtactttctgtcaccttcaataacagagcggaggtcggtgtcgccgtaatcgatcgactccatgatctcgacttccgtattgtcctccctcagtactcttacgtccagtccgagcgactgaagctctttgagcagtaccttgaaggactccggaatacccggctcaggaatgttgttgcccttgatgatcgcttcgtaggtcttcacacgtccgacaacatcgtccgacttcacagtcaggatctcctgcagtgtgtaggaagcaccgtatgcttcaagagcccaaacctccatctctccgaaacgctgtccgccgaactgagctttaccacccagcggctgctgtgtaacaagggagtacgggccggttgaacgtgcatggatcttatcgtcaaccaggtgatgcagtttcaggtaatgcatgtgtccaatcgtagtcggactgtcaaaatactctccggtacgtccgtcacggagtcttacctttccgtcacgggagatcggcacacccttccacagtgctctgtggtcgcgattctcgtacagataatccagaacttccggaagcagctcatcgccatgcttctccttgaactcatcccactccatgtttacatagtcatttgcgagatcaagagtatccataatatcattctcgtttgcaccgtcaaataccggtgtagaaacgttaaatccaagtacttttgcagccaggctcaggtggatttccaggacctgaccgatattcatacgtgacggcacacccagcgggttcagcacgatatccagcggacgtccgttcggcaggaatggcatatcctctaccggaagtacgcgggaaacgacacccttgtttccgtgacggcctgccatcttatcgccgactgtaatctttctcttctgtgcaatgtagatacgaactgcctgatttactccaggcgccagctcatcgccgttctcgcgggtaaatacctttgcatctacaacgataccatattcaccgtgcggtaccttcagggaagtatcacgcacctcacgtgctttctcaccaaagattgctcgcagcagacgctcctctgccgtcagctcagtctcacccttcggtgtaaccttgccgaccaggatatcaccggcacgtacttctgcaccgatacggatgatacctctctcatccagatccttcagtgcatcgtcgccgacgcccggaacatcacgggtgatctcttccggtcccagcttcgtgtcacgtgcttctgcctcatattcttccatatgaacagacgtgtaaacgtcattcataaccagcttctcgctcagaagaacggcatcctcgtagttatagccttcccaggtcataaatccgatcagcgggttctttccaagtgcgatctcgccgtttgaagtcgatgcaccgtctgcaataactgtgccctcttccacacgctctcccttgaatacgatcggacgctgattgtagcagttgctctggttgcttcgtttgaatttcgtcaggtggtactcatctctcgtaccatcctccgcgcggatgatgatccgattggactcggaacgctctacgacaccggcacgctttgcgacaacgcacacacctgagtcaaccgctgccttcacctcaagtccggtaccaacaaccggagcctctgtggtaagaagcggaacggcctgacgctgcatgtttgatcccatcagagcacggtttgcatcgtcattctgcaggaacggaatcagcgcggtagccacggagaataccatcttcggggatacgtccatgtaatcgaacatactgcgctcgtactcctgcgtttcctcgcggtaacgaccggaaacgttcttgcggaggaaatgtccctctgcgtccagcgcctcatttgcctgtgctacatggtaattatcctcttcatctgcggtcatgtagacaacttcgtcggtgacacgcggatttttcggatcggttttatcgattttgcggtacggtgcctctacgaaaccgtactcattgattcttgcatagcatgcaagggagttgatcagtccgatgttcggtccctcaggggtctcaatcggacacattcttccgtaatgggaataatgtacgtctcgtacctcgaatccggcacggtctcttgacagaccgccaggtcccagggcggaaagacgtctcttgtgggtcagctcaccaagcgggttattctgatccatgaactgtgacagctgggacgatccaaagaactccttgacagccgccgttaccggtttgatattgatcagggactgcggggaaattccctcgatctcctgtgtagtcatacgctcacgcaccactctttccagtctggaaagaccgatacggtactggttctgaagcagctcgccgaccgcacggatacgacggttgcccagatggtcgatatcgtcatccgttccgattccgtactccagatgcatattgtagttgatggaagcaaaaatatcttccttcgtaatatgcttcgggatcagttcatgaacagatttccggattgcatccttgatgtcttccggattttcattttcttccagtattttttcaagaaccggatagtatactaattccgtaataccaaggctcttcggatcgcagtccacataagcagcaaggtctaccatcatattggaaagaaccttcgcattgcgctcctctgtctgaatcataacgtacggtactgccgcattctggatcgtatctgccagctcgcgtgtcacttctgtgccagcctctgccagaacctctccggttgtcggatctactgcatcctctgcgagtatatggcctgcaatacggttgcggaaaagcagtttcttattgaacttatatcttccgaccttcgccagatcataacggcgcgggtcaaagaacatgctcataatcagactctcagcactctctactgcaagcggctctcccggacggatcttcttgtagagttcaagaagaccttcctgatagttctcggaagtatcctttgcaagtgttgcaacaattttcggctcctcgccgaacagatctataatttctgcattagaaccgatgccaagtgcacgaatcagaaccgttaccggaagttttctggtacggtctacacgtacataaaatacatcattggagtctgtctcatattccagccatgcaccacggttcgggatgaccgtacaggaatagagctttttgcccagcttgtcatgggcaatcgcataataaataccaggtgaacgaacaagctggctgacgattacacgctccgcaccgttgataacgaacgtgccggtaactgtcatcagtggaagatcacccatgaaaatatcatgctcactgatctcatcattttctttattatggagacgaacccttaccttcagcggtgccgcatacgtagcgtcacgcgccacacactcttcaatcgagtacttcacatcgtcttcacacagtttgaaatccacaaattcaaggctcagctttccgccataatcctcgatcggtgagatatcatcaaagacttctttaagtccttcgttcaggaaccatttataagaatctctctgaacctcaataagattcggcatctcaagaacttctttccggcgcgaataactcatgcgaagtcccttaccatttgtaataggacgtatcctgtttttctccatcgatgtttcacctctgttctttctgcagtctgattcaacttttgggcataataatgccgcagggcataatcctgcacaatagtgcaacctacactctagcatatataacaatttatgtcaatacctttttgttcagagccaaataaaattccaaaaacaggcgtaaaacacagccattgcatgttttatgaaattttacccggctccgaacagagcaaaaaagaaaggaaacacgcgccaggaaataattccttctgcgtgtttccctatgctttcacacgtctcgcggtatacgctctattatttcagagtaacctttgcgccttctgcctcaagctttgtcttcagctcttcagcctctgccttggaagcaccttccttaactaccttcggagcgccgtcaactacttccttagcttccttcaggccaagaccagttgcctcacgaacaaccttgataaccttaaccttgttcgggccaacctctgtcagctctacatcaaactcagtcttctcctcagcttcctcagctgcgccagcgcctgctgctgctacaacaacgcctgctgctgcagatacaccaaactcctcctcgcaagcctttaccagctcgttcagctcaagtacagataactctttgattgcttcaataaactcagcagttgtcaactttgccatttctttttcctcctgattatataatgtaatttttctgtctgctctgtgcagacctcttcagcggcctatggccatccactgcattacgcagcacggcttttcaccggaaatctcttactcagcagcagcctctgtcttggactctgcgatctgattaagcacacgagcgagatttgtgatcggtgactggatgcttccaaggagttttccaagaagctcttctcttgacggaacagttgccagtgcagcaacacccttctcgtcatagtaattgccctcaacgacacctgcgatcatcttcagtgtcggagcctttttcgcatacttggaaataattcttgccggagctgttgcgtcgtctttagaaatagcgacagcgttcggtccttccagatgctttgccagcggctcatagtctgtaccctggaacgcgaagttcatcatggtgttcttgtatactttgtaggtaacgccagcctcacgcagctccttacgaagctctgtgtcagcctctaccgtgataccgcaatagtttaccagaacaacagcctgtgcgtctttgatgttctcagaaatctcggctacaaccggtttcttcagttcaacttttgccatgaatggtgcacctccttatagatttgagtgtaccgccgtataaacaggaatatcaaaaaacccctctgcgcacagaggggtagtcaaattcttccttagaatcttatactcctcggcaggcgttttctccttatgccttgcggcacctgctgtcttcggcagtcatcgtctaacatagtaacacactagtctgaatatgtcaagcattttttatattttttgtatgcccacgcatctgttattctgcaaaatctcgtttttcgcagattttcttttgttttgcccgatttgtagctgttcagagccaagcagattttcatgcaaaagtgtgaatcatgcttgcatgaatgaacacttttacatggaaatctatttggcggatacgccacaccgacgaaatgtgcagcattttggaggtggttctgaacagttaccccgatttaaagataaatgtagaaacgcaaaaatccccgaagcgcgtaccttcggggattctgtgagtcttacttaagcaagttttaccggattgagctttacgcccggtcccattgtcggagccagcgttacgctgcgcatgtactgacctttcagtgctgccggttttgctttattaattgcctcaataagcgtctggaagttgtcggttaactgctcctctgtgaaagaagcttttccaattggcacatgaatgatgtttgtcttgtccaatctgtattcaatcttaccagccttgatatcgttgacagcctttgttacgtccatggtaactgtgcctgccttcgggttcggcattaagcccttcggtccaaggatacggccaagacgtcctacaacgcccatcatgtccggtgtagctacaactacatcgaagtcaagccatccctcgttctggatcttcggaacgagctcctcagctccaacgaactcagcgcctgcagcctttgcttcgtcagcctttgcattcttagcgaatacaagaacacgaacctgcttacctgtaccgtgcggaagaactaccgcgccacggatctgctgatcagcatgacggccatcgcagcctgttctgatatgaacttcgattgtctcatcaaactttgctactgcagactttttcacaagagcaatagcgtcatttacatcgtagagtgctgcacggtcgattgcctttgcagcctcagcgtatttctttcctcttttcatattaaataacctcctggtggtattcgcgggaataaccctcccacttgttcaacgtttactcttcaaccgtaatacccatgctgcgtgcggtacctgcgatcatgctcatagctgcctcaatgctgcctgcattcaggtccggcatcttcatctcagcgatctctctcactttatctttggagatcgtagctaccttcgtcttgttcggaactccggaaccagatttcaggttgcaggccttcttcagcagaactgctgcaggcggagtctttgtgatgaagctgaagcttctgtctgcatatacagtgataacaaccgggatgatcagatctcccttatcagctgttcttgcattgaactcttttgtaaactgaacaatatttacaccatgctggccaagagccggtccaactggtggtgctggtgttgctttgccagcaggaatctgtaatttaatataacctgttactttttttgccatgtcaggcacctcctatgtggtaatgtcgggagttctccctcccacgtccgacggactgctccgcggaagattaactgttacatgatttgggtctcaaaaaaacacagtttatgcttttttgatttctgcgaaaccaatctcaaccggtgtttcacggccgaacagttcgatgttgattgtgacgatctgtttgctttcgttgatagactggatgacacctaccgtgtctttccacacaccgtctgtgacggtcaccatatctcctacggcaaagtcgatggaaatgttgtctgcctggatgcccagattgaacatctcctggtcagtaagcggcaccggcttggatcccgggccaacaaatccggtcacaccacgcgtatttcttactacgtaccaggtgtcatcgttcatcaccatgttgagaagtacatagcccggaaacatctttttctgaactattttcttcgctccatttttcacttcgacaacatcctgaagcggtacccgaacctccagtatctgatcttccagatgccggttctcgattgtcttctcgatgttggcctttactttgttttcatacccggaataagtatgaactacataccagcatgcttctgccatacaatcacccttgtcctcactcatcttttagaaactgatattcaccagaatgtcgacgccatactggaaaataaaatccagaagcgcgatcattaccccaagtacgatagaaacggcaacaacggcaccggtctgctttaccagcgttttctgatccggccagatgatctttttgaactccgctttcaggccgttcatccagctctccattttcgagcctttttctgtcttctctgtttttgccataccttcacttcctttgctcgaatctaccgattatttggtttccttgtgtaatgtgtgtctcttgcagaaacggcagtacttcttcgtttccattctgtccggatgagttttcttatccttcgtcatgttgtaattacgctgcttacactccgtgcatgccaatgtgattctaacgcgcacaacttccacctcgctctcctatttaatgtacgccggcagcaaacgctgtcgttttttgttttaggcacaaaaaaaaagcctgcttccataacgcctgtttactatatcacagggcgctatgggaagtcaagctttttctgtcagtaaagaagacattcgccatccgcgttcactgcctgctcacgaacagttacaggtagcggatttcatacaccggcgccttattttcttccaggtccattgtaatgtagcttgggcggcgcccctcctgacgcggaaacgaaaggcttcccggattcaacaccgtcagctccggatcactctgatccacgaatggcttgtgtgtatgtccgaacatcgcgatcgtgcagtggttcactttcgcctcctccacaagatcacgtgtaccgaccgacacgtaataataatgaccgtgtgtgatcaaaatcctctgtccgccaatctctatgatctgtgttttcggaagattggaaaagaaatcacagtttccggctaccatatgcagcgggcaggtcacaagattccggatcgcatgctcgcctttttctgaatcgccaaggtgaatcagatgatccggcatcccctcttcctgcaggatcttctccagattttcttcatggctgtgtgtatcacttataatcataactttcatcatcttatctcccctgctccgctattttcccagacagcctgcaagctgtttcttcatttcccgaagcgcttttccgcggtgactcagctcgtttttcttctccggagaaatttctgcggacgtacagccctcctccggcagataaaagaccggatcatatccaaatccattctctccccggatttcatgggcgatcagtccctccatcgtgccgcggcttgtcagaatccgtccatcaggaaacgcgcacgcaatcgcacagacaaaacgcgccgtccgcttttcttccggtataccttcaagacggtcgatcaggttctggtttttaatatcataagaagtatcttcgcccatatagcgcgctgagtaaatacccggctccccgccaagtgcgtcgatctcaagtccggagtcgtccgccatcgtgatctcacctgtctttttcatgatcgtccgcgctttgatgatcgcgttttcttcaaagcttgtcccgttttcttcgatatctgccgctgctccagcttccttcatcgatacaaccggaacgccgagatctccgagaatcattcggatctccctcattttcccctcgtttccagttgcaaatataattcgcttttccacactttttctccttttcttactctttgtgcctctctgtacggtctaagctgcatatgacagtcaaagcggagctttgcaatccgctgctgtttgctcataacccttatcatgagcgagtctgtttcgcttacgagattccgcatgcggcctttcccataatagttcataaccgagcagctacttgatcagaatcatttgctcactctactcatctgctctgtgagtatacgctttcaggcacacgttacttccatatttttcttctgtatgatcccagtcatttccatcccggctgataaaaccgtattttccgtctgttgtgacatttttcgcatccgggtctccccgatattccaccgccaccggatttttgacatccggcgtattgatatgcacgagaagtgcaaaccgttctccatcccgcagcggaatctcctccgataactccaccgtataataaccgctccaccggaatgtaccgcgtttcaaaagccgccgctttgaaaaatcagccgttccagaaggtgtctccaccaggtacagttcataggaagtatcttctccaaccgcataaaatccggccgccgcgagctgttctccttcgcctgcgcgataaacatttgcaaaccagcactctccgtcatcgtacccctggcgcccccgccagccgcagtcatccgtctggtaaatcctgtcataattgtctgccggttcgatctttgtgtacgccatcgctgttccggcaatgtttgcgtccgcataggagacatagaagattccctgatctccaaaatcctctccccagctgttctggcagataaacgcgccgtcctgatccggagtctgtgcaaacagaaaccgggaaaagctgtcatcccacccaaggatcaaaatttcgtggttctgagtctcctcctgtgggtcataataagctgctgtccattcattataataacctgcttccggtaaaaccgtttcacggctcatgtaaagggaggtctgtatcgccccatacttttgcaccgcctccttgatttcctgacggttcgctccgtccagcagctgaatttcctgcacatgaactgccggagacagattgcccggagaataaccgtcaccatagggatcttcctcttccgtcacaggtccctgccagccgtttaaatacgccatcgtcatccgtgcatccccgccgtcatttaccggcacggtaaacgcattgttcagcgccagatgatccgctgagaaaacaatccgctgttctggcagcagtgcactttccagcgccgatgtcgccgccagtgcccagcaggtgccatagctgccttggctttttacggttggcttccggccgcagtcgacggagctgtaacgagaagggagaatgccgggcaaatccggcaaaatcaggtctggaaataccgccgttctctttcctgccgtggttcttatcccgtttgaaactgcaaaatgtcttcccctggcggaaaacgcattcacggattcaacattcagccactgcagcattccaagcacagccgcagcgcaccaggtaccgcacagccatctgctcttatttttcgcgcttttcaatcgcattccccgtttcacggcgtggcgggcgaggtccgatgaactgataatagtacgttttgatcatgccattatagatcttacggttcttgtccgccttgcgtccaatgtatttctctgcatcctcataagaagtgatcacatattccgaccagctgtccagtcttgagaatgcctgcccgatctctgtatacaatgccggaaggtttgcccggtcctcgatccgctcaccgtacggcggattcgtgatcacaaagccgtactttttcggatgattcagttcactgacactgcgtttctggaaatggatcaggtgatcaacaccagccagtcttgcattttctctcgcggccctgatcacctcgccgtcgatatcatagccctgaatatccgtctctattttatcatcgatcagatcctgtgcttcctccaccgcatgataccaatgcttgcgcggcaccagattcttccagttctcagcaagaaaactgcggttcatgccaggtgcaatattagctgccatcattgctgcctcgatcggaaaagtgccgcttccgcagaacggatcaaccagaattcgatccgccttccacggtgtcagcatgatcagtgctgatgccaacgtttctgaaatcggagcctttgccgtcagcttccggtagccgcgcttatgcagcgattcgcctgtcgtatccagcccgatcaccgcctcgtccttcatcataaaaatacggatcggatagcttgctccatcctccttaaaccactcgattccataaattcctttcaggcgttccacaatcgctttttttacgatcgactggatatcagatgggctgaacagcttgcttttcacagatgttgccttcgtcacccagaatttcgcatcacttggcagacaggcctcccatggcagtgccttcacccggtcaaacagttcctcaaatgttgttgcatgcaccgagccaaccttcagcaggatacgctctgcactgcgcaggaaaatattcgctactgcgatcgcctctgcatccccgagaaacgttacccttccatcctccacactgctgatctcatagccaaggtccaggatctctcgtttgagcacagcttccaggccgaaatggcacggcgccatcagttcatataattctctcatgccttctcctcatctaagtgaagcttcacttcctttattaccgtaccatcaaacgtgagaattcgaaatacgccatcctccagcaccgcatacgtcggcggattgccctccttcggaatcgaaacagaacctgggttcaggatcagaatcccgtctttacgttccgcccgaagtacatgcgtgtgaccatgcagaagcacatcaccttttttcatcggcggaagattcttttcattataaacatggccatgcgttgcatagatcgcacaggtaccatcaaataacagcatataatcagcaagcaccggaaattccagtaccatctgatccacctcggcctcgcagtttccgcgcactgcataaatctcatctttatgcccgttcagcattttgatgacttctttcggtgcatactcctttggcaggtcgttacgcggcccatgatacagaatatctccaagcagtaccattctctgtgcattttctttttcatacgcttccagcagttttctgcagtaaaatgcagaaccatgtatatcagatgcaatcaacagcttcatgttttttcctcctgataaaacggattgttttgttttttcgaaaatcggtttattctttatcttaatgcccacccgctttgctgtcaatccctatctgaacgccacatccttctttgctgcgtctctcctggctgaccgcctgcgtttccagccactctgtcacacgtcttttcagatatccggatatctgcccgccacaatatttctcccgcggtacgcccgatagccgcccaccacacttttcacctgatatcccttttcatccatacggcgcgccgcttccaggctgaaccctccgcggtcacagtacagaatcagcagccggtccttccccggacgcagcagttcaaattcctgcggcggcacatttaaggctcctgcgatatgtcctgcctcatactcttcctctatcctcaaatccacgatcaatactcgtaaatcatgaacatactgatccagttcttttgccggaatcgtctccagcatcacttccagcctcccatcacctgtacctctgctgtatcatatgtaagaaaccagggaaggtgctgccgttttttgttccatgcaggtacagcagccgacttatgtaaaacaggcattcgcaagccagtttttctgcttaccgtgcttatctgtctctatataacagagattaaaacgggccgggattttctcccggcccgcaccgttttgcagctgcataatcacagcagagatcgcacttactcttctttctgctctcctgtactgaaaaattccttttttctttgctgcagttctcattcaggatcaatactcatctttttcgctcttgtacgaattgtggcagtcttcctcatactcagactgttcgtttctcgcattgcgtgctttcgtattctccgcattcctgtatgcagccttgttttcatactgcattcctgatacgtcttctctttttgcctttgcatttgatgtccttgaagtggtcgtattttttgccattttcacagcctcctgcatattattgcacagccgcacgggcagtgccgcagatgcctgaaatcctgcatttcaacggcttctgcattctctagtatgccgataaaattataaaatatgtattgcaattttctggaaactgtattataatttgacttgtaaaaaaacttacccttcaaaacatttttttacaaaccccttattaattatttatactcccctcgaagcggtcggcagctcccctgtcgaccgtttcactttgtattttgcagccgttcagaacaaggcgacctctgagcggcactttttttcacgagtcaaagcagatattcacaatccgcttcgctacttgctcataaccgatcagctgcttcgcagcttatcaggagtggcttgtatcggttaaaaagacagccggacgttttcccggctgtcttttttgtcgtatttgccaaatgaatgtaacttctccacaacctgtctttttccgcgttcacagatcacaggtttctccggttttactgcactccgctcttataccgcttcactgtgatgcgttccacctttgcgccctctccgatggcctggcaccatatcctcaccgccgcgtcctgcaaccactcgccaagcaccagcgccgtatccactgtgccgccaccgaccaccggtgtgtctttctcggaaaaatagattcttcccatcacatgatctccggcgtaaacggtaatcttcacattctttccggcaaaaaacagcttcagatcctcgcctggtgccgcatctgctttcacctcaagcatcttattttcgccctccgaaagtgcaagcggaaggcgcgttcctgccttttctccccgcttcggttcaactgctccatactggcactctcgcactttccttccggcaaaaagcgtaacgcttcccatctcatccgtgtaataccgtctgtaaacgtacagggtaagttccagttcaccctgaccggcataggcggaaagatccacatatggatcatcctttaccacacttgccgctttcttattattaacatagaccgtaatcatgcactctgccttttcaaactgaaggaacagcccgtcctctcccttcggcgagcagatcgtccggttgatcagtgtcaccagcggcgaggcagcacggttgtaaccgtccgcattcatgatggcattgtacggtgaatggcggaaatagcaggtctgccgtggcatttcatctgtctcatacccccgccagtcatttgtcagatcctctgtgcgcgtgatctgcagtaacgtctccattccttttaacgagcccatccgaaggctttttacacggatgtcatcaaaatttgcatgcccccagatctccgtcattatctgaagtgctcctgcctcaaagttccggaccgcagtgcttccgttagcataaaaaacctcctttttttccttctgggttatcgtgacaatatccgcaagaccagacagaaggtatgcccccttttcgggaagttccatctcgtatcgcccaattccccggtactgtccgaaatactccatcggaacaatctctccattctcgcactgcttcgtttccagttcacagtcataaatggtcgtccgcacaccggatacattttcttcctgttctcccggcgatactgcaagcggcggtaaaaacggcaatccgtgctcagagacgtaatcatagcggccaaagcagaacagcaggcggcccttctgtactctccgtccattttccggctcaccgatacagatcgtatcgctcacccctttttcctcaaccgtaagaactgcattgccgattccataaagccatacgacagttcgtccatcctcctctaaaatggaagccagttcataattcgaaaaacagatcttcgccgtctctgtaacttttacattcaccggcagcagcttcgtctcgcggcagtccatactgatttcatacgtctcaccgtctaacaaaagtcctaccgtctgtttttccccaagattcgatacatcaagcaggctgcccatatctgttttcagctccggcacaacttcattgacgcgcacaccggaaagcacagcgctgcttttctccggcttcccggtcccgatcgccgcaccaaacgtatgcagcagacccgcaaacagcctcgcctttaaaattgcctcatcataatttcccgctgaaccgatcatggacttaaaatcataatccgtcgccataattgctaccggcgcatcctttggtccccagttcgtaattccggtataaaaatccatcgtagttccggaggtctgattgtacggaccaagcagttttgcgccgcacgctaaaagcctcttcaggaaatcgtgctccctgtttgtctccgtgatcatgaacggcattttacgaagtgcagcggcttcattcaaatgcagtgcccgctgctccagtcccttaaaatctcccggtgaataaacgttaaatgcagagtacaatccatccgtgagtcctccgctctttacaatatcatcctggccgcagcaataaaacagagggatctccatgccaaaagactccgccatcttcttgagcttgcccatgtacgtgaccggactcttgcagtcataaaaatccagctcattttcgatctgcatgcagataatactgccctgctttgtaatttgataccgatcaagaatcggaagaatatgagaataccaggtacgcatcgcattcaaaaatgccggatcgtcctgtcttaccggaattccatctgcgtaaagccatgccggaatcgcaccgccgtcccactctgagcagatgtacggacccggtctcgcaatcacaaacagctcattttcttttgcaatcttcaaaaaccgctctacatctcggttctcctcaaagttccattttcccggcgccgtttcatgataattccacgggaaataaacgtcgatcgcgttatatcccgccgcctttaaaagcttcatcctctgttcccagcgctcctgcggaatccggaaataaaataaggaagatgccagaatcacctgacagctcccatcgatccagattccattttcattcagttcaatcttcatatgtacctcccatcttctgcgtacctgtccgtctgatttaaccgagccaaacagcgaaacggattacaaatatccgaatgcccagggacccctttgactcaggggcggataaaccacccctgaaccaccctgaaatcccaccaaaacagatcttcacagttcaacttcgccaaagtttcgttactgcttttattgtatctgatttcgttttactgtgcaagattgtcaaacgccgtatccaactcgccaagcagtgcatccacatcgaaatcgtcacccatgcacgcattcatcattgtctcaaacaaaacatcctgatgctcggaatccagtcttgtaagtcctgcttcgctgaaggactcttccgacggataattcatgatctcagccagtgccggaagcatatcataatcgcctgctacggacggcatctgatgtgcctgttccgcataaaccttcatggaatcctgagaatagatcagattgtaaagattgcgtgctgcttcctttgtcgcctcatcctcgaaattataaagtacaagctgctgtcccggctccttgatcatcagcgcttcttccggattctcgcttaccggcatcgggaacacaccaagattgatgtccggattgtaagaactaataccatctactgcccaggaaccgtgtacacacattgctgcctctccgtttgccaccatctgctgtgcagaatcccaggaagtaccgaatgcatcgtcattccagtattcatgcagtgaccacgtggtctccatctgcgtcttgaagctctcagaatcggcaaatttcatgctgcgatccatcagcttcgcccagaaatcgccgtcctcatgccagcacacctcgtcataaagcgcacgtggataacagctgaaggcccacgcttctgcgaatggggttgcaaacggggtaacaccgttctctttcagcgtatcgcatacctgctttaactcagaaagtgtcttcggttcttccagtccatactgttcaaacagatccacattgtaaaatacaccgtaaccggacagttcaatcggaatgccaagctgttttccgtctaccacgccctcttttaaaagatcggcattcacattgttcaggcactcaaaatcgcttaaatctgcgagataaccggattcattgtaaatcgcaagatccgcattgcttgcaaggtcaaaaattgccggcgcatcgtctgatgcgagcttcgtctgtaaaatggtcttgtgattgtctgcatctaccgtctcaatattcagaacaacgttgtcatattttgcctcaaactgctcctttacgctctgtagccacgcctgttttcctgcctccgcataatgattcagccaggtcagcgtaatcgtatcgccggaatctcccgctgccattcctgtaatgcccattgatgccgccattgccgctgtcatcatgactaccattgttcttttggatccgttccgttttttcatgttgtttcctccttaaataaatttttatattctttctctgcagttcatccattcaggaacaatctgtacagagatatttcctccgctttttcacgacttcactgcgcctaccgtaattccatttacaatatacttctgcataaacatgaaacagagcaccaccggaatcatggaaagaatcgctgccgcaaaagccattccataatcagccgtatactggccgaaaaagtaaaactgtttgattgtaatcgtccgcaccgcctctttctgaagcagaatcacggaaatattaaagtcattccaaagccacatgacatgcagtgaggcaaccgtcgccgagatcggcttcagcagtggaaacgtaatcagccagaaacttttcatctcgctgcatccgtccatatacgcagattcctcaatttctcttggaatggacttcacaaaaccaacatacagaaacgacgcgtatgcaatacttgtgcccaccagcatcagtatcatgcccggcagaaaattcaacatatgtaacgtcttataaatcttgtagaccggaatcatcaatatctgaaacggaatcatcagcgatgccagatagagcttatccaaagcacggaacactcttttttcctttgcataacgcgccaccgcatatccgctcatcgacgcacacagtacaatcagtaccacggacggcagcacaacaagcgctgtatttcttaaggaatggacgaaatcgcttcggatcatcgcttcactgtaatttttcagataaagcgtttccggcagtccgataaccgattttgccagatccggcttgcttttaaaggaagtaaggactgcaaggctgatcggaagcacaaagactgccatcgccagaagtatcagaatcagataaacaatagtccagatgctcatttttcgttttttcatagctcaacctctctttttcggaagaaagaggacaccagaagtcccacgacgatcagaacgaatgcaaacagcagcgatactgcctgtccatatcccgccttataatatttgtacagattttcaaatacgtagatcgacacagtccgcgaagaaccgcccggaccgccggaagttgctgacagtgttgtggcaaactccttcagccatgaggtcagggtgagcgttacgcacacggaaaacgacggcatcagaagtggaagtgtgattttgaaaaaccgctgaacgccggacgcaccgtccaccgttgccgcttcatacagttccattggaatatttttcagtcctgagaggtagatcagcatatttgtaccagccgtattccagacgccgatgataacaatgccgagaataacatactttgaactgccgagtatattcttccacccaaagatcttcggaaaaaattcatgatacagaaacttccacaaaaacgcggtcagcacggagcttaagcagaccggtataaaaaatgccacccgtgccaccgtattgagcttctggtattttccatttacaaacatagctaaggtaagcggaatcacatttccgaaaattgtgccgagcactgcaaattccagcgtattcagaaacggaccacggacacgaatgtcctgaaaaatcatctgaaaatttttcagaccgacaaaattgtatttgattcctacgccatcccagtcggtaaatgcaatgtgaaatcccatacagaacggaatcagcatcgcaaacgcaaagaaacaaaatcccggcagcacgaacaaatactttgaaatgttctttttctttctcatatcagccccttctttcacacatccagcagcacacgcaccacaccgatatcgctcgatacccacagtcccatatcgcactcatcaccggtgcgctctctgtccgctgtaaatatgccgtttttatcaaaatgtccttcatctacgcacagatagcagccattgttcgcattcag

SEQ ID NO: 2282 - DNA, 18585 bp, Unknown
  16S sequences of unknown bacteria
ttgcaaatcaaggaaaaatcgaaggagaatgagtatatatgaaattaggtatcgtaggactgcccaacgtgggaaagagcacgctgtttaacgccatcacccgggcgggagctcaggcggcgaattatcctttctgcaccatcgaacccaacaccggcgtggtgcctgtgcccgacaagcggctggacgtgctggcggagatgtatcatcccaagaaagtgactcctgccaccatcgaatttgtggacatcgccggtctggtgaagggcgccagcaagggcgagggactgggcaacaagttcctgtcccacatccgggaatgcgacgccatcgtgcatgtggtgcggtgcttcgaggacgagaacatcattcacgtggacggcacggtagacccggcacgggacatcgacgtgatccagctggagctggtgctggccgatctggagaccatgcagcgccgggtggaaaaggccaaccggcttttgaagggcggcgacaagaagcaggtgcaggaagtggagctgggtcagcggctgctggcgcatctggaggaaggcaagcccgcccgcaccttctccatgacggacgaggaaaaggagatcgtccacagctggttcctgctgacggacaagccggtgatctacgcggccaacattgccgacagcgacgtgggcacggatgaaagccagctgccctttgtgcaggcggtgcggaagatcgccgacgcggaaggggcgcaggtcttcacggtcagcgcgcagatcgaagaagaaatcgccaatatggagccggacgaaaaagcggagttcctggaagaactgggcattggcgaaagcggacttgaccgattgatccacgccagctacagcctgttggggctgatctccttcctgacggcgggcgaggacgaatgccgggcgtggaccattacccggggcacgaaagcgccgcaggcggcgggcaagatccacacggattttgaacggggcttcatccgcgccgaggtggtggccttcgacgacctgcggacgctgggcagcatgaacgcctgcaaggataagggccttgtgcgcagcgagggcaaggattacgtgatgaaggacggcgacatcgtgctgttccgctttaacgtataagaccggaaagggagtttgggaaatgagcagactgtccttcttttttaagcggctggtgcgcatggactggaaagccatgtggaagaccacaaaaatcctgaaggagcggagcggaaagagccgcctgtggcttctgtgcgacatgctgcgctgcgcgctgaaatataacgcgggctacgtggattacaagatcgccgaaatgtaccggctgaccgacgagcagaaaaagacccagatcacccggggactgagcaacaccatcgtccgcaggatgaacgacaaggcctactggtatctgttcgacgacaaggccacgttcaatcggctgttcaaggacgaggtgaaccgggactggatcgagctttccgacgagctgagcttgaaggactggaaagcgttccttgaccgaaacgacgacctgatctgcaagccgttggaaggcagcagcggcgtgggcattgaacggcacacgaaggaagaatggcggggccgggaagaagcgttcctgcaggagctgcgggacaagaagatcggcattgtggaggaacgggtgatccagcatccgaaaatggcggagatgtgcccgacctcggtcaacactatccgtatcgctacgctgctgggcgacaaaaagcagggcatcgtttacgcctttttgcgcattggcaacggcaaggtgatggacaatgtggatcagggcggcatggcggcgcgaatcgatctggaaagcggaacgctgttgaccgttggcgcggacaagcagggcaacacctacaccgagcatcccatgacccatacgccgatcatcggattccagattccttatttcaaggaagcctgcgatatgtgcctgaaggcggcccagaaggtgccgcagatgcgcttcgtggcgtgggacgtggctattacggaaaaggggccggtgttcatcgagggcaacagttttcccagtcacgcggtgccgcagttcgccgctcattacccggacgggatcggcattatgcgggagttccgggaatttatcgatatttgagaaaacagaagcagggagcgaacgtgtggaaaacgcgggcgctccctgctttttgaaggggaaaaacgcggtttttggaatgaagagacacaaggagacaaacggaaacatccgtatacagaaaactgtgatatagtatatcctgtcaaaggtgggggacagaaaccggagaggctgaaaggccgtctccggtttttgtatgccggaaaaggcggaggaagaaggcaatgaatgcagcggcggaaaaagagccggtgtttgggacggatgaaggggaagggctgaatgttggaaggaaaaatgaatttttggaagggaaaatggggcaaacgaagggaaatgttggctgcccggagagtgagagtattgcgagtgaaagggataggctgcgaacgatggagatggctggacagttggaatgcggagggaaacgcggagaaacggcaacgattgaagcgggacttggagaagccgggctaaaaagcgacatatggagagagacaggggagaacggccaagtggaacgtgaactggagtgtaggggatcactccctgctagggacactgtacttgccggggaaaatgagctaaaaagcgacacgcggcgagagatagaggaaatcggccaagtggaacgcgaaccggggtgcagggggtcaccctctgccgaattgaggaacaggggtactgtccctgctgggaaaaatgacctaaaaagcgacacgcggcgagagcaggggcaaactggccaactggaacgcgagctggggtgcagggggtcaccccctgccgaattgagggacagaggtactgtccctgctgggaaaaatgacctaaaaagcgacacgcggcgagagcaggggcaaactggccaactggaacgcgagctggggtgcagggggtcaccccctgctgctgttgcggatgcggaggaggtgctggcggcgctgacgcggattttgcgcggagaggaagaagcgaaaaccagcgaggtgctgcgggcggcggaactgctgggaaaacagtatgggctgttcggcgaccgggaaggagcgcccacagaagccccgaagattgtgatggacgtgccgggacggggggaaaagaagtgaacgtgaagctgggagaaaaagtgccgccggccttcgaggggctgttctgggatatgtatgagggacggcacgacgagtactggctgaaaggcgggcggggaagcggaaagtccagcttcgtcagcctgatggcgctttgcttgatgctgaaagacccggaggcgaatgtcatcatttttcggaaggtggcggaaagcctgcgggaaagcgtactggcgcagatgcgctgggcagcggaggaaatgggcatgaatgggtactttcagtaccggctgaacccgatggaaatgacctatcggcccacgggacagcgcattttgtttcggggcgcggacgacccggaaaagagcaagggcgtgaaattgcccaagggatatttcgcactgctctggtttgaagaagccagcgcttttcgcggaatggaggaaatacggacgatccaggccagcgtgcttcggggaagaagaggcgtgacggtgctgagctataatccgccggtcagcgcccaaagctgggtgaacgcggaggcgctgaatccctgcgagggaagagtggtgcatcagagcgactaccggcagatgccgccggaatggctgggcgagacttttctgaaacaggcggaacggctgaaaaaacgggacgaacgggcctaccggcatatgtatctgggggaagccgttggcacgggaggaaaggtgtttgacaatctggacgtgcgggcgatttccctggaagaacgggatcgtttcccggtgcggtacgcggggctggatttcggatttgccaatgacccggacgcgctggtgttgtgcgcgtgggacaagcggggaaagcggctgctgctgttggaagaagcggtgcagacaggacagagcctggaaaaactggcggaaagctgccgtaaaatcgcgggagagaagatcatccgctgcgacagcgccatgccgcgggaaattgccgaattgagacggagaaacgtcaacgccatcggggcgaaaaaaggggcgggcagcgtggagcacggtattcgctggctgaaggaactgaacgccatcgtcatcgaccgggaaagatgccccaaggccgcccgagagttcagcctgtacgaatacgcccggggccgggacgggtgcttcctgaacgaatgtccggatcgaaacaaccacaccatcgacgcagtgcgctacgcgctggaaccgctgatgaccgaacgggtcgtgcggctcagaaaggggagaatcgaatgatcgtgatcgaccgggaatggctggcggacggggagccgtcgccggaactgatctgggaagtgctgaagcagttcgacggggaacggtttcggttgaacgaactgaaagattattacgatggggagcacagcatctccgagcggtggcggggaaggggcgcgccgaattaccggctcagtcatgatctgccggggtacatcgtggcgatgaccagcggctatctgacgggcgaacccattcagtacacggtcaacggggaatggacgggctttcagacgctgctggactgcctgcgccgcagcgcggcgggcagcgtggacagcgaacttgcggcggacgcggccctttacggcaagggcgtggaaatgtattacgccgatgaaaacgccatgccgcggctttgccaggcagacgcaagaaacgcctttgtggtgtacgacaacaccgtggagcacaggccggtcttcggcgtgatgctgacggaacggcggaaccggcattttcagcggacgggccagcgaatcgaagtgatgacggaggaatggaacgtccattatgagcgaaccggcggagagatccctcgggagacggggcgggagaggcacttcttcggcggcgtgcccatgaccgaatactggaataatcagcgggaacggggcgattttgaaggcgtgaaagcgctgatcgacgcttacgacgcgctgcagagcgaccgggtaaacgacaagcagcagtttaccgatgcgttgatggtgatctacggggccacggtggaggaggacgaagcaggcagaagcgtccagcagcggcttcgggaaacgcgaacgctggaaatgcccgctgcagacgcgcgggtggagtatctgacgaaacagctttccgaaagcgacacggagatcctgaaggacagcctgaaggcggacatccacaagctgagcttcgtgcccgacctgaccgacgaggcctttgcgggaaatatcagcggcgtggccatggaatacaagctgttcgggctggaacagctgatgaggggcaaagaacgctggttccgggaagggctgctgtggcggcttcggcggatggtgtattttctgcggctgcggggctgccgtctgccggaggcggaggagatcggcgtgcatttttccagaagtctgccggtgaaccggctggaagtggcgcagacgctgaaagcctatgaggggttagccccgaaaaagctgctggttgggcaggtgccctttgtggaggatgcggagaaagccatggaagaaatggaaaaggaaaagaggagataaaaagagctgccgagggcggctttttttatagaaacaaacggaagggagaaaagagcatggaagaaatgacggttcacgaacccacggaaatggaacggctggcgctggaacgggaacagacgctgcggcagcgggaggcggcgctggagatgcgcgaacgccgcgcccgggcgcaggagctgctgacccagcgaaatctgccggcggaactgacggactgcctgaatttttcggatgacgagagtctggaaaaaagtctgaatgcactggaaaaggcatttctggaacaggtggacaaggcggtgggcgaacggatgaagggcgcggcgccacgaagcggggaaagcgcgctttatgccggtcagcttcggtcggcattgggactgaaataaggaaaagaaaaaggaggaaaaagagatggctaattcgatcgcactattcaaacaatttgtgccgctgctggacgaggtatacaaggaggccagcaagacggcggtgctggacggccgcccggagctggtgcaggcgggggcgaacgccaacgagctggtgatccccaagatgacgatggacggcctggcggactacagccgcaacggcggctacgtgggcggcgcaatgaacctgaccaacgagacggtgacctgcaacttcgaccggggccgtatgttcgtggtagatcacatggacaacgcagacacggcgggcgtggccttcggaatgctggcgggggaatttatccgcacgaaggtggtgccggaactggacgctttccgctttgcaacttatgcgggcgcggctggggtcggttcgggcagcggtacgctgaacgacggagcggcggtggtggccgcactgcgggaggccatcaacgccatggacgcggatgaagtgcccatggaggaccgggtgctgtttattacgtccggcctgctgggcaaggtggaggatctggacaccaccaagagccgggaagtgctgcgccgcttctccgacgtggtggcggtgcctcagacccgcttctatacggccattcaccagaacagcggcacggtggtgcagaagggcggcgagacggccagcgacgagacggcgggaggctacgccaaggatgaaagcggcaaggacattaactttatggtgatccaccggggcgcggtgatccagttttccaagcatatcgcgcccaaggtggtaacgccggaacagaacccggacgcggacgcgtggaagttcggctaccgtcaggtgggcgtggcggatgtgtacgagaacaagaccgccggtatttacgtgcatcacaaggcctaaatgcgcccggaaacagtgaaaggagagccgcatggacaagcagaaagggctggaagagctgcggcttcggctggaaatttccaatgaggagcaggacacgctgctgacggcgcttttggaggatgcggagcagtatgcgctggggtataccgggcgaagcgtcctgcctgccgcgctggaaggggcggtgctggaactggcgatcctccgctaccgccgacgcggcatggagggggaaaccgtccatggagaaggcggcttacagacgactatggaagggctgccttcggcgttggaaaagctgctgaaccgctatcggagagcaaaggtggtctgatgggactgagccgcggaagaatgagaaagctatggcttcatcagcccaaagcacagcggatcgcggacggtatggaaccggcctttgagacggagagcgtcgcactgctgggaacgatccagccgttggaaggaacaacgacagcaaggctctacggcgaagaaagcgcggaaatgtcgcttttattgacggaggaaaagacggagctgaaagaaggtgtggggatcgcgctggaggcggcaggagaatgccggttccgcatcgcggcaccgccggaacgctggaagacacatcagcgggcggttttgaaaagcatctaggaggcatggatgggactggaaaaagtgggggcggcgatagccgccggtgcagcgagcgccgtggaacggttgtgcatggaaactgcggaaaatgcgaaggcgttatgtccggtgggatccggagaattgaagggcagtatcgcgccgcaggtcatgggcccttcgggaagcgtagccgccggggcgggccatgccgcctatgtggagctgggaacctggaaaaaggaggcccggccttttttattgcccgcttttgccatgacgaaagaaaaagcggcggaggaaatcgcccgggagatcagaaacgcgattcgggagggatgaacttgagcgcggaaggagagaaacggcgcattctggaagcactggggagcgtcgaaacgctgaaaaacgtcagccgcagctggccccgccagcaggcggcacttccctgcgcagtggtgacattggccggggagcgacgggcagacgaacgggatggggccgagtatctgacggaaacggaatactatgtgcgctgctttgcccggacgggaacggaagcggatgaactggctccgaaaattcggcgggagatggaaaaactgggctatcaccgggaatttgcctgggaagaaagcagtgaagcggtttttcagcgggtggaacggtacaaaaagtggatcggataaaagagaggagaatgagaaaatgagccagaaacgagcggcaacgggttttaagggcatggcgttggccccggtgacggagaacacgctgaccagctacaagacctcggcggcggaaagcctgccctacgcgggcagcatgagccgcacctccaaggagagcagtactgacctgtactatgacgacgacctgtacgcccagatcaagaacgtcatgggcgaggacgtggaactgcacatggcggaggtgccgctggaccggatggccgatctggggctgggcgcctacgacgaaaccagcgacacgctggaggcggacttcaacgccgccgggaaggagtacgccctgcgctttgtggtggacacggtcagcggcctgcccttctacttcaactaccggctgttccagctgacgggcatcaagttcgacaacttcaccaccaagcaggacagcgtgaccgtgtgcgaggtcatcatcactggcgtgttcaagcggcccaacatggcgggccttgcgccgtgggccgtgatgcagctcaaggacgacaagagcaatcaggccaagtgcacggccttcatcacggcggcggagacgaagccggccacttaaaaaagcaggccgggggacggaaaaccatcccccggcgttttctaaggacgaacaaaaggaggccccatgacgcgctcggcagagtactggaaacggcgggcggaagccaacatggacggcgtgcagcggggcgcggagcagcgccttgcccggctgggcagggcctaccatcaggcggcgcgggagctggaaggcgaggtgcggcgcatccttggcacgtacgcaaagcgctttgacctgaccccggaggaagccgccgccgcgctgcgggagcccgccgacgaggaaagccgggcctacggctaccgcgtcagccgggcggaagcgctggaaaaagccatccgggagcggctgaacgggctgggggcacggctggaacgggagactgccgcccagcgggaatggacggcctctaagagctaccagagcgcccggaagatgatgcgggacatgaccggcggggtggtgagccaagccgtgcccgatctgcagggactgctgcgggccatggacaccgcgtggtctggccggaactactccgcccgcatctggcgcaacacggaccatctggcgcaaatgctggaagacgagatcgaagccgcctttttgagcggcaagagcgtccgccggatggcgaacgtcatcatggatcgcttcggcgtgggctaccgggcggcggaatgcctggtgcggacggagaccagctacgtgcagaaccagacagccgcaaagagctacgaggatgcaggctgcacggactacgagatcctgaccgccagcgaccggcgcacctgcagccgatgcgccgcacagaacggcaggcgctacttgtttacggagatgcaggcgggggagaacgcgccgccctttcacccgaactgccggtgcacgatcttgccggtggtgggagaagaagcaggattgcaatttgcgaaaaaagatgctatgatacagacgcgggggagcaattatatgagcatcagcagtccgattgagcaaaggaacacgggaaagggcaatccaaacgctatcctcatgtttgataggcccttaaatgccagacaggtaaaacttttggaaaaacttccagcgcttgatagttgtacggaagtgccgaagcgtgatgttaacatgaaagatttggctgccttaacggctcatacaggttgtgaatttgctttattcacgaagggaaaccagcgctttattatccgtggcaacgcattcatggtgaacgtcacggaagaaaaggcgcaagggctggcggaagcggggtatcgctggagcggccatacccatcccggcgaaggaatcaatgttcgtatggcttctccgggcgataaagcagtattgcggcaatttgctcagactgttagtgctatctgggatcagcatggaagatatttgctatttgggaaggatgagtgaacgatgagtactcccatgtattcaaaaggaactcaggcattacaaaagtcgctggctacggaatatgctctttcttattgcaagaaaaaaggcttggctacagataagctgctgaaacagcgctttgatgtcattgacaatcatgcgattttttcgcagccaagtggagtgaagccgaatggtttggcgaatgatatggcaacgatgccgttcccaacgttgattattacctgtgacgccgatgggcttcacatcgaaacgaccgagcataccgaaaaatatctgaaataacaaaagccggaaaatctttacagccgcaaatgatttggctataatggaagtgggtcatcgaggtggaaaaattcgcggccgtccacacgccgatggtttgacagatttctgtctcttcctttttgcgggaagagaaggctgaaatcgagagatgcaggagaatgccgcgcctgccgatggcccctaacgcacaaaagctcgtctctgatggaatattccatcagagacgaacatgattcggaaaccgccacgccgaaaggcaaggcggttttttcatacccattttgaaaaaaggagacgagccatacatgacgagcaagaacagcgcgactctttccctgcccaagagccggatggtgcgggggtacgaaattcgaaaaatgcccatcggggcgtttctggaggcgtgcagcctgttggaggagctgccggggacggcgctgcggctgctgttccccgaaaaaaaggaaggggacattctggcggagctagccgggctggataaggacaagctgcaggagctgttcctgcgggcgctggcggtgctgccgggagagatggtgcggctgttcgccaagctgagcggcgtggaagaacaggcgctgctggaagacgcgcgcatcgggctggacggtcttggcgaaatggccgaggcgtggctggaggtcaacgggatcgaaaattttatcaaaaccatgggagcgctgggaaaacgggcgcaggctctcatgggcggagcgaacactggttccaggggctgatcgccgcggcgctgagcatcggcatcagcaagcgggagctgctgaacgattactacatggacgagatcgggccaatctttgaggaatggaaccgtctgcatgaccctgatcgggaggagacggaggaagtggaggcggcggacttcctcggaggcgaaggagaatggctggagtgagggaaggaggggagaacaagaatgacgatcgatgaattgaccgtcaaaattacggtggcggcggaagaagcggaagcggcgttggatgcgctgctggaaaaggtgcgggcgtttcaggaaaaaacgggactggcgctgcagctggatgctggcagctgggacagtcagttggcggaaacgggtgaaggctttcagcaagccggagaacaggcggaggcactggcggacaagctgcgtcaatcgacggaaacggcgttggcgcacaaaggggcttttgaagaactgggcggcgaggcgcagaagattcgagaaggattccagcaaaacgaaaaaagcgttcaaggtctggtacgacagctggcagagctgggccgtcagcgggaagcgttgaaccagctgaaaaatctatccgcccagttgaaaaactgcgaaaagggcggagaaggttatcggaaaacattaacgcagatccagccggtgctgaagaaggcgggaatttcaacggaaaatctcggcaagggcatggaagggctggacgatgcggtcacctccgcggaaaagagcatgggcagcgccgcaaacgggatcgccgggaaactggaaggcgtgattcggtgggcggaacagacgaagcaaagtctgaccatcagcggaagcgtcaacgtggataccagcccgtcgattcaagcgttgaacgggctgatcgccgtggcacagacggcgctggcgttgctgaacgctttggaattgggcggcggcacagggaaaagcggcggcgggggcggcggcggtggtggcggcagcaaggccgacgacgctgagaagaaggccgaggaagcacgcaagaaagccctgcaggccgactatgaccgcatcgagcaccggcggcacctgaacgagatcagtctggaggaggaactggccgggctggaagaaatccgccggaagcaccagatgaccgccgaggagatcatggcatgggaagaaaaggtgtatgatctcaaaaaggaaattcgggaacgggacgcggacagcatcgaccagctggcggacggggtggtctccgcgctggaaaagcgctacgaggccatgcgggacgcggagatcgagcggctggacaagagccgggaggcgtgggagcagtggcgggacgacagcgtgcaggccattgaagaccagatcgccgcgctggaccagctggccgacaccgaggacgaggagaaaaaaagcgccgaggagctgcggaagatcgaaaaactgcgccgggaggtggagtacgagcaggacgcgtacaaccggcagaaattgcagcagcagctggacgaggccatctccagtcgggaggaacggctgcgcaagctggaattaaagcagcagaaggaggccctgcaggaggagatcgagaagatcagagatcaggcctccaaaaagatcaaggagctggacggggagcaggacgccatcgagaaggcctacgaggaacggctcaaggccgccagcctgcaggccgaggccgaaaagctgctgatgaccaagagccaggacgagatcatggacctgctgtacgagtacgtgcccgaatacgacgcgctgggcaagagcatgggtgaaaagctgctggagggctttcaaagcaaggtggggagcatcacggactggttccgcggcttcaacgaccagctggcccggatgcaggaggagctggcgggcagcctgaacgccgccaccgaccgattctacgagagccgtcgggacaccgccggtcagagcggggcaggcggcgcgccggtggtgcagcagacggtgaacttctacgagccggtggaaagccccagtcaggtggcccggcggatggaggacgtgaacgaccagctggggtggatgatggcgtagcgcgctgcggcgggcgttttttcatggtaaaataaaaaaggaacgggaaaccgtgccgcgacggagggcaacaccgaaatcctgtgaaggaaggaggtgaggcccaaggagggggcgaagccccgagggctgagaacgccgcgaaacggaaccgcaagcccgaagcccgcgacggcccgaaaggccggggtgggccgaaaagaaggttccgcgaagcggaacgaggggcgaggacagccacgaagtggctccgcaagcccgaagcccgcgacggcctgaaaggccggggtgggccgaaaagaaggttccgcgaagcggaacgaggggcgaggacagccacgaagtggctccgcaagcccgaagcccgcgacggcctgaaaggccggggtgggccgaaaatgcaagagatactttttgagatactaagtgctgccgttgccgcctgtgcgacgttcattggctggattttggcaaaaagaaacggccacgatggtgaagatcgtgaccgctaagcaagcaaaggtcatgtcaaaaccctttgcaccgttattatagcatgggaaaagacaaagtcaaacgaaagcgtcaggcaatcgtcgggcgctttttgtattgggggaaagggggatgcgccattcagaaactgatctacgagaacctgcacggcgagacggccgtgttttttcatgcgccgtgggtgctgggccgggtgaagggcgtgggcatgagcgacgtgaaggtagtggcggcggaaggggcctaccagcagggggagagcatcaccggcctgcggcgggagggccggagggtaaaggtgacgctgcacctgctggccggttcccggcaggagatgtaccggctgcggtcggagctgctgggggtcctcagcccggacaaggcattcgacgggacgaggcgggcaaggcttttgtatgaaaacgacttcggccggcggtggacgtgggccgtgccggaaagcgggctggactggggcgaacgcaagcagaacgcccagccgtcgctcagcctcaacttccgctgcgaaagcccctactggtacggcatgacccggcaggaggcggtgttcaaggccaaaaaggccgggtttaccctgcccatgaaaatgccgctggggctgggcagcaagtccttcgtgtgccaggtggacagcgccgggaacgcggaagcacccgccgaaatcgagatcaccggggcgggagagatgcccacactggtgaacgagtccaccggggagaaaatctgtctggtgcagcctttgccggaaggggacacgctggtgctggacaccgaccccgcccggctgaaggtgcgcatccgccacggggacggcagcgaggaaaacggcttcggctacctgagcccggaaagctcggtggcggagttcgggctgcggcccggcgagaacctgctgcactacgtgccccagggagacggcagccgcagcgtgattcgggtgcggtggtacgactgctgggagggggtgtgagccatgcattctctgataatggcagggccggacctgcggctccggggcgagctgccgcagtacgctagcctgcggttcaagcggtgcttctgggaggtgggcagcttccagctgacggtgaagcggggaacgcccggctgggacagcctgagccgggaaacgctgctgtacctgccggagagacccgaaacggcgctgctggcggaaaagatcaccgtggacgaggagaaggtcacagtcagcggcgtgcccctgaagggcctgtgcaagcggcgcatctgcgtgccgcaaagcgttcagggcgaccagtacgacggcttcggatgggatcggttcaccggggacgcggaaagcgcttacctgcactacgccgcggccaacctgaccgacccggaggatgcgaagcggaaaattcccgggctggtgctggcagagaaccagcaccggggagccgtgctgccctggcaggcccggttcgacaagctgacggaagtgttcgccgacatcggcagcgccacggggctgggatgggacatcgtgccggactggaaagccggggtgctgcggttcgtggtgacggagggcatcgaccgaaccaccggcagccgccgggcggtgctgtcccgccggctgggcaacgtggacggggccagctggacagaggacggcaccgcggaggtgggcacggtgtacgccgggggcagcggcgaggacgagaatcggctgatcctcagcgtgggcaacacggcggaagggctaaaccgccgggaaggctgggccagcctgaacggggtcagcgacgttgacatgctgcggctgggcgcggagcggaagctgtcgccccgaaaggacagcgtgacggcggagctgctggacagcggcctgtgccggtacgggcgggattatgaccttggggacgtggtgacggtagtggccgacgaccggcagaggaacgcccggctgacggcggtggaggagacctatgaggacggaaagcggatgctcaaggctacctttggggaagggccggtgacgctgacggggctgatccgggagagaatgcgggggagtattgcctagagcggaggtgcaggaggcactgcctcctgccggggagtggggcggagccccgcgaaactgtgcgaagcacagtgattcccagcagcgaaccagcggaagggtgaacgaagtgaaccgaggggcgaggacagcggcgcagccgctccacagccccgaagcccacaacacgccgcaggcgtggagtgggccgaaagaagcgctgttcgcggtggtaacgagcaacccacaccgaagcacaaaagtagcgctgccttcgggcgatatcagccaaccaccaaggagggaaaagatggcaaaggaattttacgggtatttcgacagtctggtagaggatgaacgggagtacgacgcggcgcagttcgcccatatcctgcgggcgggaatggtcaacggcgtcaccagtcacgccggaggcgggctgcaggcgacggccctcggaacgggcatgaccacgcaggtgagccccggcggctgcgtggtgaacgggtatctgttcgtgctggaggacgacggcggcggggtcaggagcttcagtcaccagccgtcggcggccagcgaccgctgggacaggatcgtagtgcggctggacacgtccgccgcccagcggaagatcatgctggaagtgcgggccggaacgccgggggccgaccccgagccgcccgcgctggagcgggacgggaacgtgtacgagctgtcgctggcaaaggtgaaaattcgcgccggggcggagagcatcgagacggcggacgtggtggacgagcgggccaacgcagaggtgtgcggctatgccgtgccggtgtggctgcgggggctgacgggctttgacccggacgaaatggcggcggaagtgggccgtaaggccgtgacggccttctacaccgccacgctgaccgccgccggatggacgggcagcgccgcgccctacgtgcaggaggcggccgtggaggggctgctgggcagcgattcgcccattgtggcggtgagcatggaaaacgccaccaccgacaactacgaagccatcacggaaagctgggcgaacgtgagtaccatcgacgcggggaacgggaagatcacggcaaagtgcttcggggagaagccgacggcggatctgacactgttgatcaaggtggtcaggtgaagaagtgcgtgaactgtgcgaacggaagggctggggatgggccccggccctgagagtgagcaaaacgcagaaagaacaaggagcacgggcccgaagggaacgtgcgaagaaagcgaccagggggagcggctaagatggcggaatgtttgcttttgaaaagcggaggacaaacgaagaagctgccggtgctgaacgccagctacccggccaacgtgaccaactggcagggggaacaggctacgttcaaggtggagatttccacggcgggcgtgccggcggaatacacgtaccagtggtaccgggacggggcgaaatggacgggagccacgaaagcgaccgtcagttggagcagtgcggcggttggcagccacagcatctattgcgtggtaacgaacaaggccggggaagtgaccggccgggtggccacactgacggtaaagaatcccaatatggcctacacctacagcggcgacagtgagaagatcgacgacggaagcggcaactggcgcatcaagttcaagagcagcggcacgctgaaatttaccaatctgggcaagtgggacggcaagctggacgtgttctgcgtgggcgggggctgcgcgggcggcagcggcaactgggacgcgaacaacggctacggcaaggcgggcagcggcggctacaccaagacccagaagagcattcaggtggaggtgaacaagtcctacaacatcgtgatcggcgctggcggacagagcgcctttgcgcctggcggaagcaccagcgcattgggcgtgacggcgaacggcggtacgaagctgggaggcggcagcggcggcggcgcttatggcaatactcaggtgaacaacggcggctcggacggcggcaacggcgacccgcagaacgccgccaacatcggcattgaccattggggttcccccggcaaggggcagggaacgaccacgcgggagttcggcgaaagtaccggcaccctctacgcgggcggcggcggtgcaggcggcaacggctccgcacaggcaaagggcggcagcgggggcggcggcaacggcgcgtggaacggaaaccagcccaccagcggcgcggccaacaccggcggcggtgggggcggcatgtactacggcctgacgaacgtcggcaagggcggaagcggtattgccgttatccgaaatcattggtaaggagggagaaacgaaatgaaaaaggctatgttgtctcagcccatggcgggcaaaaccgaaa

SEQ ID NO: 2283 - DNA, 3427 bp, Unknown
  16S sequences of unknown bacteria
cggcgggcaagttgctcgaccagctgctcgatcgcatccacctcaaccgcgaggacatctacatcgccaacatcctcaagtgccgtccgccccgcaaccgcgacccgcgcccggacgagatcgtcgtctgcacgccgtggctgcgcgagcagatcaaggcgattcaccccaccgtgctcgtcacgatgggcaacttctcgacgaagttcatcctccaaacgcagacgggcatcacgcgcctgcgcggcagcgtgcacgtgaccggcccgttccgcgtgattccgacgttccaccccgcggccgccatctacgaccgcaacaagatcccgtacctcgaaaacgacttcgacctgatacgcggtctgctcgactcggacgcggagtacgagcgcaagcgcgccgcgagccagggcgatgggcaaggaggcgcctgatggtcgagaagacgagcgcatcggtggacgagaccatcgagctgggacggcagctttccacctgcctgcgcccggacgacgtcgtcttgctctcgggcgacctcggtgcgggaaagacgcagttctcgaagggcgtcgccgcaggcctgggggtgagcgcggacgtgacgagcccgacgttcaacatcctcatcgagtacgagggctcctcgctcatgctctaccacttcgatctctaccggctcgaggacgccgaagagctcgaggacatcgacttctacggggtgctggaaagcgggggcgtctcgcttgtcgagtggggcgacaaatttcccgacgcgatgccggacgagtacctggacgtgcgcatcgcggtagatggggacggcgtgcgccatctgacggcaaccgggcgaggagatgcaggtcagcgcctcgaggaggcgttcgcgcaacgcggataagacgcttttcccgggcggctccggcttcgcttgatgccgccgcgccccggcgcgttccctgttgccgaaccgatgccttccattcagcgaatcttcaggaattcacggtaagatagccacactatgccacagacagacccctacagagtactcggcctcacgcctggcgcctcgaaagacgaggtcaccaaggcgtaccgcaagctggccaaaaagtaccatcccgacctcaatcccggcgacgagcaggccgccaagaagatggcggaggtcaacgccgcatacgacgcgatcatcaacggcacgccctatggtccgcgtgcgcgtcagaacccctatgcgcaaaacacgacgaccagctcgtatggcggtggccagcagggcggacagtactacgacccgtttggcggctacacctacacgggcgggcagaccacaggcaacgccggcggccagggccagtactacgatccctttgccgagatgttcaaccagtgggcccagcaggcgcagcaacagcagcggcaatacgagcaacagtaccagcaccagcaggcagagcagcaggcgtaccgcgaggcccagcgcaaggcgcagcgccagcaggcgggcggctgcctgaagtgggtcgtcatcatcatcgcgctcaacctgttcatcaacctgctgttcggcgggtgttcggcgctgcgctacggcgtgctctcgagcacgctcggctcttcgggctcgggttccacctcgcagtcccagtcggcgaacagcgcgagcagcggcacgagcgtctcgtacaccatcgtgggcgacgcctcgacgagctacaccgcgggcaattccgacgcgagcaccgtcagctattcggctgcctagctgctcgagcgcgcgcgtctgcgccaaatgcactagaatacccctcatcgagagaggcaggttcgcggtgtctgcgtccgatgagattcagaaaaaggacaatcgccagacgatgttcatcgtcggaggcatcgtcatcgctgcgctcgtcatctttggcggcgcggcgttcctgttcgcgcagctgttcaccggacacatcaagacgccccaggaataccggaccgtcacgctcacggccggcacgtatgcggcaacggtgacctgcgaggggacgatcggccccgatatcgtcgcggaggtcaagccccagacgcccggcaccatagccagcatctccgtgaaggagggcgacgccgtctccaagggcatgcccctcatgaccgtctccaatcccgacatcattaacgcagtgcagaccaaccagaccgcctacgaccagaccaagacggcgcttgactaggcgcagcaggcggttgcgcaggcacagtccgaccttgacaaggtcaacggcgcgaaagcctccgagcagcagcgcctcgatgcggcaaacgcctcggcgaaggccgcagatgcgggcgcatccgagcagacgattgacccgtcgttcgatgcggcggtcaaggcggcgcagaaaaacctcgacacggcaaagggcaacctcgcccaggcgcagggaaactgcgacacggcgcgcaaggcgctcaagctctcccaacagcagcacgacctgctcaccgtgacggcgggcgcggacggcaccgtgcacagcatccgggcaaaggtgggcgataggaccgcagagctcaacgcgggcggcgcgtccatgctgatcgtcaactacaagcaccccgtcggcgtgctgaaggtacccgaggcggacatcgagggcgtgagccgcgggcagtcggtcaccatcacgagcgaccagctccccggcaagacgatcgagggcacggtgagcaccatcggcggaaggatcgcggacgagaccgcacgcgatggctcgccgcttttcgaggtgcgcgtcacgtttgggtacaacgaggcgaccaagaccgacatggacatcgaaggcaagatccagctgcgcgatttcgggaccgtcttctacgttcccaccgcggcggttgccaacaacgacggggcggactatgttgtggtcgtgtacgatgacaacacgacgtccgagcaccaggtagaggtcctcgggcagacagacgatggccagacggtcatcaagggcaacagaatctcggaaggcgcgaagattcgcgccgatctctcggaatagggttatatgcgcgttttggcttttgacaccgcgagcacgcagcttgcgctcgcggcgggtacggttgacggttgctcggtcacgctcgatgcgagctttgatgcagaggcgccgcgcaaggcaaaccaggtactgctcgagcgggcgggcaaggtcctcgaagacgcgggctacggcgtgtccgagctcgacgcgatcgtggtcgggcggggtccggggtcgttcacgggcgtgcgcatcggcgtggccacggcaaagggcctcgcgtgtggcctgggcgtgccgcttcacggcgtgtcgacgctcgatgccgtcgcgtggcgcgtgtggcgtgcgggcgtgcgcggggagggcggtatcgtcgc

SEQ ID NO: 2284 - DNA, 16303 bp, Unknown
  16S sequences of unknown bacteria
gacctaccggttcgtagccgggcactctatccactgagctacaagcgcgtgtcatgatttttcatctgacctgtatattatagcacactctctcaggtttgtcaagaggttttagaaaaaaatccggaaaaatcttctgatccttaagatataataaatttttcggagattctattgacggaatcgctccgggatggtatactatatactgaaaaacagtgaaaggatgaaacggatgaaagtcacggtcacgatcgaccgcccgctcggcagtgtccacccgtcgcacccggatatcgtctacacgctgaactacggctatgtcgagggaatcatcgccccggacggcgaggagcaggacgtttacgttctcggcgtggacaagccggtaaaaaccttcacgggaaggataatcgccgtcatacacagaaacgacgacatagaggagaaatgggtcgcggcgcccgacggcgtgagcctcacgccggaccagatcatggaaaagttgagtttcgtcgagaagtatttcgactcgcacgtaattatgacagaggacgcatgaacttccggaaaccgggcagaataacagaaattctgctttcccggaggaatcatgaaaaggttagttctgtgtattctcgcgcttctgccgctcatactgccttacaggtctgaggcggctgtcccggttctgatgtatcaccatatcgccgggaacggcgacatttcggtcacgatatcgccggagcttttttccgcgcagatggcggcgcttcaggataacggttttactgccgtgacgtttgacgagctgtacgatttcgcggtcggaaacggtgaactgcccgatcacccggtcgcgatagtcttcgacgacggctacaggtcggtctgggatcacgctttcccggcgctcagaaagcgcgggatgcgcgcgaccgtctgtatcatcggctggagtgtcgggaagggaacttctgacggtgtgattccgcacttcgactgggacatggcgcgggagatgacagagagcggaaccttcaccataggcgcgcacacatacgcgatgcacgacggggcggtcaggaggggaaacgagagtgccgacggcttcgcgtcccgcttcatatccgactacaaacgcctttcggacgacatttaccgcgagaccggcgagagcgtaacggttttcgcctacccgcacgggatatatgacagcctcacagagtctcttctcgaaaatctcggcgcgagggtgacgctgacgacagacgccgggatgaacattgtccgacgcgggcatccggaggatctgcgtttaatgaaacgatataatatcggcggggacacggacatcgcgaccctgcttgaaatactgaaaaagagagacaaatgaaagtacttgtattatcaataaccgcgggacagggacacaacgccaccgcgaaggcaatctgcgcgtatctcgagttgatcggctgtgaggcggagatgctcgacacctttaactatgtcagccgcatcctcggcgagaccgtgtcgaaaggctatctcatcaccgccagcaaggcgaagctcgcctataagagcgcctaccgcttagccgaactcaggaagaagtcgaagagcgacgcgtccccgactcgcgccaccggaacgatgatggcgaagaagctcatcaggtacatatccgactacgacccggacgtgataatctgcacgcatatcttcgccgggataatcctcgacgtcttaaaagagaagcgcgagacgagagcgaagtgcataggcatcctgaccgatttcgcgttccacccgtactgggaggaggggctgaacctcgactacgtcgtgacgccgaacgagcttctgaccgcgcaggcgatgaagaagggcttcacgaaagagcaggttctcccgctcggaataccgatccacccgaagttctcgaagtcggtgacaaaggaggaggcgcgggcaaggctcggtctcgacctcacgaagcgcacggttcttctgatgagcggaagcatgggctacggtcacatagagtcgactgtcaacacgctcgacgccgtcccgcacgatttccagataataacggtctgcggcaacaacgccgaggcgaaggcgagaatcgacgcgatgagaacgaagaagcgcatactcaacttcggcttcaccgacaaggtagacctgctgatggacgcgtccgactgcataataacgaagcccggaggactgacctcgtccgaggcgctggcgaagtgtctgccgatgataatagtgaacccgatccccggtcaggaggacaggaacaccgaattcctcgtcaacaacggcgcggcaatggcagtgaccgcgacaagcccgctcgacgaagtgctgtatcagttctttgttgacccgaggcgctccgaaataatgcgcgaagcgataaagctcatctcgaagccggagtccacaaaggacatctgcgagttctcaaaggcgctctgcgcggaccaggacatgaaagatgaagaacgggagaatatgcccgagataataggttagtacaaaggagacaacactaactatgaaaaccgaaaacgccaatgaactgaacagcgtcatgaataaagacaacataacggattttctggggaagaacccgttcttctggtcgaggctcgggttctgctacgacccgccgagggcggggaaggacgggaagcagataatcttctcgcgggactttgaggattacaggcgggtgcacaggcagtttgccgacgcgggggttaagctccacacgacgatacttcacagcggctgggtcgctgacgggaagttcgactacacactgaccgacgagatccttgacgaggttttccggggaaatccggacatatactatatgccgcgcgtcaagctgaacgtcccgccggactggtgccggaaccacccggaggacacctttgtctactatttcggcccgagagacgcggagagcatagccgcgctggctgagacgccgcggcacgactatttcggcgccgacacggacggctattcggtgaacggcggcaagggcgtctggaaggacgaccgtgtgaaccgcggagggcttatcggtctccagagcttctcctcggagaagtgggtcgccgacgcgtcggacgctctgcggcggcttctcgttcacctctcggagtcccggtacgcggacaggataatcggcgttcatgtcgcttacggtatgtgcggggagacgaacctctggggctcgtggtctccgcttgacagcgagagaaccgggctgtgcggtcaccgcggtgatttcggcataaccaaccgccgccggttcagggaatacggaatacaaaagtacaaaagcgagagcggaatgcttgaaaaatggggcgacccggagccgccgaccccgctggcgcgcgaggaagtcagggactctcttgacgggatgttcttccccgaaggctcgaaggagcgggactatttcgagtttgtctcggagacgaacgcggacgccatcgaggcgtattgcaggattgtcaaggaatcgtcgccgctgttcgggcatgagctttgcgcgggggtgttctacggctatatgtacctcccacaggcggcgaacgccgggcatctcgccttgcggcggataatcgactctgaatatgttgactttctctcgagcccgaagggatatttccgctgtctcgcgggcgacccgggcggagagcaggggccgagcgaatctgtcgcgagaaagaaggcgtggctcgacgagatagacgaccacacccacctcgaccgccgtccggagggcagagcggcaaatgaggacgagtcgctgacccttctctggcgtgaggcggtcaagaacatcacgcatgatcagggcttctggtggatggatctcggggagggctggtatgactcgcccggtctgatgggcgcgatatcgcggataacctcgctccagagcgatatcgcggatataccgtcgcgcagcgcggcggagatactgcttgtggtcgacgacggctcgctcgcggcgacgtctgtatcctacgggctgaacttcggactgatgtatcagctgcactctgagctgaagctctgcggagcgccggtcgacacgctgctgctcgacgatatgctgacgactgacctctcaaggtacaagatgatagtcttcgcgaactgcttcaggtttgacgagggagagagggagcggatactcgggaaagtgagcggaaagctcgtcgtctggcactacgccgccgggataatggcgccggattattctccggacaattacacgaggctgaccgggttcgggatgcgtgagattgagcggtgggacgacgtgttctgcggctattcgtccggctacagcaacggcaatttcagaaagccgggcgatttcccgctgttctctcccgacccggacggcgcggaggtgtattcggtctacccgaacggcgacccgatgtgctgtgtccgcggggataccgtggtgtgcgcctgcccgtcgcttaaggcggctgatttccgtgagttcgcgcgccgcgccggagtgactataatgtgtccgtccgactgcgcggtcttcgcggacaaccgtgtcgtcggcttcttcccgaaggaagggatcgacggggagataactctcggcacagagaagctgaaggtgagcgttcccgcgaagggaagactggtcttccgcgtccgcgacggcagatatgatagaatagtctgaaaataagaaaggaaaaaaatgaccccctacgaagaaatgaagtcgggagaaatatatttcatgaccgacgaaaatctcgcggagcgccagcgggagtgcctcgacaacctttacgatttcaacatgacccgcccgtccgagacagagaagcgcgaggcgctgatgaagaaggtactcggacatatcggtgagaactgctacatagagccgccgctccacgcgaactggggcatccacacgcgccttggaaacaacttctacgcgaacttcaacctgacgcttgtagacgacggcgatatattcataggcgacgacgtgatgataggtccgaacgtgacgatatcgacggcgggacacccgatagacccgtcgctcagacgccgcgtcggacagttcaatatcccggtgcgaatcggaaacggcgtatggataggcgcgggagtgatcgtcctccccggagtgacgataggcgacaactcggtaatcggcgccggaagcgtcgtgacaagggacattcccccgaacgtagtcgcgctcggttccccctgccgcgtcttaagggaaatcggtcagcacgaccgggaatattatttcagggacagaaaaattaatcccgcgatattcaaccagggaccagtccctggacaggtggataaatccacccgatagtcaatgattcggctacagaggagaccagaggtctcccaggatgaaggttctgccacatcaaacatagtgcgtcggaaaaataacagattctgagaaaggaaaatgaaaatgaaacagatcaccgtatataacgatatccccgccgtatccgaaatctgcctcggcgcggacggcttcggctcaaagctcgaccgtgacaccgcgttcaggatgctcgacgcgttccgggacgcgggcggaaactttgtcgacacggcgaacatctacgcgcgggacttcgctgaaggttacagccgcagcgagcggattctcggcgaatacctcgcctctcgcgggaaggattcgcttgttatcgcgacaaagggcgcgcaccccgacccgaagacgatgcacaccccgcgcgtcacccgcgagtgcattgaaaaagacctcgacgagagcctgctctcgctcgggctcgactgtattgacatatactacctccaccgcgacgacccggcgatgccgataggcgagattctcgaaatcctcgacgatttcagaaagatgggaaagataaagcgttacgccggctcgaactattcggtggagcgcgtcagggaggcgtcagaatacgcgaggacgcatggaatccccggcttctcgttcatctcgaatatgtggtctcccgcgtcgcagaatcccggcgcgccgctctcgggcgacgacacgctcgtgagattcgaggacgccgacacagcgtcggtcacggacaacggaatgtggttcaccccgtacagctcgtccgcgaagggctggttcgccaagaaagccgccggaaggtcggacgaacgccttgacggcatcttcgcgaacggcgcgaacctcacccttctcgaacacatcgtgaacatggcgggggaggagagcattcccgtccagacggcgctcctgagacacatccgctcgctcgggaatataatcccggtgacgtcggcgtcggatatgggacagctcgaggacatactgaaagtataaaaaaagcgctcatcgcgggttctccggatgagcgcctgtttttaggatacactgaataaatcgggctttcacagaaaaaagtcttggatttatggacttttttctgtgaaagcaaccttaaatcagtgtttccttagtcaagcgccgagtatttctcggttatcttctcaagggtggtctgccatgacgactggttcttcgcgtagtaggtcgtgatattgacgtcgggagacgcgcggaactcggtgaggcagtttgtgaacggctcaaagagagtcgagtacgcgaaggtgaagtccatctgcgcgccgtcgcggacgatctcgaggatgctcttcacgtcctcgtcgcgggtgtacttttccttcagggcgacctcatagtagttcggggtgacgtccttcatcgagtagtaggagagcgcctcgcagaccatcgcggtcatgtccctgtccttcgcggtgatcgggacgaagaaggttgaggtcgacgtgcctatctgggtgtgatacttctcctgggtattgtccgccttcgggtatggaaggattccgaagtcggaggtcatgttgcgcatattgtccgcgtacttcaggaacgcgtccatgaagagcgccttgtcctcggtgaagtactgggtcgcgatgtcgtactcgtccttcgggttggtgaggacgttatcgttttccctgaagaccttgcggagcttctcgtagacgttgaccgaccgctcggagagctcgccgaacttcggcacgccgccctcgtaggttaagaagcttatctcggtcgcggtcatgaacgcgcggttcggcaccgcgttgcccatgaagccgaccatatcctcgccccaggtgagctttccgtcgctgttgaggtcggtcgagacgcccttcagcatcccgccgaaggtgtcgatgttccagttgtcgtcatagacgtactggtaaggattctcgaggttgtaatcggcgaggatcttcttgttgaagtatatgaccgagagatccttgtagagcgagagcgacgcgtcgccgatgaagccgtagagcttgccgtcgatcgcgaggttgtcgttcatgccctgcacccaccacgggttgtcgaagtcgatgtatttcaggtcgttggcgttgacgaaatatccttcggtcgagagctgcatgacgatgaccgcgacgccgctgatcaggtcgtactcaccgtccccggcgagaaccgagttcttgatcagcccgttgaaggtgtccctcgccggccagtcgcccggctgggagatgatgttgaagtccacgccgaggagctcctcgaccttgctgttgcgtttgtatacggcgtcctcgacgatgtctccggtctgctcctccgcgtcgtactcataggagttcaggtcggacgagaggatggtgaattccgtgccgccgaagttcttgtccggcagctcgagcttcggggaggtgtcctcgggagccgccgtggtggtgtcgccgccggctgaggtcgtcgtgtcgttgttagtgtcgccgtttccgccgccgcaggacgcgaccgagagcgccatcgcgaggagaagggtcattgccgtgatctttttcatattgcgtgcttcctttcatacataaatgtacgcgccgtcagtcagaaccgtcgtaatagacagaaccgttgtccggctgtttttttttttgcgaattgactatacttatattatattacaaaaatccccgcttgtcatcaaatatatttggatttttgcaaagtaaattacttttttcaaaaagatttgtttacattccgggcatgacgtctttcgcggtaacgtattaaagtgataaaacgaattcagaaatattttcggaataacgataaaataaagaaaattttcccggtgcgtcgtccttttgccgacataaatgcaccgaagaaagttcatattgagtgaaaacgacaacagcgatactttacttcatcataatattctgtcggtctgcatattgcaaagagcgacaaaatgtgctataatattacctaacacccacaaggaagcgggcggtattccacctgtagcttccccgggcggaataaaggaaaggaaaaaccacaacccatgaaaatcgcattttcgactctgggctgccccgatttctcctggagcgacatttattcggtcgccaaggacttcggcttcgacggaatagagatccgcggcatcggcaaggatatctccgccgtaaaggcacgcccgttcactgacggtcagatcgacagaacaatcgcaaccctggagcgtctgggtctagaaataccctgtctcacctccggctgctgccttaagttcgcggataagctcgaggagacgaaggctgagctttcggagtacataaggctcgccgtgaagctcggcactccgtatatccgtgttctcgccgaccttgagcctgacccgaggggcgagatcgacgacgagtatatggcgcgtgcgataaaggaggtcgccgccggggcaaaggacaccggcgtcacgctccttatagagacgaacggggtttactccgacacgaagaggctgagagcgcttctcgacaaggtgaactgccgcgaggttgccgctctgtgggatatacatcacccctacagattcgcgcacgagaccccggagaccacgattgagaatctcggttcctacatcaagtacgtccacgtcaaggactccatcatggagaagggacaggacggaaagaagacgataaagtaccgcatgatgggctttggcgatatgcctatcccgggaatgcttcacgctctgcgtgagatcggctatgagggctacatctcgcttgagtgggtgaagcgctgggcgccggagatcgacgactgcggcatagtcttcccgcagttcgcgaactatatgcgcgagcacaccgaggagatcgagccgccgctccagacctctctccgcggcaatggcaggtatatctggcagaaggagcacctcatcgactacaccttcccgcagctgctcgacagaatctgcgaggagttcccggagcagtacgcgttcagatacacgactctcgattacacgaggacatatccgcagttccgcgaggacgtggacaatttcgcccgcgcgctgatagctatgggcgtcggcaagggcgaccatgtggcgatctgggcgacgaacgtcccggcgtggtatatcacgttctgggcgaccgtgaagatcggcgcggtgctcgtcactgtcaacacggcgtataagattcacgaggcgcagtacctgctcagccagtcggacacgcacactctcgtcatgatcgacggctacaaggattcgaactacgtcgagatcatgaaagaaatctgccccgagctcgccgagtgcgaaccgggtcatctcgagtcgaagaagctcccggtgctgaagaacataatcacggtcgactcgaagcaggacggctgcttcacctgggacgaggcgatagagctcggtaagacggttccggtcgaggaggtctacaagctcgcgaagacggtccgcaaggacgacgtctgcaatatgcagtatacttccggcacgaccggcttcccgaagggcgtcatgctgacacactacaatgtcgtcaacaacggcaaggcgataggagactgcatggatctgtcgaccgaggacagaatgatgattcaggtcccgatgttccactgcttcggaatggtactcgccatgacggcgtcggtcacacacggcgtcactatgtcgcctatcccggcgttctccccgaggctcgggcttgactgcatcaacaaggagaagatcacctgcttccacggcgttccgacgatgttcatcgctatgctgaaccacgagaacttcccgaagaccgacttctcgcatatgagaaccggcataatggcgggctctccctgcccgatacagacgatgaaggaagtcatcgagaagatgcatatgcccgagatctgcataacctacggtcagaccgaggcgtccccggcgacgacgatgtcgaagacgaccgactcgatcgagacccgcgtcaacacggtcggcgcgtcgctgttcgcggtcgagacgaagatagtcgacccggagaccggcgaggatctgccggacggacaggacggagagttctgcgcgcgcggctacaacatcatgcgcgggtactataagatgcccgaggcgaccgcggcggctatcgataaggacggctggctgcactcaggagacctcgcgagacgcgactcgaacggctactacaagattacaggtcgtatcaaggacatgatcatccgcggcggcgagaacatctacccgaaggagatcgaggacttcctctacacgaacccgaaggtcaaggacgttcaggtcatcggcgtgccggacaagcagtacggcgaggagatcatggcgtgcataatcctccgcgagggcgagagcgctaccgaggaggagatcaaggacttctgccgcgcctcgatggcaaagcacaagaccccgagatacgtcagattcgtgaccgagttcccgatgaacgcggcaggcaagatcctgaagtacaagatgcgcgacgacgccgtcgagtacctgaagttacaggaagacgcaagcattgtcacggcgtaaaacggaataaaaaatcggagcgttccgggcggagcgctcctttttgttatgttatcggaatggttatatggttaaacgcgtatcataaactcacgcttccatccggagaagatcctcggtataattctccccgtacccgccgaactccgtgtccgagccgtcgaggtttatctgatacatcctgaacgtgacgtcgatgtccttcggcagccatttctcgtcgtacgtgtagcggtaggtcatcccgagacggcgcagcaagctgccgctcttcgggttgaggatgtcgtgggtcgcggtgacatacggtacgccgtcagccttcgcggcgtcgagaacagccttcccggcttcggtcatgtagccttttccgcgcatatcgcgtctcagggcgaagcataactcgtgcgattcgtctccgctgacgcttatgtacccgatcggaatgttatcgtccttaagacatacggcgtagtagtatccgcaggggtcgttgtagcgcagcatgaacctgttcctcagaatcctttcggagtcgaaggtataccgtgaatagctccacggcaggaatctgcttgttcgtctgtcggcgaggagggcgtgcatagcggggagatcagccgacgtgaagcggcggaggataaggcgttctgtgcgcatttcgggtgtgttcatgtagtttcattcctttcgcgaattatagttttgatttttgtggaaacactgaatcagtggttccttggaaacattgaataattcgggttttcgcagaaaaagtcttgaatttatggacttttttctgcgaaaacaaccttagatcaatgtttccttggaaacattgaatagttcgggttttcgcagaaaaagtcttgaatttatggactttttctgcgaaaacaaccttagatcaatgtttccttgatcttttcgccgtcagtgcgcgaagcagcacgctcacgaccgcgaagccgatcgccattccggatatcgcgcggatagtcgagaagaaccatgtcttcgccgccgcggcgtctccggcaaaaatgttatacattgtgtagtaaaggcttccaccgggaatcatcgggaccgtcgcgggcatctgaagaaccaccttcggcacctttatcttccacgccatgaccgcggcgacaatactgcaaaacatggcggagacgatacttgcagcgaagtccccggcaaaggagttgacgagcaggtaaaccgcccacgagagtccggcgttcagagcgacgagaatcatgtacttcttacggattccgaaaacaacagagaatccgagcccgccgagcgcccccgcggcgatctgaatgatattgtctgtcatcagagtatcctccccgcgacaaccgtcgagagcaggaacccgcccgcgatactcgccgcgataagcagcgactcggtgaacctgagaaaccccgtgatgctctcgccgagcagcatatcccgcatggcgtaggtgatcgggattccgggcatggtcagcatgatgcagccaatgagaatcttgtcgaggttgaccccgatgccgaaccgcaccagcagacagccgagaaaaccggtcagcatcgagcagacaaagtagaacagcagctgattcgttctcttgtagatgccgcgtctgtccatccatgtgatgagacaggcgagtatcgccgtcgcgggcagatctgaaggtgtcccgccgaagaagacagcgaagctcccggcggagagtatggcgcctgtgtagcttatccatgccttctcacttttcggatgctctatcccgtcaaaccgctccctgatctcttccggcgcggggcgttcatcacagatgtcgcgcgagagggcgttgagccgctccacacggtcgaggtcggtggcgtatccgccggttacgcgtcttgtgcggacgatctcgtccccgtccggcgtccgtgccgtcacctcgatgagcgaggttattgtgaagaccccgacgccgcgcattccgtacgcgtgcaggagacgtgatatggtgtcctcgacgcgcgtcacctcgcctccggcgagcagcattgccttcccgatgtcgaggctgacgtcgacgagctgttcttcgtttgtcatcatggttaatactttttctttcccaacatagaaatcctttagtttaagtataccacattccgtgcaaaatgtcaagaggaaattgaacaaaatttgaaattcgagaaaaaattaacatcaaacgaaaaaattcgcctgtttctgcgggaaaaacgaaaaaaagaaaccggatgtgaaaatccggtttctttatattcagtttattgaccagacgtcagaacacagccatatgacagtgcacgaaccgtaaaccgtcgaagtttatttccactccttggagtggaaataaacttctttggaaaccgctccgcggtttcctttacgcgttcttgagagccgcctgagccgctgccagtcttgcgatcggcacacggaacggcgagcaggagacgtaggtcagaccgaccttgtggcagaactcaacagaggacgggtcgccgccgtgttcgccgcagataccgagcttgatgtccgggcgggtcttgcgaccgaggtcagccgcgagagcgacgagcttgccgacgccgttctggtcgagctttgcgaaaggatcgttctcgtagatcttcttgtcgtagtaagcgccgaggaacttgccagcgtcgtcacgggagaagccgaaagtcatctgagtgaggtcgttggtaccgaaagagaagaactcagcctccttagcgatctcgtcagcggtgatagccgctctcgggatctcgatcatggtgccgaccttgtagtgcatatcgctgcctgctgccttgatctcagcgtcagcggtctcgcagacgacgctcttgacatacttcagctccttgacttcgccgaccagcggaatcatgatctccggaacgatattccagtccggatgagccttcttgacgttgagagccgcgcggatgacagccttggtctgcattctcgcgatctcaggataagtgacagccagacggcagccgcggtgacccatcatcgggttgaactcatggagtccggcgatgatagccttgacctgctcgacggtcttgtgggtgtccttcgcgaggagctcgatgtccttctcttcggtcggaacgaactcgtgaagcggcgggtcgaggaagcggatggtgaccgggcagccctcgagagcctcatagagcttctcgaaatcgccctgctgcatcggaagcagcttgtcaagagcggcctcgcgctcttcaacggtatcagcgcagatcatctcgcggatagcggcgattctgtcagcgtcgaagaacatgtgctcagtacggcagagaccgatgccctccgcgccgagctcacgtgccttcttagcgtcacgcggagtgtcggcgttggtgcggacctgaagtctgcggtacttgtcagcccatgccatgatgcggccgaactcaccgacgatcgaagcgtcgacagtcgggatggtgccgtcatagatattaccggtggaaccgtcgatcgagatgaaatctccctcgtgatattccttgccggcgagagtgaacttcttgttctcctcgtccatgttgatagcggagcagccggagacgcagcaggtgcccatgccgcgcgcgacgacagccgcgtgggaggtcataccgccgcggacggtcaggataccctgagaagccttcatgccctcgatgtcctcaggagaggtctcgagacggacgagaacgaccttctcgccgcgagccttccactccttagcgtcctcagcggtgaagacgatcttaccggtagcggctccgggggatgctgcgagtgccttagcgaccggaacagccttcttcagagcttccggatcgaactgcgggtggagaagagtatcgagagttctgggctcgatcatgagaacggcctgcttgtcgtcgattctgccctcgtcaacgagatcgcaggcgatcttgagagcagccttagcggtacgcttgccgtttctggtctggagcatatagagcttcttgttctcgatggtgaactccatatcctgcatatcgtgatagtgatcctcgaggatagcgcagaccttcgtgaactcagcgaaagcctccgggaacttctcagccatcatatcgatcggcataggagttctgacgccggcgacgacgtcctcgccctgtgcgttggtgaggaactcgccgaacagcttcttctcgccggtagcggggttacgggtgaaagcgacgcctgtaccgcagtcgtcacccatgttgccgaacgccatcatctggacgttgacagcggtgccccagctgtacggaatgtcgttgtcgcggcggtaaacgttcgcgcgcgggttgtcccaggaacggaagacggccttgatagcgcccatgagctgttccttcggatcggtcgggaagtcttcgccgatcttggacttgtactcagccttgaactgacctgcgagggtcttcagatcctcagcggtgagctcgacgtcctgcttgacgcccttttcttccttcatcttgtcgatgagctgctcgaagtacttcttgccgacctccatgacgacgtcggaatacatctggatgaatcttctgtagcagtcccatgcccatctcgggttgttcgacttcttcgagatgacgtcgacgacgtcctcgttgagaccgaggttgaggatggtgtccatcatgccgggcatcgacgcgcgcgcgccggatctgaccgaaacgagaagcgggttctcaaggtcgccgaacttcttgccggtgatcttctccatcttctcgatgtactccatgatctcagccatgatgtcgtcattgatctgcttgccgtcctcgtagtactgggtgcacgcctcagtggtgatggtgaagccctgcggaaccggaagaccgaggttggtcatctcggcgaggttggcgcccttgccgccgagaagctcgcgcatgttagcgttgccctcggagaaaaggtaacaatactttttgctcataggtgaatttgacctccatatatgatttttatttacaacggttaatacagccacgccgatgacgctacaaacggcgaaagggtcggaaaacccgaccgcgcgaaaataccgacaccgactgcaatgtacattataacatattctgccc

SEQ ID NO: 2285 - DNA, 3612 bp, Unknown
  16S sequences of unknown bacteria
tatcaacccattgttgatggcctactatttacagggcagacaccatttcaatatgcttgctattatgtcaatcctgaaaagccttgggagtatcttcctagaaatatgatttccacattatgtgcgttgttaagagcaggttatctcaataattatgatattcgcaagatcagtgaggacggctttttcgataacacactattacaggtctatgatgaaattggattttcaagggaagaaatccatatctattcctgcccaatcaatgtatctgaacctaattactgcaaaaaagttgctgaatttcacagtgatctttacctgtcaaacaagatatccttatgtctgaccggaaattttacagtagagcatatcctaaaggaaagaaatattccagtagtaaggtgcgccataaatactgaatctatcatggatcgggtcagtcaactgcggttggttcatgagacaggtcccacggaggaatatcgaatcgcagttgttattgtcgcaacatcttttctacgggaacattcactgaattcaagaagtgagcttcagcttctgcagcaggaaaatcgaagcagagaaattatatatacaatggcaggtcaacttaatgccgctctcgttgataaatcgcagacctattatctctttacaacacaactccagattgcccgcgagacacataacttcaagaatatccctgttcttacaaagctacaggcaatcgatcaaagtgcatcaatttccatcgggattggattgggggctactccgtcacaggcaaaacgcaatgctgagatcgggctcaaaaaagctgctcgttacggaagcgcaggttttgtcatatatgaaaatggacaaatgattggcccgattacagaaaactcgtctgacagtcaaatcccattgttagaccgaaatctgtatttgatttctcaaaaaacatccattggaattgatacactcagtctgattgatcatgtacagcggcagttcgatctgaatgaaacaacaccttcggagttagcgcggctatgcggcttcactctacgttctatgaaccgatttttacagaggctcatagatgccggatatgctgttgtcgttggaaaagaatcgtctcagaaccctggcaggcccaaacggattattcgcttgcgtctaacagaacgtaaatagttatagtggaaatacgtgcatcataataattggcaccgacaagggcaagtcatactcacgattatcttcagttctgcagaatctttcaaaggagaacatatatgaactaccattcttatccctacccctcccgccgcatggttgcatttggacatcgcggaatggtcagcacctctcagtctctggctgcacaggccggcctagaaatcctgaaaagaggaggaaatgcaattgatgcggctattgcaactgctatctgtctgacaatcgtgcaaccaacctccaacggaattggaagcgatgcgtttgctttggtgtggacacagggaaaattacacggcctaaacgcgtctggaaaatctcctcttaaattaaccccagaagaaatggcccggaaaagttactcagaaatgccggaacgagggcttgcatctgtaactgttcccggtgcccctggcgcttggcgtgcaatgagcgagcgatttgggaaattaccctttcgtgagctgtttgagccagcaattagatatgcaagggaaggattcgtagtttcagcaacagtaagcgaactgtggaaagatgctggtgtttccacctttgcgcccttcagagggaatccagagtttgatgaatggtttaaagtttttacaaaagatgggtgtgcaccccgcgcaggagaaatttggttcctgccagatcatgccgatactcttcaggaaattgcagaaactggggcagagtctttttaccacggctcgttagcggaccgaatggattgttccatgagagagatggggggatggcttaggaaagaagatttggaccagtttgaagttgagtgggtcaatccgatttctgtaaactatcatggttatgaggtatgtgagattcccccaaatggacagggaattattgctctgatggccttgaatatactagatgggctaaacgtagcgtcaacagaggaccccatgagctggcatcaaagcatagaagcgatcaaactggcagttgtagatgctcatcagcatgttaccgattcaaattatatgaaggtatccgttgaagaattactttccccagcttttgcggctcgccgcaggcagtcgattggcaacaaagccatttttcctgtcgctgaaaatccaaaagatggagggactgtttacctttgtactgctgacgccgagggaaatatggtctcgttcattcagtcaaactttaagggatttggttctggtattgtaatcccggggacaggaatttctctgcaaaaccgtgggtgtggtttttctctcaatcaaggtcatgtcaacttccttgcaggaggaaaaaagacattccatactattatccctggctttttgatgaaagatggacaacctgtggggccatttggtgttatgggcggcgcaatgcaaccccaaggccatgtgcaagtaatggtcaacctgatagaccgaaatatgaatccccaatcagcgcttgatatgcctcgatggatgtggaaaaaaggaaaggaagtcattgttgaacatggggttccctatcatatcgtaactgcattgcaagagatgggacataaaatttcttattctgtacagcgggctccctttggacgaggtgatatgattctaagaacagaattcggaacactagccggggcaaccgaaccgcgcgcagatggatgtgtagctacatggtaaggggatgaggtattgcataagcccagaaacatcccggtccaagaaacattgctctttatctctatattaacagctgttggtggatatttgaatgcatacagcttctatacgcatggttcatttacttcactacatactgggaatatggcaaaaatggggatatcagtctttcaaggacagtggtcggaggcattaatggtcctgatccctatctcaggaaacattgtaggggcatttcttgcggaattgctcagacgttcttgtaccacaaggcatcctttgatatggcaaaaagtttcaatttcttccgagataattgctctatttatcatcggttttttgccggtttcacttcctaatatcttaatcaattggttcctttctgtaaatgcgggttttcaactaagtaatttccgctcttgtgaaggaacagtacataacacaactatctgtaccggaaacctacgaacagtcgggcagtacctttgtacagcagttataacgcgagaaaaaagtgcagtcaccaaattattccgttatgcagctgcagtgttttcattccccatcggtgctgggttgggagggatcgctacattaaagttagggggatatgcatcgtggatttgctgtattggccttgctattatactgtacttaatacaacattccacggacagccaaacgtaaagctaattaatgctaatacatacagggcaattat

SEQ ID NO: 2286 - DNA, 27703 bp, Unknown
  16S sequences of unknown bacteria
ttttgcgccacgaatcagcattttatcaatcattgtttcactccagatacttaaagccccattttgtcatttcgtaaaagaccggcaacaaatctttccctttgtcggaaagcgagtattccacatggggcggtatctcgttgaattgcatccggttaaccaaaccgtcctgttccaattcccgcagcgaggaagtcagcattgtattcgtaatgccgcccagttcctttttcagttctccgaagcggatagggcttttgatacaaagctcatagataatctgaaatttccagcgtccttgcagcatttcaaggagcggtgttacggggcaatttcctgcctgtgttgtgatgccgttgtggacgagttccatatattcgtcataagtcatttctttactcatcgaatacctccttaggtatgatattttgtacttggtcagaataatctgcgtacttgatttctttttctgatattagtataatataaataccgaaagaaatcaagcatttcggcaataaatatcccccggcacagccgggggttttacattcatcgggcgtagccctattctactagcagcgtctaaaagacgcatacacgactgccatttgcgtaaggtagtttacttgctacccgtaaacgggtcaggctctgcgagcgtcagctggctcccaagttcatcctctttcagctgatggcttatgtactcgcttattgctttcgtattttttcctactgtgtctacgtaataacctcgacaccagaattctctgttcttgtatttatacttcatgttcccccatttctcgtatatcatgagactgctctttcctttcaggtatcccatgaatgtcgaaacgctcatctttggtggtatttctaaaagcatatgtacatggtcggggcatacttctgcgtttaatatatttactcatttccactcgcacagttgtcttaatatcgctcctatttccagtctcttatctccgtaaaatacctttcgtctgtattttggtgcaaatactacttgatacttcgtgtcattctgtatctgcaattatgaaaggaggcaatcatgtctcaggtacaaaacggcacgaaggaaatgcttcccgacaagagaacctacacggtggaagaagtcgctcacattttgggtatcggcagaacctccgcatatattcttgtcaaagaggggcatttcaaaatcgtgcgaatcagcggtcaatgcatctgattcatgaaagaacaccaaggcatccattgtcaaaacttcttttttatctaatgctccgttgccgagaacgaaactgcctccaactcattttcgagcacatctgcgtatctctgaaccgtcggacccagattaccgagccagtgcatggtatcgtcatcagctgcactaagcggattctgtcgaatttcaattgtacgtcggagcgcggattcatcctgaaatacatgattttccagtgcccatattacggcgtcagtcttagcgatgacatcattatgccgcaaagtataaatgcatctcgcgatatcaaggagccagccacatgaatagagacgttcgtcagtctgccttgcgtacttgcgaattgtttcgtaatgctcctttatcgcggatactatttctttacggtcgggcagggaaaagatactccgctcatcctcgccgtaaacgacttgtccgtatcgcacaagctcaagtgacgcaaaaacatcaggggtatatttgtcacatatccgctgtccggaggtaccccaataaacgagccgtgtgaatctgtttttacggtattcggtcacttccgcgataattccttcaaataggtggtaatagggattttcgggttctttttgcgacatcgcctgcctgagataaaccagcttttgagcctgattttcggttatttgagtgttcgtgagtgcgataaaatcaatgtcgctccatcccaacctaaaatcatcaataacaacgctcccataaagccaaaagctatgaagattgccgtccgtaatatcatagatttcgcttatcagctttgaaacagattcagtcatagataccctctacagtgtattttgataaagataaagaaaaaacacagaccgttaagcctgtgctttctggcgttcccgaggtgattcgaacacccgacctatcgcttaggaggcgatcgctctatccagctgagctacgggaacacatcttgttaaattatagcatatccgaatccgtttttcaatagctttttgaaattcggcttgaattatatttctgacttcacttgataatatacgccttgatactggaagaaacgatcttcgccgcggcgtccgctatttcctcgggagtttcctttgcgtttcctctaagccagcttgccattattcctatacatccgtttattatgaacgagttgaagttgccgtatttgtttttgtcaagctgaggattcaaaaggctccagtatccgctgcatttatcgtagacgaaccgcttcatcttctcgacaaacgccatgtctccgtttgcaccgagcagtacacggcagaaatcgcgattttcgtacacaaatgtaaaaatagcctccatgtagttgcgcgtcagcttcgatgagtattccttgcacggcacctcattgaatatcgcttcaaactctacgaaaaactcctcctcggtctggcgaagcatatcgtatatgtcggtgtagtggaaatagaacgtcccgcggttcacatcggcaagctcggtaagctcttttaccgatatctgcgttatctgtttttcacccataagctgtatcagactctggttcagctttctttttgtattgcggacactgcggttttcgtccccttttttgttcataaaaaattctcctttatctttgaacacaacaggcttaaagtgttgaaatttgcacacgaagaacgaatttatatcttgacattgctccccaatttcgtataataagtatagttaatttttcaacatttgtcaagataaatttagtcagccggagggctttgtggaaaacaataataagcaaaaaaagaacgttatggagcttatagcttcaacaatagtgcagggaagaatggttgtatacattcttttcgcggcaatgattgtcttttgtgtgctggggcttagcaaggttcaggtcaacaacgacatcaccgcgtttctgccgtcggatatcgaaacaagacgcggtcttactataatggaggacgaattcgagacatttgcttccatacgtgcgatggtatcaaatatcactctcgataaagcgcatgatttagcggatgaactcggcgagatagaccacgtattcagcgtttcttttgacgacacaaccgcgcactactcatcttcgtccgctctgttttcaatttcacttgactgcaccgaaaccgaccctgccgcggaggaagcacttgaaacaataaccgacactctgaaagattatgacacttatatctcgacgacaataggctatgacgtctcggcacagattatgaacgagatgggcggcatcattgcgatagcgcttatcgttatcgtgcttgtcatgctgttcacctcagtcagctacttcgaggtcgtcatctgcatgatatgcttcggggtatccgctctgctcaacatgggtacgaactacctcctcggagaaatatcgtcaatcacaaactccgtcgcaataattctgcagcttgcattgtcgatagactacgcaataatcctctgccaccgttatcaggaggaatttgaaaactacggcaacacaaaggacgcgataacaatagcactgtcgaaagcgatagttgaaatatcgtcgtcaagccttaccacaatatcgggtcttgtcgcgctgacacttatgaagttcagactcggatacgacctcggtacggtgctaatcaagggaatattcttcagccttattaccatattcctgctcatgccggctcttatcgtgctgttccataagtcccttgaaaaaacgacgcaccgctcccttgttccgaaccttaagccgtggggaaactttctcgtaaagcataagctcatattctccgttatcttccttatattgatacccataggaatttactgctcgggcaaatgcgtctatgctttctcggataaaacaattgtgcctatagtaaagtcagaaagatacataattgacgagaagataaacagcaccttctccgacgagacgacaatagccgttcttgttccgagaggggattacgacagcgaaaagaaaatactcgaagaatcccttgcactcgacaacgtttccgccgtaacgggactcgcgaataccgaggttgaggacggatacaccttgaccgacctttacacacctcgtatgtttgcggagcttgtgaacatcgacatcgaggaagcgctcctgctgtatcaggcttacggcgtctcaaaacaagattatacccccattttcaacaacgccgctgagtataaagtacctgtcgtggacatgttcctctacctctttgacatgatggacgagggaatcgtcaatctcacgggtgataacgccgacaaggtaacggagcttcgcggaactctcgaaaaggctctgctgcagctgcgcggggaaaactggagcagacttgtaattacggcaaatgttccgattgaaggtgacgagagtgtggcgcttgtcgcgaagatacacgaaatagccgacagctgctacgaaggacaggacactctcgtgataggagatataacaagcgcccgcgacctgaacgaaaccttcagcggagacaacaccctcgtcaacgcgctctccattattttcgtgtatgtgattctgctcttcacgttcaattccgttaccggcgcgcttctgcttgtgttcgtaattcagggaagcatatggataaacttctcgttcccgttcattacggataccaaaatcagtttcatcgcgtaccttatcgtgtctgcaattcagatgggcgcgactatcgactacgctattgtaatgatgagcagattcaactcgcttaaggagactatgacgcgtaaggaagccgccgcagaagccgttaaacagagctttgctaccatattcacctccggctccatcatgaccacagcgggattccttatcgcgtatatgtcatcggaggtatatatcagctccatcggacttgcactcggaagaggcgctctaatctcggtaatactcgtgctcaccgctcttccccagctgatatacctcacggataagctgaacacaaagacaacgttcaaagtcaaccttaaattaaaagaaaagaaggatgaagataataaatgaaaagaattttatcctgcttaacagttctcgcatttctgtttactctcattgtcccgtgctttgcggcaggtgaaaacagcagtgttatatacataaaaacagcaaaagacctcatggagctgtccgaaaaatgcacgcttgacacatggtcgcagagcaaaaccgtacttcttgagaacgatattgacctcgcggacgaagactacaaaagcattcccgtgttcagcggaacttttgacggacagggatataccgtaaagaacctgaaaatcgactacagcggctccgacctcggtttgttcagacacatcggacgcggcggtcaggtaaagaacctcagcgtcactggaagcgtctcccccgacggaatcaaggaaaacatcggcggtatcgcgggacacaacagcggcagcatcatctcctgcacattcacaggcaatgtagacggagaaaacaaagtcggcggtatcgcgggactgaacgactcgacgggtatcataaccgactgtacgttctccggcagtgtcacaggcaaaacaaaagtcggcggcatagctggagaaaacgacggaaatatattctcttcgtcaaacagcgcggacgtaaacaccattccggtagagttttccgcctcaacggtaataggaagcgtgcttgacacaaaatccgtctcagatatgaatgaaataagcgacacggtaaaagacatcggcggtattgcgggatattcttccggctccatccgcaaatgcacaaacagcggcactgtaggatatatccatatcggctacaacgtcggaggaatagcaggcagacagtcgggaaacatcaaagactccacgaacagcggaacagtctacggcagacgaaacacgggcggcatagcgggtgagatggaaccgtacacatcatgggttgtttcaaacgattcgcttgacgaactgcggacggagcttgacacgcttcaggatatgacgaataatctccttgacgacgtaaagtcacagtcgagcactctgtcagaccagttcgacgacagcataacccagcttaacgccgccgaggaatcgcttgacagccttattacctcaaccacggacttcgtaaacggcaatgtcgactcgattaacgaggtcagcgtgagaatatccgacttcatcagcggcacggagaaggtcacggacgagattgcggtattctgcgacgatcttgaaaaagccgtaggagagatttcggacttctcggatgaattaaagctcgcggttgacgacggaataaagccctctctcgactgtctctcagacgctggggcgattctgtccgacggaatgcgggaaatggagagcgcacttgaagaagtgtccgacggattcgccgctcttgaacgttctctcggagataccgacgccatgtacagagcaatgcaggatctcgccgcttcgtttgaggatttaagctacgcagtttctgcgacgggtgatgatgtttcttcactgatagacaaactctatgacgacggaacctattattacgacagctttttaaactcccttaattcttcactctccgacctcaactattatcttaataacctcagctcagcggtgtacgatatcgcagaagcgattgcagaagcattagctacgggagatttcagcatactccaagcggcactcgaagacttcgctgataacataagaaacagcgcagattcactatatgacgtgatacattcgtttatatatctaacggaaggtatgcgcagtatgctcgacgacttaaaagttggcattcccccgatttcaaacgaccttgactccctctcaaacgctcttgccgatgtttcatcaagtataggaagcgtcataggggaagttgacgtgcgtgctctcggagaagctctcgatgacttcagcattgctatggatactatggcaggcgcgttcggcagtgtatcggaagcgacagacagaatgaacgacggcaaggaatacgccgatatcgcactcgaccatatctccacggcgttcggagcaatgtcaaaggcttccgactccatgactactgcggcgtcttcactgagcaatgcggcagacgctgcctcctcacttgtctccgattttgccgcaaaagaacccgtcaagttcgtgaaaatcgacgacagctttactacagcacagaacgatctctttgattcgctgaaaaagctctcggattcagtgaatatccttgtcgatacggcttcgtcggatatccttgtgaacgacctccgcgcgctgtccgaccagatattcaagaccttcggcaagctcatcgacattgttgactcagtgagcgacgtaagcacagaccccgagacatacaaggacgacgtatcaagcgaaaacgaaaaatactcgacaggcgttatctccggctcggcaaaccgcggaaagataacaagcgactacaactccggcggtattgtcggaaacatctcgattgagatatccatagaccttgaaaacgacttaaacctctccggtatcttctcaaagagcgcaaaacacctcatctacgcggtagtttccgactgtgaaagctattccgatatcgaagtgaaatacaataatgccggcggtattgtcggaaacatggactacggatatgtaaaaagctcaaagtttgcgggcagtgtcctgagcgacagcggagactacatcggcggcatagcgggatattccgacggcagcataagctcttgtctctcacgcgtaaacctgagtggtaagaactacataggcggtatcgcaggtcgcggaaacaacgtctcgtcctcctgtgccgtaacatatgtggacagcgcgggtgagagagcaggctccatcgtcggttcatcaagcggagatgtcacagaaaactacttccttgacagctcggctctcggcggcattgacggaataagctacgccggaaaagcagagcccgtgacatatgaagagctgcttacaaagacggattcaagtgaaatattcgccgagacgacagttacatttataaaagacggcgagactgtagcagtacttaacgtacccttcggcggaagagtggaggagcttcccgagatacctgacaaagacggaatgtactgggtctgggacagctttgacagggaagcggtgtactccaacatggtagtagaaggcagttatcgttcgccgcttaccacaatctctaccgatgaagatgttccgatgttcctcgttgaaggtgagttctatacggagcagaagctgacggtatcggaatggactcccgaccttgacgcgcttggcattgagcatgaaggcacatacgcggcatacaagctctccgtgagcgactacaccgacgacctcactgttagaatgagacattccgattcaggaaagctgtacatcatgaacgacggtgttcccgaagagataaagttcacaaccgacggctcgtacatagtgtttaaggtaaaaaacaactcttccttcgtgttcgtcgacagcagtaaggtctcgcataaaacggctgtgataatcgcttcatcatgcgcggcggctgttgttgcgggagctgtgacgactgtaatagttgtgagaaaaaagaaaaagagcaaaacgaaataaaatacaaaataggatggcatcgagcgtgtgtcatcctatttctgtattcagtgtgatttatttttcgttaagcgaagttgttgcgtgaactacgatagtcttgtcatagcaggagaacatctcgtccgtcttcttcttgtcgagcttctttgtgaacaggctcactacgggaacaagcacaagtccgcaaatcatggcaagcactccggcgttgattggggaagagaaaaacggcgtgatgaatacttttcccgtgaaggtgcaaatcatattcgcaatcattattcctacgccgcagatgaagctaacccataccgaagactttgttacccacttaaaatagaggctgtacatgaacggagcaaggaaagcccccgcgagagcgccccacgaaattcccataagctgtgcgataaacgtaatgttagacttcatctgaactatagcgattacggctgaaactgcaatgaagaacacgataagtacgcggatgagagccatctgagacttctgttcgagctttttgccgtgcttttcgcttatcggaactatcatatcaagcgtgagagttgaggaagaggtaagcacaagggaggacagcgtagacattgacgcggagagcacgagcataataacgatagctacaatgacgtcgggaagagtatcaagcatagcggggattatgctgtcgtaaaccggcttgcctgactctgaaaaagcgattttgtcagcgtaaagtctgccgaatccgcccatgaagtagcatccgcctgcaacaacaaacgcaaacagtgtggagatgagcgtaccctttgatacagcggattcactctttatggcgtagaatttgccgaccatctgaggaagtccccatgtgccgagggaggtgagaatgacaactccgaaaagcgcgagaggctcgggaccgaagaaagatgtgaacgcgccgctcagtccgggattagtttccgcggtaatctgcgagagtgtgcggagagcttcattaaatccgccgttctgcttcaataccgccgcgataacgataacaataccgacgagcatgattattccctgaatgaagtcgttgaccgcggtagccatatatcctcccgcaatgacgtaaattccggtgaacacgctcattatgataacgcaccacatgtagtcgatatgaaaagcggactcaaacagacgtgacaagccgttgtaaagggaagcagtgtatggaataaggaaaacgaaaacgatagcagacgccgcgagcttcattgaggaagagtcaaatctctttgagaaaaactcgggcattgtggcagaagacaagtgctgagtcataaggcgggttcttctgccgaggattacccacgcgagaagtgaaccgataagagcgtttccgatgcctatccaggttgaagaaacgccgtatttccaaccgaactgaccggcatatccgatgaaaatgactgccgagaagtaagacgtgccgtaggcaaaagccgtgagccaaggtccgacatttctgccgccgagtacaaaaccgtgaacgctttcattctttttcttgcaaatgaatccgactgttatcatgatcgcgaagaatacgaccagaaataaaattttaacaaacattttttacatcccatccgctgttaatgcagcaatttaatatattagggtacgccgtaaagatattctatcgtgaaccgcctgcctttacaaaacaaaaaccgcacagacggtgattctgtgcggcaaatataacttattttttcccatcacaaatcactattaccctttatccgcggtaatagtaataatagtaatatgtgttggcaaagttaagcatgatttattatccttttttgtttttttgaattataccaccgaggtgaagtgttgtcaatactttcagcaaaatttattcaaatatttctgcctgataattcattattcgcatcttccgcgagcacttctcttgtcgaatgcgggattgtagccgtagaaattctttgaatccatgttgtcctgagccacacgaagagcatcgccgaagcgctgataatgcacaatctcacgctctctgaggaattttatcgggtcgcatacatccgggtcgtcgataagcctgagcaggttgtcataggtaacacgcgctttttgctctgccgccaagtcctcgttaagatccgccagaacatcccccttgacaccgatgtacttcatgtcatacggcactccggacgccgcaatgggataaactcccgtcgtgtggtcaacgaagtatgtgtcaaagccggatttctttatctcttcctctgaaagattacgtgtcagctgatagacaatagtcgccaccatttcgagatgcgcaagctcttccgtaccaacatcgtttagtatgccgacgacttctccccacggcatagagtatcgctgattcagataccgcatggatgctccgagttcaccgtctggtccgccgagctgggatatgatgagctttgccatagccgggttcggattctttatttttatagggtattgcagctttttttcgtaagtccacatattctgtttcttcctttcagttccttataattgccacggccaaggctcttttacccatctccagccatttccgcatgctccggtgtttatcgacagctgaccgtatttttcctcatattccgcttcggcttctttcagtatcctctggtatttctccatgtggcgaagagcctgccgacagttcgggtgagagtcaagatacaaagcggtttcctgtatcataaatgaacagttttgtatcagtctgaatagtttcttttgttcgttcataattccaaaccttttccttctttcatttatttgctgcgtcacttgcatgaacggcaggcgggaagctccagctccttgaacatagttccgtgtgcgagcgcttcttcttccgaatacagctctctccactcctggtccggtgaatataccatagcgagagggaatgactcaagccgtctgtccgtcatgcatcctctgccgcatccactctcttcccgcgtcgtctcatctctttctctcgactgaccgcatgaacagccgcttctttctccccgtgtgctgcgcctgttgtctctctgaggagttactctccgctgttcgtttcttgagcatcctgtattgcatgagcatccggtatcggaattcgccgctcttctgctctcaccatatccggtgcagctgtctccgagaatgtcgttcaaaatctcgccgtcagccatatcgagcggagaagagcatctgtttttgtattccatgtcttttactcctgtcctttccgtgttcttatattaagtctgcgagaagctgcgtatactgaagctgctatgcatacttctcatcacgagtatatgcccctcggagctgatttgacataacaaatagtaaataaatcgccatcaaatgataatatttactttaaatctcttgataaaaaatgaccgatgtggtaaaattaatgaatacaatactattatttagatatgtgggggaagtttttgaaaaatttgtttaaatacttaaagtactacacagtggaatccatcctcggtccgctgttcaagctgcttgaagcaatgtttgagcttttcgtgccgcttgtcgtcgcagatattattgactacggaataaaaaatggggataaatcctatattttcagcaagtttttgattttaatagctctcggagttatcggtatcgtttgttccatcacggcacagtatttcgcggcaaaggcgtctgtcggatgttcgaccaagcttcgcagagctcttttcgcgcatgttcaggagctttcgttctccgaccttgaccgcattggggttcccactcttatcacaagacttacgggagacatcaaccaggtgcagagcggacttaacctctcgctgagacttctcctgcgttcgccttttgtagtgttcggagctatggtaatggctttcactataaacaaatcggcgtccctcatcttcctcgctgtcattgcagtcctcgcggcagtcgtattcggacttatcctcggctccgttcccgcatacaagaaggttcagggagagcttgacaccatcaccggaatcacaagagaaagtctcaccggctcgagagtaatccgcgcgttcggcatggaaaactcggagcgtgagaaattcgccgagcacaacggttctctcagcaagaagcagcgttttgccggaaagatatccgcgctcacttcacccatgacatttgtaatactgaacataggcatcatactcctgctcaactactcgggaattcaggtgaacacgggaagcatcacaacaggtcaggcggtcgcgctgtacaactacatgacgcagattcttgtggagcttatcaagttcgcgaacctcatcataagcatcagcaaattcataacctgcatgaaccgtattgatgaaataatcgaaacagaacccgcaatggcattcaagaccgaaactcccgccgctcaggatacagacaacgcgatagagttccgctcggtcgacatgaagtatacaaaaggtgcggacgcggctctttccgacatatccttcacgattaaaaaaggcgagactgtcggtattatcggcggcacgggatgcggcaaaacaactcttgtcagcatgataccgcgattctatgacgcaacggaaggggaagtgctcgttgacggcgttgacgtgcgcgactatccttcaaaagaactgcggagcaagataggctacgtcctccagaaggcttctctcttcaaaggaagcataagagacaacctcaaatggggtaagaccgacgctaccgactccgagcttgacgaagccgtaaagaacgctcaggctgtcgacgttatcaaagcgaaaaacgacggctacgactccgcggtagaacaaaacggacgtaacttctcgggcggtcagcgtcagagacttactatcgcacgcgcactcgtacgtaaacccgagatactcatcctcgacgacagcgcatcagccctcgactacgcaacagacgccgcactcagaaccgcactcaaaaacctcgactataagcctactctcatcatagtttcacagagaacatcgtcaatcatgcacgccgacaagataatcactctcgaagacggcaaaatagcgggaatcggaacacacgaagagcttctcgaaagctgtcccgtttatcgtgaaatctatgaatctcagtacaaaaaggaggcttaatcatggctaagaagaaaatcaaattaaagcgcgaaacatggagccgacttttccagtatctgaaaaaatacctctggctcctcgcgttatctataattttggcgggtgttacggttgtcctctcgctctacatcccgattctctgcggacgcgttatcgactgcatgatagatgtgggacaagtcgactttgacgcgatagcacagaacctcatcaaaatcgcgatagcaactctcagctgcggaattttgcagtggttaatgaatacaataaacaacagaatcacgttctccgtaataagagacgtgagacgcgacgcattcgacaccataacccacctgccgatatcttatattgactcccatcctcacggcgagactgtcagctgcgtaatatccgacgttgaccagtttgccgacggtcttcttctcggattcacccagttcttctcaggtataatgaccatcatctgcaccattgtgttcatgctgacgataaatcccattattaccgcggtagttgtggtgcttactcctctgtcgctctttgtagcttcgttcatagcgaaaaagacctacgcaatgttccgcaagcagtccgagacaagagccgagcttaccgcgcacatcaatgaatcagtcggcggacagaacgttgtgcgagcattttcaaaggaagacgatattctgtctcagtttgacgagataaactcccgccttgaagactgttcgctgaaagccatattcttctcgtcaataaccaacccctccacaagatttataaataacgtcgtttatgccgctgtgtgtctgaccggtgctattgccgctgttgcaggatcaatgacggtcggcggactcacgagcttcctctcatacgctaaccagtacacaaagccgtttaacgaaatctcaggcgttatcacggagcttcagaacgctttagcctgcgccgagagaatattcgagcttattgacgaaaagagatgcacacccgacgtaccgaacgctcacgtgcttgaaaacgttgacggcagagtgaacattgacaatgtttccttctcctacacccccgaaaaagagctaatcaaaggccttaacgtaacagtcgcaccgggtgagagagtagcgatagtcggtcctacgggatgcggaaaaaccaccattatcaaccttctgatgcgcttctacgacgtaaattccggcgacattctgatagacggagacagcatatataagtccacccgcgactcacttcactccacctacggcatggtattgcaggacacatggataatgcgcggtactgtcagagaaaacattcttatgggcagggaagccaccgacgaggaagttgaggaagccgcaaaagccgctcatgctcacagcttcatcagacgtctgccgaacggatatgatactgtcataagcgatgacggcggcgcactgtcacagggtcagcgtcagcttctctgtatcgcgagagttatgctcaagataccgcctatgctcatccttgacgaagcaacatcttccatagacacacgtacagaattaaagattcaaaaggcatttgcggcgcttatgaacggcagaaccagctttatcgtagctcaccgtctttcaaccatcaaagaagcggacatcatcctcgtcatgaaggacggaaaaatcatcgaaaaaggaaaccacgaacagcttcttgccgccggcggattctataaaaagctctggagcagccagtttgaatccgcaccgcaaaacgcttgattacaatagcggagggaataatgaaaaagggaaaacgtttatctgtcaccgcgctttctgtctgctttgcagctctggtattgctcctctcatcctgcgatagtaccgataaagacccttccaatgtcgaaactacaccggaaagcactccgacagtcgaaaccgaagcggaagccgaatcaggaacgtcattttattccggcatgaactattcgggatataagcgtcccacagtcaaaaccgacaagcagtatctgccgacggagccactcgctgaagcggaagaaggcaagataatctacaccgttaactcgaagtccgcgggaagagtggaaggctggaaaacacaggacgcgggaaaagagtcaaatgtagttgaggctgtcgcgaagttcggctacaaattcgtaaagtggagcgacggagtgacgaccgcaacccgttcgggagacaccgccgaaggagtttacaccgcgatttttgactacgacattctcgatatgcccgtgatttccataaatacggatgacggagaggcgattacgtcaaaggaagaatacaaaggcgcgacattctcactcatcggatgcgcgaacaagtatgaaataaattcgcttcccaccgagataagaggacgcggcaacaactcgtggtcatacccgaaaaagtcgtacaagttcaagctgtcggaaaaaagcaacctcctcggaataggcgagggaaaagaaaaggtatgggtgctcatagcgaaccagtgcgaccagtctctacagcgcaaccacgtttcgtttgaatacggaagagccgtcggcggtattgcatgggagcctgcgtccacatcagtcgaggtttatctgaacggcgaatatcagggcgtatatcttctggcagaggacatacgagtgtctaaaaaccgtgtgaacattacagacgacaagcccgatgagattgatacaggatatctacttgagctttcaaactacgcctcgggagacgttatttacgcggcaaacagaagctacatgatacacagcgatctttccgaggacagcagcataaagcgtgaacagcgtaaattcatttcggattacgttgacgaagcatatgccgcgctcgcctccggaagctacgaggaagcggagaaatacatagacattgactctcttctcgcaacatatctcgtggaagagcttgtgaaaaacctcgactcacagtgggacagcttctatctctataaggacaccggaacaaagctgtatttcggaccgatatgggacttcgatcttgcactcggaaacgcaaatgagggagaagagctgtacacagacatcttcgtcggaaacggacgtggaagcggcggcagtatgggaacatggttcgcggtcgctatgatgcaggaatggttcagacagctcgtgcagaacagatggaatgaaatctattccagcataagcgaaatgccgaaatacatccttgatgagggcgaactcggacttcgttcatatgagcgcaacttcgagaaatggaagattttcggcacggtgcagaaccgcgaaaccgaatatatcacacgtctgagcacctacaccgagcattatgaatacctcgccgaatggcttacaaaccgtcttgagtggctgaacggtgcattcaacgacgagggctttgtttcggaaggcaagggaactctgcttgagatgatgagagcatggaacggtgaaggcgacgaaaaccgcagaaacaactacggaaacaaggataccgaaaagctcacgataaaatatgattcaatggcggattacgtcaacacaaactcagttgaaggtcctgacggatttgacggagagggcgtaagaaacctctttgacggcgacaaacgcacaaagtactgcattgagccgagcggagacattgtagttacattcaagctgaaaaaagccgccgaggtcaaagcatatctcctgagaaccgccaacgacacgaaggattatcccgacagaaaccccgattcgtggacattctacgcaagcgaggacggagaagagtggacggagatcacccatgtggacaacggcgaagaatcaatgggagcggaaaactatatgtggtacggcttctcaatcgactcccccggaaaatacaaattctacaaaatggtctttgaaaacagcggcacaatgcagctctccgagataagacttctcggcaaaaattaataattaaccgcgtcggactgtcaagtctacataagatttgataagtccggcgtttttttatttcccgtaaataatccgccggcaggtaataaggaaagcgagagaagaatataatgtagcgataaaaacattaggaaacctcttatttaaggttataattcagagtatccttaggagcgaattatgcaggacaccgaaaaagcagctctcgaatacttctccgacagaataagaaaagccgttttgggtgcggttcagtcaagcggcggcgtactttcgtgcattaccatacgtaaaaacggcgctgtttcggtcgtggcagaaggcaaaaacgtgctgtgcggcattcaggcgactcgcgaagaaatggactacacattagacaagctgtgcaaaggctcactgtacgcatatgcggatgagataagatgcggcgtcatcacaacggacagcggacttcgtgcgggtgtatgcggaacagcggttacggaaaaaggaaagctcgtgagcgtccgtgatatttcgtcggtatcattgagaattccgcacaggatagaaggcgcagctgattttatgcttccgctcatcaaaaaatacgactgtattcttgtctattccagacctgcgggaggaaaaaccaccgttctccgcgagctaattccgactgtatcagagagacatcgcacatcggttatcgacacaagatacgagctgtcatgctttttagacaaatgccaaatatgcgatgtgttcctcggatatccgcgatacgacggaattatgtcctcggtcagaacaatgtcgccggaatacatcatatgcgatgagatatcgacggaggaagaagccgaggctgtagtttacgctcatgccgccggagtcaaggttatcgcaagcgcacacgcgggaagccttgacgagctcaaaaagaacaaagccgccgatattctgctgaaaaagagcgtatttgactgcctctgcgggcttaatgcgttcggcgaagctccaacaataactatactcgaggacacagagcaatgaacacaatgataaaactgagcggaagcggacttctcatattcgcggcatttctgtggggacgaaaaaaggcaaatgccgaaaatcacgctatcatagtttttggggagttcatctcattcataaaattcatccgtgacaacatagcgcacatgaaaacgcctattcccgacatttgccgagaatatcaaaccgactccgcggagattcaaaagttcctaacggacgctgaaacattcggcattcgcgaagcatttgagaaaaactatgcgatactcccgcaaaaatcaagaaaaaccgcggaaaaattcgcttctgaaataggacgcggatacggagtcgagactttagagctttgccgatacacaatagacgtgctcgacgggcagtacaagacaatgaaggatgacatggtacagcgcagaagaatgtggtactcgcttccgccgcttttcgcctcatccgtaatactgatatttatataaccgagggtaaaaatggatgtttcactgataatcaaaattgcgggagtgggaatgctcatagccgtgacatatcaaattttacagcgcgcgggacgtgacgaacaggcaatgatgctctctcttgcgggaatagtgctcgtgcttctgctcatcgttggagaaataggcactctctacggcaaaatacgcgacattttcggcatatgactaaaatgaatctgcttgagttctgcggaatcggaatatacgcggcatttgccgttcttgtgacaagggagctgcggcgtgaggtttcgcagacggtgtcgttcggtatcttcgcagtgatgctgtgcctgtgcattccaattatcggcgagcttgtttcctttgcactgtcagtgagcgacaaggtgaacgaagaatgccgcgacagcatcggagtgattttgaaagcgctcggcataacctacataacgtatatttcctccgaaatctgtaaaaacgcgggagagaacagcattgcatcacaagtcgagttcatgggaaggatggaaatcatgctcctgtgcctaccgttttttgaaaaactcttgtcattcgctcttttgtgatatgaaaagaatcatcgtgctgttgtttgttctcgctctcttgaccgtgccgtgttttgccgaagagtattcgttcagcgcacaggacttaaataatatcgcgtgggacgagtttttgtcctctctgccagaagaagccgcaagggagcttgacggtataaatcccacagacagcttaaactcaggtgcaaaactcagagaaaaagtgtcgttttcacattggagcgacaggatagttttggctgtaaaaagggctctgcccgcgctcatctcttcatttgctccggtaatatcaatcctcatcatcacctcagccgcaaacaccgttatgccggatatgccgagagtgactgaagccttcggactatgctcaaagctcgcgttgtctgtcgtgctgatgtctgaaaccgtgcggataatgtctgacgtcaccgcgcacatgacaaggctatgcacaatgatgaactttttcctccccgtaatggaagccgtgagcatcgccggaggaaacgtcaccgaaaaaagcgtaacctccgccgccatcactcttgcagtcacgctcatcggcaacgtaaacacatactttttaactccgctcgtgtcggcgctgttttcgctgtcggtagtatcacttctgtctgaggacatgagccttgcgggagcggtttcgtcattccgtaaattcgtaggaagaatgtggcagatatgtacgattctgttttcgttcattctcggaatccagacgatactcgcgaagggaacggacaaccttgtctcacgcggagcaaaatttgctataggttcttttgtgcctgtcgcgggagggatgctgtcggaagctttcggaacggtgcgtgagggcatgaattacctgcgcgaggtgtgcggaatcggcggaattatagttttgctctcgctgacagtacccgttctcgtgccgatgtttctctataaagcgggaatattcgtcacaaaaaccgccgccgaaattctgaaatgcggaagtatctcatctgtaatagaagaatgcggcggaataatagacatgctgctcggggtaaccatatcggtggagcttatgtttttgttcgcgatatttctcttcacaaaatcgtggtgaaatatgtacctgtactacaacagtctaattataatcatgctctcggcgttctttttgaattttctctcgcccacagcggacttttcaaagaaattcatgcgacccgtgtgcggacttatgctgcttgtcgttctgctgtctcctttgccgtccctctcaaataacgcggactttgattttaacctgtcgagagcatccgacaccacaacccgcgagaaattaacatcggacgcatacacgatttttgcgtatctttcatcggaatacggcatagaagcggcggataccgtatttataacggacgagggtgggagcatatcagaaatccagatttttacctccgagctgccgtacaacataaaggaagcggtaaagacagacataggctcaacatacaaatgcgaagtcaggatatatacagaggatagctatggaaaaaaatgaaaacaagccgatgaaattcctgcgggagaaaagcaaggaaatttttatacttatcttgctgattgccggtgcgctgctcatcattctcggaagcatagactttaacggaaagaaggaaggtgtgcaatacacagacgtagaattctacacggaatatcttgaaaataaaatagcgcggatgtgcgagaatatcagcgggataagcgaggcaaaaatactgctcacacttgactgctcgagcgaatatgtgtacggcgacagcgcatccgactacataatactgaaaaacaacaacgaggaagaagcggtaatgctccgagaaatatatccgagagtgcgtggaatagcggtagtctgcactggaggagatctgccgagaatccgcgagaccgtcacagacctgctttcagccgcgataggaattccggcttcaaaaattcaagttgcgggaatgtaatttcggaataaaagcaaaactcacgcataagatttaacgtaaacatattcggaggtaatcaatatgaaatttaaggcattcaaggaaaaagtcaaagagctgtgtaagaaagccggaatgaaaactcttattgccgtgtgcgcagtcgtggttcttgccggagtcgttgcactgaactttatcctcacaggcaaggtcaaagagacagggaagataggcatagacctttcctcagcagacaccgcagaatccgcgtccactcttgaacctaatgaagtggcagactatttcgcggcaatatcactccagagaaagcaggcgcgcgacgaagctaaagaggttctcctcaccgtagccgaaagcgcaacagccattgacgaggtaaaggaaaacgcaattaccgacataaacaagctcgcggctgagatagagcaggaagcaaacatcgagtccctcgtgcagtcaaaaggattcgcgcagtgtgtagcggtaatcagcgacgaaaaatgcagcgtcatagttgaatcaaacggactactcccgggagaatgcgcacagatttccgagatagtctatgaacaagccggaataattcccgaaaacttaaaaattatcgaaaaagcttcataataaaagagatacggttggctctcgaaagaaaactgaccgtatcttttcatattttgctatagaagttcagcacggttcgtgatataattacctcagtaaacaaagaggtagaaaaatgaacacactgaattcttttgaaatcgggattctgcacagcctgcatgacgccttgcaatgtgcttttctcgatacactcatgccgataatcacacgactggcaaactcaggcatattctggataatgctcgcactgctcctgctgttttttaaaaagacgcgccgcgcgggaataaccatgggaatagcgctaatcctcggacttgtcttcggcaatcttctcctaaagccgctcatcgcaagagtaagaccgtatgattttgacccgtccatcgtattgctaatccccaaggagaaggatttttcgttcccgtcgggacatactctcgcgtcgtttgagggtgcggtgtctctgatattgtaccacaaaaagtcgggtatagctgccgtcgtgcttgcctcgcttatagctttctcacgtctttatctcatggtgcattatccgcttgacgttatcacaggggtaattctcggcacggcttttgcgtttatcgcgtcgaggcttgcagacattctcataaaaaaggcttcgattcccgttatataaccgcgttttcaaggctcagctttctaatgctatcttttatggtatcggcggaaagtctgagtcttttcatttcgtcctcgtcaagcggaatgtcgagcacctgcttaactccctcgcgtcctacaattgcgggaacactcaggcatatatccgagattccgtaatgcccgtcgataagcgtggatacgggaagaatggagttgtcgtcgctcacgatggattttacaatgcgttttgtggactgtgcaattccgtagtacgttgcgcctttgtctcggattatatcgtacgcgctgtttttaacatagtcgaacaacgggtataaatccgatatttcgctgacgccgtccgatatctcgcagtattcgtcaaggtttatgcctgacacattagccgaagaccacaccgcaagctcactgtcgccgtgttctcctattatgaacgaatgaacatttctcgagtccactgaaagacggttgccgacaagatatttcagcctcgccgtgtcaagcaccgttccgcttcctatgaccttctttgaatcaaatcccgacagcttgagtgcggcgtatgtcaaaatatcgacagggtttgataccacaagaatgatgcagtcgcggttcacctcggttattcttccgattacttcgcggaatatcttcacgtttttcgagagcagatcaagccttgtttcgccttccttttggtttgctcccgccgctacaacgactatggatgcgttttcaagccccgaataatccgactgatatatctgcatctgcgacagaaacggcagacagtgcgacatatcgagtgcttctccgcgcgcctttgatttattcacgtcaacaagagccatttcgttgaacatttcagattccatgagagtgtatgcaatggtagagccgacaaaaccgcagccgacgactccgatttttttaatatccgacataatatcctccaataacaagttatcaagaatattttgtacggcggcatggaatattattcgctaaggcaaaaataaaacggatgtctctcatgttcagcagagaaacatccgttattagaacaattaaaaatcttacttaagaaggtcggaaacctttttttctttgtaaactgattcccagtcctttgtgaagtcgtcgattgcgtagtatgtaagaggatggtagataagcatatcaaagagctcggggttgatggttacggagtacgcgcctgtgagggaaaccttgtgaacctgctcaacattcttgaagcttgccgcaagaacctttgtgttcagattgtatgctctgaaaatgtcaacgatttcatgaacaacattgacgccgtcggaaacgatattgtcaagacggttgatatacggtgcaacgaagtcagctcccgcggatgcagccataagagcctggggctgagtgaagattgctgtcattgtaacgccgatacccttgtccttgcacatctttgtagccttaacgccttcacgtgtgatcggaattttgaggtagaagttaccgccgacaacttcctttatcatttcggcttctttaacgatgtcgtgagcctcggtagctgttgtctgaacgtggagcattttgtcgggaccgatgatttcacggatggagtagatgaggtttctgaaatcagccttttcgcgggaaacgattgtggggttggtggtaactccggcaacagggtagaactcacaaactctcttaatagcttcgagattagctgtgtcaatcaaaaataacatgatgcatttcttctttctgcaattttatttcatttcttacaacgtctaaagtatatcacttttctcacattttggcaatattctgtcttaacgtatttaaaagtgtacgcaaaagagttttggtatattttcgacaaattaagccatgtataattggattaattcacaaaatcaaaggcgtttaacatatttgcgatgttaaaacagcttgtgaaaagagttatttctgtgatattttcatgtagctatgcacattttcagcgattacgggaatcaaagccttgtcctcctccgatgcttccgccggaacaaaggtgagtcccgacacatcgcgtccggttattttctctatccacacaagggaagagagcagtcttccgagcggtattgacagatggaaaccgtcgcggttcaggctttttcctccgtgcgcatagtcaaattcggatacattttcacggaaatactggactgcgctgccgaccgggataacgtcaagaccaagttcacccgcaacttttccgtaagcttcgtgaagcatatcgaacattttcttctgcgacgagccgtaatccggaaaagcggaatgtgtgctgtcaatttcataagcccatgtttcgtgtatgtaaaccttagcgttcggctgagctttaacaacggctttgtacagctcgtctatataaggatggtaggtttcgtataatccgctgtagtggcttgcctgctgaagtgtgacaacgtcgtatttgtctccctcaagtacctctccgagcgacacagcctcttctcccgcgtgtccgttgtactccggagaatacgcgcgctcaccgctcagcagattgttgtagtgacgttcaagactgcatcctccgatgtaaaggttcaggcattccaaatcaagtccgagcgaaagagccgcgtcgtgaagataagcctgtgcgtcctgagaaaagctgtttcctattgataaaatcttcattgttatattatcctctcattattctgtcgactgtattataatgcaaattttcagccgtgtcaataaaacggataatatttcatcatagtcacgttttacaagtaaacaaatcgtaaataaatctaaaaaacgctttaattcgactttcaataatgatataatacagagtgattgtatttttattcttatgaggcaccagatgaaaagattctttaaaataggtatagcagttcttctcctcgccgcactcgcttcatgcgcgtctgacaaaaacggtgaagacacagaaacaaccgcaggcgaaaccacaaactccgccgaaaccacgcttgagacagtattcgactacgaaaacagcgacatttccggcatggtaactctcggcgactacaagggaattgacgttacaattgaatccgcgcttctcaccgaagaagaatttgagtcggctatagacaatatgctctccggctacgcgcattatgagaaaatcacggaccgcgcggttgaagaaggcgacaccgtcatatgcgattacagcggatatcttgacggcacacagttcagcggcggaacagacacggacgcgacaataacagtaagctcagactcaggctttatccccggatttgcggaagcgttcgtaggacaaatgcccggcgttgaattcagcttcaatgtaacattccccgaggactacggtcacgatgagctgaacggcaaggaagttacattcaaagccacagtaaaatacattaacggcgaacacgtcactcccgagcttaccgatgagttcgttaaagaaaacttcagcggatacacaaatgcagcggagtggaaaatagcttaccgcgaaactgtcgagctgcaaaagcaatactacgtgacaaaccagatgtattccgacctttggatgaagatcgtgtcaaacgcaacggtcaactcctatcccgaagccgaagtcacacgcgtttacaacgaaaagaaaacccagtacgaaagctacgctaaatattacggtacggactacgaaaccttcctcaaaaattatgtcggaatcacggacgatgatttgatggaggaaagccgcgactatgtcaaagaggatcttgtaatgtacactctcgcagatgagcttggcattaccataagcgacgaggaatacgccgagggtcttgacttctacgccggctactacggattctctaccgatgagcttcttaactactacggtaagaataccatctacgcaaccatactctggcagaaaatgat

SEQ ID NO: 2287 - DNA, 2108 bp, Unknown
  16S sequences of unknown bacteria
agttgtgctctaccccgacggaagcgtctccgtgcaggataacggctacggcgtgccctcacagatccaccaccaggtcggaaaacctactctcgaggtagtgttctccgtcctccacgcgggcggtaaattcggcggaagcggctataaaatctccggcggtcttcacggcgtgggcgcgtccgtcgtaaacgctctctcggagtggatggaaatagataactgctacgagggcaaaagatataccatgcgctttgaaagaggggaaatcgcccgtcctttcgcctgcgtgggtgacacggaccgccacggacttttcgtaagattcaagccggacggtgaaatcttcaccgataccacaaccttcgataccgataccctcctcacccgtctccgcgagcaggctttcctcaatgcaggcatcagaatagtgctgcgcgacgagagagtagaccttgacgcgaaaaaagaggataaagtcgaggacgaggacatccgccgcctgctcgaagccgcaaaaagagttcccggcgacgaggaagaacccgacgaggacgaaaacgaggtcaaggaaggcgtcgacaacgagattaagttcgagaacgacgcgagcgaaatcgacaaaagctgccgctatctcgaatacgacctcaaatacgacggcggtatccgtgaattcgtcgagcatctcaataaggctaagcacgtcgaggtaatccacccgaacgtcatctacatgaaggcgcagaagggggatatcaccgcagaggttgcaatgcagtataacgacagctacaccgaaaccatagtgactttcgcgaacaatatgtcaaccatcgacggcggtactcacgagacgggatttaaaaccgcaatcacaaaggtgctgaacgactacgcgagaaaaataggcgcgctcaaggacggggacaaaaacttctccggagaggacgcacgcgagggactttgcgccgttgtttcggtaaagctcccggacgcgcagtttgaaagccagaccaaggcaaagctcggcaactccgacgtaaagggcattgtcgagagcattgtaacagcgaagctcgccgaattctacgaggaaaatcccgcggtagccaaggcgatagtagataaatccctcgtcgcgcagaaggcaagagagaacgcgagaaaggcaagggagcaggcaagaaagtcggtgctgcaagtctcaaccctgcccggaaagctcgcggactgcaacgagaagagagtggatctcactgagctttacctcgtcgagggagacagtgcgggaggaagcgcgaagtcgtgccgaaacccgagattccaggcgatactcccgctccgaggaaaggtgctgaacgtagaaaagtcgcacgccgacagcgtatacaaaaacctctcgctcatcccgataatacaggcgctgggctgcggaatcggagaggactttgacatgaacaagctccgctacggcaagataatactgatggcggatgccgacgtcgacggttcgcacataagaatactgctgctcacgttcttcttccgccacatgaagccgcttatcgaggagggacacgtattcctcgcacagccgccgctctacaggatacacaagggcaaggtacagaagtacgcgttctccgaggaagagagagcgcggatagtagccgagatgggaacgacaggcgtagaagccgagcgatacaaaggtctcggtgaaatggacgcggatcagctgtgggacacgacgatggacccggagaagcggacgatactgcgtgtcgacatagaggacgcgataaaatgcgacgagatattctcgaccctcatgggagacaaggttgagccgaggcgcgagtttattgaggctaacgccaaatatgcggaaaatcttgacatctgaaaggatgaagtcctttctaccttagacaacttgagttttctaagagactttcattctgtaagtttcacttaggctttaagtgaagaagaaagaagaaagagctgcgctctttcgatttcattgtatgctcctacgcggagggcgcacagaggggttcaaacgccacccctctgcgagtaccggcttccggtggagtatg

SEQ ID NO: 2288 - DNA, 2993 bp, Unknown
  16S sequences of unknown bacteria
acaaccagacagatcacatcggccagaaagtctttgattcgccttcaaacaaaaaataatttctttagttttccacttgacaggttttgaccgactgtgaatagtaacctaattttgtttcatcatcagtttttccttgtttctttatttactggatacatcaaaactgacaatcattttttgattgccccgttgtttttttaccgtaccgctatatactgagctgcaactgcttatactttcctttgcttcgtattcgcatctgctctttgattcctttttggctgaacttcaggatctcatgaatccctgatttgatcttgtaaaaccataagctgttatccatgcgcaagcttttgcttctctctactatcttgatcaccagcagtttttttattcaccttgtctgccagcaaagcaatatgtccgagatgtatcatcaaacaaacacatctgtggtaaaataggacatggaaaaacctccttataattttatttttgttgcaaatttattttaacattttcaagaaggtttttcctctaaaaaatacgataaaaaggacgttttcagcactaagctggacgtccttttctcattgtggaaaaatttccccgaaactcaaaaggaaaacagcccgcatttgcgcaggctgcctgtgatgttcattcttctcccaatgtccggttgtcatctttcagcagatatttccggcagcagaacatcaggaccactgccagcgcgccgatcagattatccagagcgctgtcatggctgatgatgatctgccgggcaatggcgaacatgacgacttccacgagcgagcccggcgtcttcaagatcagcatccgcacgaactccacgccgaccaccagggagagcgcaaaattcagatagcgctccagaacaaaggtttccggagaaaatgcctggatctccctgatgatgaagatgatcatcgaaatcaccatggcgaagatcagcgctgccgcgatgacatattcaatgacagacggaatattcagaaacagctgcttcaggaatcctgagggcttgcgctcagcgttcaatggccgtgatcttggcgatccgcttctgatggcgctccccttcgctgaacggcgtggaaagccatacatgcacgatttccttcgccagctcgctgccgatgatgcgctgtcccatcgccagcatattgctgtcattatgttctctggtcagccgtgcgctcagcggatcgctgcacagtgcgcatcggatgcccttcaccttgttggccgtgatcgataccccgatgccggtgccgcacagcacgatgccgcgctctgcctcgcccttcgctaccgcctgcgcacaaggcagggcatgatccggataatcaacggaagccgtcgaatccgtgccgaagtcaagcacttcgtgcccttcctgttccagcatcgctttgatcatttccttgtattcataagcgccgtgatcgcatgcaatcgcaatcttcatgatttttcacctcatatctgtctttcactcttaacattactgtatcacactgttgttgtcaatgtctgcgctcattgatgagcggctttccttcatgaaaccgcctgagattttccacgacgatctctccgaactgcttccagcaggcatcgttagcaaatgttccggccgcatgcggggtgatgatcacctgctcatgatcccacagcggatcatccgccggcagcggctcttcctgcgtcacatcgaggatggcgccgccgatctgtccctcatccagcgcctgcaggatatcgcggtcattcaccagcgaccctctgccgacattgacgaacaccgcatcctgcttcatcagcgcgaactcgcggtgagtgaagaacccctgcgtctctgaattggccggcagacagaggatgacggcatccgcacatgggagcacttcgctgaggtgcttcagctcgatcatgcgctccacgcccggcagcgtgatctgcgcctgacgtctgacgccgatcacctgtgcgcccagcaagtgcagacggtaagccagcgagctgcccaggttgcccatgccgatgatgaccaccgtagacccgctgatcatgcgcacgcttccggccctctgccatacgtgccgctgctgctgccgcacatactgcggaaaatgctgatacatcgcgatcagctgcccgatgacatattcgctgatcatgtcgccgaaacagccggacgcgttgcacaggcggatcttctcctggttcagcttttccacatcgtactgctcatatccagcgctctccagctgcagcagctccagatgcggataatcggcaagcgtatccggatccgggttgccgatgatcacctgtgcatcatgcccctgtgtcaatacaaaatgctcatcgatccacctgagcgtctgttcgtccagtcttgacatacatctgactttcatactacatcgaaggcagccgcagccgccactgccttcttccaccctttcgtcaacttttctctttcttcttctcccatctgcggatgaaacagacggacatgctgggtcagcctgcggatctcatcctgatccttccagaatccgacggccaatcctgccaaggcggccgcgcccagcgctgtcgtctctgccacatccgggcagacgacctccacatcgagcagatcgctttgaaactgcatcaggaagccattgcggcttgctccgccatccgccttgagcgaatcgatgcggatgccgagatcctcctccatggcccgcaggacatccatgctctgataagcgagagattccagcgtggcacggatgatgtgttcctgtgtcgttcccctggtcagcccgaagatggcgccgcgcacatccggtttccaataaggtgcgcccagtccggtaaaggcaggcacgaggatgacgccgccgctgtccgcgacagaacgagcacgctcctcgctttccgcactggtgcggatcagccgcagg

SEQ ID NO: 2289 - DNA, 9925 bp, Unknown
  16S sequences of unknown bacteria
gagcacttgacttttaatcaagttgtccggggttcgaatccccgatgcctcattaaaaggaatccttgaatacaagggttccttttttctgcacaaagaaaatccccgaaaaccatagctttttcgacagaatgcgactgctttagactttttgtttgcaaaaaagataaaaatataaaaaaatttatttgttttgccaatgtacaagaaaagagtcagcttttataatagggaacaagaaatgagaacgataccacgtaagtctcttcccatttcctaattaaatagttatggatggtattgcccccccctaatcccccttaatgaataaaccctccctttttgattattcgataaacgcagtatcatcaataaaaaacttgttacagaagaaccagaggtcccccgcctctggttcttctgtatcttacggaactggttccttttatagcggctaagaatcatattcaatactttacataaattttacataaatatgcatttggactttacatataggtaataagatgttatcagttatagtagatgaagtctggagaggggtcagaaaaaatggcattgatttatattgtagaggatgatcagaacatacgagagatcgagagctttgcactgaagaacagtggttatcaggtgcaggggtttgagtgtgcgaaggatttttatcatcagctggcagagaagacgccagattgtattttactggatatcatgctgccggatgaagatggattggagatagtaagaaagcttcgcgccattccggatacgaagaaggtgccggttatgatggtgacagcgaagactacagagatcgacaaagtaaaaggattggatatcggcgcagatgattacattacgaaaccgtttggtgtaatggaattgatctcccgtgtgaaagcattgctccgccggagcatgaatactgaagaagaaaaattcctgtcagccggggatattttcctggatggtgagaagcatatggtctatgtgaatgatgaaccatgtgaactgacttttaaggagtatgaacttctgaaactgctgattcagaatcagggaattgttatgtccagggatgtgatcatggaacggatctggggcataaattttgaaggggagtccagaacattagatgtgcatattaagacgctcagacagaaactcaagagtgccggtgcattgatcaaaacagtccggaacgtggggtatattatagaatgaaacagaaaatccacagagaatttattctggtcgcattgacgactatattgctgacaacggtggtcgtgacagcagtattctatagttttttcaaaaaagaggtcatggaagaactgtccacctgcgcagaggttctgagcagcacaggtgtttttgaaggagcaaatgagacggatgcagaacagatcagtgccaggctgggactggaaccggtgagaatctcactcattaatgcagacggcaccgtgttgtatgatggaaacgtaaatattggtggtctggataaccatggaaaccggccagaagtgcagcaggcactgacggaaggtgtggggcagtctgtgcgaagatcagatactatgggacagagtgcgttctattatgcgcttcgtctggatgatgggatggtgctgcgcgtggcaaaggagacatccagtatctggagactgtttgccagtgctcttccggttgtaacggcagcagcgatactgatctttatattctgcttcgggctgtctgccagagcaacaaaaagtctgatgaaaccgattgaagaattatcgtatcacctggacgaatacgaggagattcctgtctataaggaaatgcttccctttgtgaaaacgattcagaagcagcacgaggacattatgaaaaatgcccgcatgcgacaagagtttacggcaaatgtgtcgcatgaactgaagactcctctgacatcgatctctggttatgcagagttgattgaacatcatatggcatccccggaggatgtaccgcggtttgcaggggagatccatcgcaatgctacgcggcttttaaacatgatcaatgatatcatcaagctgtcagagctggatgcaacggaaaacagcacacggcccatggacagagtgccgctttatgtcctggcggagaactgtgtggacatgcttcaacttcatgcagagaaacatcaggtgacgttggatatggaaggtgaaccgtgtaatatccttggaaataaagaaatgatcgaggagacgttgtataatctatgtgacaatgcaatccgatataataatccgggaggaacggttcatgtgacagtgcagccccaaggagataaagtcctcttgaaagtggctgatacagggatcggtattccgaaagaacaccagaagcggatttttgaacgtttttaccgggtggataagagtcgttccaaggcaacaggtggaacaggtctcggtctggcaatcgttaagcatattgtgacacagcatggtgctgaactgaatctggaaagtgagcctggaaaaggaacaaccataacgatcctctttgaaaatgcggagaaatctgttacaatgtagcagaacctgctggtgtctgttccgagggagcagcaggtgaaggctgcaaggaggaagaaatttatggaatatgtgcaccaggcacagtattatgagacggatcagatgggaatcatacatcattctaactatatccgctggatggaagaagcgcggatcgcatacatggatgagatggattttccctataaaaaagtggaagcagcaggaatcatcagtcctgtgctgttcgtgaattgtgaatataaatccatgacgcattttggggatcgagttgccattgaagtgaagctggcatccttcaagggtgtgaaatatgagatcgcttatacgatgagagatctggagagcagagaagttcgtgcggtggccatttccggtcattgctttctgaaaaaggacgggcgtcctgcaaatattaaaaaagaacttccattattatatgaaaccatgcagaaggaagtttccggaaaggcataagattatggaaggaaaaagacagtacctgttggatggactccgggggctgacgctgatcagcatgattctttatcatggtatgtttgatctgttggagatctatggggtacatgtgagctggttctggagattaccgggaattatatggcagcagagtatttgctggagctttattatcctgtcggggttctgttggaatttaagccggaatcctgtgaagaacggactggtggtgtcatcaggcggtctgttggtaagtgcggtgacttggatctttatgccggaggaacgaattacatttggaattctgacatttctgggaagtgccatgctcctgctggtgttgttgaagccgttgcttgaacacatcccatcggtactggggttccttggaaatgcagtgttgttctttcttgcaagagatgttaatgccgggtattggggaacggaggcatttcgcctgggagaagtccctaagagctggtatcagggatggatcagtacatttttaggtttcccaccggaagatttcttctcaggagattacttttctctggtgccgtggatgtttctgtatttgtccggatattttttatatgatatcgtaattgagaaaaagagctttcaaaagcttatggaagtgagaataaagccgctggaatggattgggaggcacagcttgctgatctatcttctgcatcagcctgttgtactgctggggctggaagcattctggtgcgtgaaagatatgttgtttaaaggatatgggatatagaattagataagaaaggttttggattatgtttattgcaaatgagtggaaagattatgaggtcatcgactgttctgcaggagagaagctggaacgctggggagattatctgctggttcgtccggatccgcaggtgatctgggatacaaagaaggagcacagaggctggaaaaagatgaacggtcattatcacagaagcgcaaaaggtggtggggagtgggagttctttgacctgcctcagcagtggagcattgattatgaacttccttctggaaagaagctcacattcaatctgaagccctttagctttaagcacacgggtctgttcccggaacaggcagctaactggtcctggttttctgagaagatcagaaatgcaggacggccgatcaaagtgctgaatctgttcgcttataccggcggcgcaacactggctgcagcagctgcaggagcttctgtgacacatgtggatgcatctaagggaatggtagcatgggcgaaagaaaatgcaagaagctcagggcttgaagatgcaccgatccgctggctggtggatgactgtcagaaattcgtagagcgcgagatccgccgtggaaatcattatgatgcgatcatcatggacccgccttcctatggaagaggacccaagggtgagatctggaagatcgaagatgcaattcatccgctggtgaagctgtgtgcacagctccttagtgatgatccgctgttcttcctgatcaattcttatacgacaggtcttcagccggcggtattatcttatttgcttggaacagagctgaaaagattcggtggacatgtggattcgcaggaagtcggtcttccggtgactgaaagcggactggtattgccctgcggtgcaagcggacgttgggaggcttaacatgggatatttaatagcagagacaacacgcgaggaacgggagaagatcgttgcagaatctcttggaaatatagaagcaaactgtgatggatgcatgtcaggacttgcagagatgtaccaggactatattgacggaaagaaagagctccgtgagatcaatatggaattcaatgccagatatataaaggaagatatccgtccggagcggagcggttgcttctatagataataagaagcggaagcgtatatgcaccacgagcagaagacaccttgcctgccgggagcaggggtatatagggacgttctaagtcatacgagccctatatccccctgatttcggcactgcaaagagtcatttttggtcatgtgcaatatatacaaaaacagcctgtaaacttcgtaaatattcatgaaaaaaattctatcataaatttcaaaaaagtcttgccaaatcgagatttttcctatatactaattcatgttgtgacattgatagcgatgaagcgtgaggttgccacgcatatgcgtgggttttccgtggagcgaatgtcaagttagcaaactggcgacaagtcactgtacaagtaaagaaatccttttaagataaagggaacgaagtgtgagatcctccgggacacacacgggaaagtgtacagtcaccgcttgtcgtactggtagtctaaagtacgaataaggaggcgactttttttatggcaagtcaagtaatgagaatcacaatgaaagcatatgatcatcagctgatcgatgcatccgcaaaaaaaatcatcgaaacggtgaagaaaactggatctaaggtaagcggaccggtgccgatgccgacgaagaaagaggtagttaccatccttcgcgcagtgcacaaatataaagattccagagagcagttcgagcagagaactcacaagagactgattgatatcatcgcaccgacgcagaagactgttgacgctctgtcacgtcttgagatgcctgctggtgtgtatgttgatattaaaatgaaaaacaaataattcctgcggctagaatgaacgcttcggcgttccgctgtagagagaacaggaggaaacaagaatgaagaaagctatcttagctacaaaagtcggaatgactcagatcttcaacgaagacggtgtgcttacaccggttaccgtacttcaggctggcccgtgtgtagtaacacaggttaagactgttgagaacgacggttacaacgctgttcaggttggattcgttgataccagagaaaaactggtgaacaaaccgcagaaaggccactttgacaaagcaggcgttgcttacaagaaatttgtcagagagctgaaattagagaatgctgcagagtatgctcttgcacaggagatcaaagctgacatcttcgctgctggcgataagatcgatgcaacagcagtttccaaaggaaaaggattccagggtgcaatcaagagacttggtcagcacagaggaccgatggctcacggttctaaattccatcgtcatcagggttccaacggtgcttgctccgatccgagtaaagtattcaaaggaaaaggaatgcctggacatatgggatccaaacagatcactatccagaatctggaagtagttcgtgttgatgcagagaacaacttactgttggtaaaaggtgcggtaccaggacccaagaaagccttagttaccatcaaagaaaccgttaaatccggtaaataaggtttgagggaaaggaggaacacataaatggcaaacgtatctgtttataatatggaaggcaaagaagtagacaagatcgagttaagcgatgcagtgtttggtgttgaagtaaacgagcatctggtacacatggcagtcgttgctcagcttgcaaataaaagacagggaactcagaaagcaaagacacgttctgaggtttctggcggcggaagaaaaccgtggagacagaaaggaaccggacatgctcgtcagggttcaacaagagctccgcagtggactggcggcggcgtagtattcgctccgactccgagagattacaccatccgtctgaacaagaaagaaaagagactggctctgaaatctgttctgaccaactgtgtaaatgaaaataaatttatcgttcttgacgagctgaagttcgacgagatcaaaactaagaagatgcaggcagttctggatgcactgaacgtatccaaggcactgatcgttctcaatgagaatgatgcaaatgtcgttaaatctgccagaaacattgctaatgttcagacggctctgaccaacaccatcaatgtgtatgacattctgaaatacaacactgttgttgttacgaaggcagctgtcgcaaccatcgaggaggtatatgcataatggctgatatcaaatactatgatgtaatcctcaaaccggtcatcaccgagaagagcatggctgctatgggagagaaaaaatatacattccttgtacatgtggacgcaaccaagtcccaggttaaggaagcagttgagaaaatgtttgcaggagcaaaagtaaaatctgtaaacaccatgaactgtgatggaaaaaataaaagacgtggcatggttaccggtaaaaccgctaaaaccaaaaaagctatcgttcagttgactgcagacagcaaagacatcgagatctttgagggactgtaagtaacagcttataaaaactatgtgcatacgagcacgacaatatcgtagacatcgaaaggagataaagtaatgggaatcaaaacataccgcccatatacaccttccagaagaaatatgtccggttacgatttcgcggagatcaccaagagcgctccggagaaatcactggttgtttctcttaagaagaacgctggacgtaatgctcagggtaaaatcactgtaagacaccgcggaggtggatccagaagaaaatatagagtcatcgacttcaagagaagaaaagatggaatcccggcaactgttgttggtatcgagtacgatccgaacagaactgctaacattgcactgatctgctacgcagatggtgagaaagcttacatccttgctccgcagggactgaaagttggaatggtaatcatgaatggaccggaggcagaggttcataccggtaactgcctgccgctggagaatattccggttggtactatggttcataacattgagttatatgcaggcaagggcggccagctggttcgttctgcaggcaacagcgcacagctgatggctaaagagggcaaatatgcaactctgagaatgccgtctggtgaaatgagaatggtaccgattaactgccgcgccactgttggtgttgtaggaaacggcgagcacaacctgatcaacattggtaaagcaggtcgtaaacgtcacatgggtatcagacctactgtccgtggttctgtaatgaatccgaacgatcatccgcatggtggtggagaaggaaagactggtatcggtcgtccgggtccgtgcacaccttggggtaaaccggcacttggtctgaagacaagaaagaagaacaagaagtccaacaagctgatcgttagaagaagagacggcagaacttttaaataaggaataggaggtttcactaatggctcgttcattaaaaaaaggaccatttgcagatgcaagcttactgaaaaaagtagatgcgatgaacgcaagcggaagcaaggctgtgatcaagacctggtctcgccgttccaccattttcccgcagatggtttcccatacaattgcagttcatgatggaagaaaacatgtgccggtatacgttaccgaggatatggtaggacacaaactcggagagttcgttccgaccagaacctacagaggacatggcaaagacgagaagaagtccagacgttagtcgctaaaatttggaaggaggtttcatctaatggcaaaaggatccagaagtcagattaaaagagaaagaaatgcccagaaggataccagaccgtcagctaagttatcttacgctcgcgtttctgtccagaaggcatgcttcgtattagatgccatcagaggtaaagatgtacagacagcactcggaatcgtaacctacaatccgagatacgcttctacattaatagagaaattattaaaatccgctatcgcgaatgcggagaacaacaacggaatgcacgctgacactctttatgttgcagaatgctatgcagataaaggaccgaccatgaagagaatcagaccgagagcacagggccgcgcttatcgtattgaaaaacgtatgagccatatcaccatcgtgctggatgagaagaaataaggaggaacatcatgggacagaaagttaatccgcacggcctcagagtcggcgtaattaaagactgggactccaagtggtatgctgaaggcgacttcgcagactgcctggtagaagattatcagatcagaaagttcctgaagaagaaactgtacagcgcaggagtttccaagattgaaattgagagaacctccgatcgcgttaagatcatcatctccactgctaaaccgggtatgatcatcggtaaaggtggatctgagattgagaaagtaagagcagagctccagaaaatgactaccaaaaaagtagttgtagatatcaaagagatcaaaaaagttgacagagaagcacagctggtagctgagaacatcgctcagcagctggagaaccgtatcacattccgtcgtgcaatgaaatcctgcatgggacgtgcaatgaagagcggtgcaaagggaatcaaagcttgctgttccggacgtctgggcggagctgatatggctcgtaccgagacctactccgagggtacgattccgcttcatacactgagagcagatattgactatggattcgctgaggcagacaccacctacggtaagatcggtgttaaggtttgggtctacaaaggcgaggttcttcccaagaaggcagcaaaggaagggagcgataaataatgttaatgccaaaaagagtaaagcgccgtaaacagttccgcggtactatgaccggtaaggcgctcagaggtaataagattacaaacggtgaatatggtatcgttgctcttgagccggcttggatcaaatccaaccagatcgaggcagcccgtgtagctatgacccgttacatcaaacgtggtggtaaagtttggatcaaaat

SEQ ID NO: 2290 - DNA, 11493 bp, Unknown
  16S sequences of unknown bacteria
gaatgccagcctgtcacgctggaggtcgacggttcgagcccgttccggatcgccattttttattaaaagttcagtgctatgcataatttttaaatatgcgtgcatataatatggtgggtatcgtcaagtggttaagacccagggttgtggctcctgtatacgtgggttcgaatcccactacccaccccataaaaaattaaaacagcagtaatgttggggtatcgccaagcggtaaggcaacggattctgattccgtcattcgcaggttcgaatcctgctaccctagccaatgaaaaatgccgagcttgtctcggcattatacggcgacatagccaagtggtaaggcagaggtctgcaaaacctttattccccggttcaaatccgggtgtcgcctccaaaaaaactaaacgatttggatgacatccgaatcgtttagttttttgcaggttttttggaaaaacaagcaagacaaaataaatttgctggccggaagcgaatatatatgcgagcttttatattcatatctattagtgatttaactgatgagaggaagaaaatcgagaatgaatattatgatatgtgatgatcaaaaagatgaacttgaaaatatgaagcaaatcgtcttagaatatgctgccgtacattcagaactttttctggaagtaaaatgtttttccaatccatttgatatgctggaagagatagggaaaagcggtgcgcctgatattgctcttcttgatatttgtatgcccggtgttttgggaacggagattgctcgggaaattaagagcaaaagcgaggacagcaccgatattatttttttaactacgagctctgattttgcagtggaagcgtttgctcttcatgcgaacgactatttgaaaaagccttatactaaagagcggctgctggatacgctcgatagggtagttgaaaaaagaaaaaatcgtctgtatgtcccaatttcttgcggaagagaagttcacctcatcgatttatatcaggttttttatatggaagcgagaaatcatactgtggagatacacttaaaatcgggtaattgtctcaaaacacacagtacgctcacggagcttaagaagctgtttttaaatgtcagcgggtttgtgacggttggtgcttcatacattgttaacttacgctgtgtaaagagtttcctgcaaacgacaatgataatggaaaacggcgatgccgtacctgttcccagaagactgcggggtgaacttaagaagcagtattttgatttttacaccaaggaggcaacgggaaaatgatacatatgattgcggctatggcattgattagcataactcatactgtttgttttgccacaatgattgagcgaaaatattctataaagaaaacggcaatcatttatgcattgttttgcctgagctttgtatttttgacaattgtaatatttctaatatttggttatagttcggcatatgtggttgccgctgcatttctaatgacaattattgtggcattctttgttttcgtttttacctcggcagacctgatgtgtaagaagctgttcctgtttgtcagtcaagcaaatatattcagtatttttcaatgcatagccattatcctgtgcggcacattttttcccaatctgcctgagaacagcgctacatacgtcaaaaacattatgagaacgcttctctatattccgatgatatggatatatattcgctgtttaaagccgacaataaggaaaataccggggacaaataaaaagtcctggtattctatctctttggtttccgcactgtttacagttggttttttaatgtttatgagcgtttgtcatgctggctatgaccatgtagaacaatacatttctctctttgtaatttttgtcgtcatctattgttcgacgttatggggcagttttgaaaccatccgctctatgatcaatgaaaataaaatggaattgctcagtctgaatatgaagtatctgcaagggcagcttaaaacggcaagagagaatgaattgtttgcaaaaactatacggcacgattttcgtcatcacaatttgaatatcgcgtcaatgctgaaaaaaggggaaatccgtgaagctttgctttatatagatcagtacaatgagagcctggatgctgtaaagccaaaagaattttgtccgaatgttaccgtaaacgctgttttaaatagtttttataccgaagcacggaatgccggaatttcagttctaattgatgcggatacgcaggaggagacggctatagctgatatggattttgtcgcgattctgtctaatctcttggaaaatgcattaaacggctgcaaggaatgcaattctggaggtgagataaaggtcaatattagatctgtcgcggataaaaccgttattgtgtgcagcaatccttgcaagccggatctggccgtagagaataatatgctcaaggatagaggaattggcattgacagtatggtcttggccgcaagaaaatatgacggcgacatccgttacagtttagaaaatgcagtcttgactgtttgtatcatattaaaatcataaaattaaaagtagtgtccaattacgtctgcaaatcgaccaattacaattaaaaccatccgcaaggatggttttttgctatacttttgtttaactattcgtaggtaaaagcagtgttttttagaaaaaagatatcatttgtaaaaaaatggaaaagatctgctgcaggctgaatatgctgctctttggaatgatgtaattgcaatataagatataagttggagtgaacattgcgaatagtattttaataagatttaataagaacaaataaagagaaggagaaacgcataatgaaaagaaggctgctttcaatttttatgacagtatgcatggccgtatcgctcatacctgctgcggtactgccggcgtgggcgcaaactacccaaaggtcagactggaccggcagtcaaactacaggtaacctgatacctattatgaatgagggagacacccttaccgctgtcggctggagaaatatcggagatcaaattaacctcagagcataccgtatagatgataacaactatacaaataaggtgggtatacaggcaagaaatagctctcatgacattggaaatcagaactatacgggtggtgtctactggcaaattgacttctcttccggtgacagaatgaagattgataagggcgatctgctgcttaatgcgggagcaaggtattggtaccaggcgtcagcagatcactacacttctcttcgttttgaattctttgacgaaaataattctttgctaaatgactctaataaggcaacaaatcacaattattgggtggcgcagcacgatacctggttagagctcaatgaaattcaaattcctgcaaacactgcgtatgtaaggatatggttttcaaactggggctcactggcaggaagaccgtttatcggtgattttaccgcgacactgaccgataaaacagctccggcatatgtagagaccacctctgtatctgaagcgggtacatatcatatcggcgagacaatccgcttgcgggtggcaatgaacgagcctgtcaccgtcacaaacggaggaacgcttgaaacaaacatcggtaatgcggtttatgcgggacagaatttgggtgattcgtcggatgtaggacagtatatttattatgatttaacaattacggattcacttgctgcagtaagcaataagtatgagataaagccagtgagcctttcgggtcttagtgttgctgatgacgccggaaacacggctttggtaaatacaaatcagaatttcagcgtatcagacatttatatggacaatcaatatccgtctgttacagcagtttcactgtatagagtaaacggaaacacgaacattccggagcaggtgattccggaggatatggttacttatgcggttacctttgacgaaaaggtgtcattttcaagcaaccctaccttttcttttgcggtgggagatgcaaacttttcctgtacagcagcggacggaactgtttctgctgatgggaaaacactttatttcgccgcaactcttaaaaactacggcaaaaacggagtgttgaggctgaatggtatatcagggcttacgctcattgatgaaaatggaaatgcaaccgtttatgagaacagcgctttagcggatacgggaattgcatataagtctgtctacggcgtttctgaggagctgaccaatctgaatttggcaagcggagctgaaaccgccagctatggcagtgcttggaacggccgcttgactgctgccgaaggctacaagctgccggcctcaattgttgtcaaggtgggggggaatgcgctcactggcggttatacttatagcgctgctaccggcgagattgagattgccgcagcttctgtgaaaaatgatatcgtgatttctgcttcaggaatgccgcaaacctataatgtggtgctgaatgctcagggcggatcgggcggtgcaaccgttgtcgcagtttacgatagcgagatgccggtgattgcagcgcctgataaaccgggttatttgttcggcggttattttgacgaaaggaatgggggcggaacaaaatattacaatgccgactgttcctctgcaagcatatatcgtaagacggaagggatcacactatatgctttatggacgccgattacgtatgacattcagctgtacagcaggggagaaaacgttggcacattaaacgatgttatctacggcgagctgcgcttaccttctgccgagagccttggaatatcttataccaatcacaattttgtcggttggaatatttatgacgagcaaaattgggcaatgtatacagcggacagagactattctgctggccttgtgacagagcagggaaagatagcatatatttatgcagcctggctggaaaaagataaatataccgtaacctatgacgctaacggcggtacgggagcgccttctgccgtggaagtccatgtagatgaaaccattgtgctgagcggcatcgtgccaagcagggaaaattatacctttgccggctggtcggaaaattccggcgcagctacagcgcagtatcagccaaatgacagctttactatgggaaattccctgataacgctttttgcagtatggaatagaaatccggagcttatctacaatgccaacggcggtatttttaatacttatgccgggacttcatatcctgcggccggatctgaggttacgcttacgagcgccataccgcaaaaggaaggatatatatttgttggctgggcagagagtgaaacggctgcggcatcggacatcatatccgcgccgtatataatgcctgatagcgatactgtgctctatgcggtctatgaaccgattaagtatgaggtcaatatatatgcggcggacggatattcagtttccggaataaacgaggatggttatataatcggcgaatatgccgaatttaccgtgagcggtacagctccgaaggtatatatcaacggtatcctcgcaactcctacagacggaatatacaaatttgagatacagaataacgcttctgttgtcgttgccgatgcttctttggtaaatgtgatatacaacgctaacggcggtgtgaatgcgcctgttgacgtgcgcgtttacgcaagaggagacacggcggttgtggcatcaggcgtccctgagaaaacaggatatacattcagcggctgggcaggcacagcggatttggagtatgcggaatataccgccggcagcagcataacggttgctgctgaagatattgttctttatgccgtatggacgccgataacctatacggtgaaatatgacgcggcaggcggcagcggcgatatgacggcaactgcggccgtttatgacgaggaatttacacttgcagaaagtacatttaccaaggcaggctgtcagtttgccggatggtcatacgcatcaggcggagagcttgcctatgtaaacgaagcaaaggttagcaatcttaccgatgtgaataacggtgaaataacgctttacgccgtctggaaaggcgcgcaaacaactgtgcgcttccattttgaaggcggctcatcaggtacttcctcctgtgaagctgcatacggcgaaattttgccgacagataggctgacggcgccgggcagatacggatatgtatttgcaggttattacactttagaagacaaaggcggagatttggtctacaatgcggatatgtctttgtcagaatactatcaagctaatctatgggacagcgttgcagctgaagttaatttatatgccgcctgggagcctgtaaactataccgtggcatttgtaaacggtactgaaaatctacaaggtaccatagatgctgtctatggacagagtttcttcttgccgcaggcggaggaacttggcatttcccttcctgctggttattctttcagaggctggtctattgcatcgggaagcgatatagtctattacagcgacgggcaggaaattacgacagggcttacgggcgagaatggaataacggtatatctttatgcagttattcaggaaaacgagagctatacggtaacccttccggcctctggagaaggatataaggtatactacaatgagagtgagttaacttcgcagacggatataagggttaatgagaatgaaaaggtgtccttcaatataagcgtggaggagggctacagtgctgacagaatgattgttctggcaaatggcgtgctgcttaccggaaacaaaatcggaagcacttacacttataccgtttttaacattgaagcaaatcagctcattactgtaacaggggttgaatttgacaagtacatcgtaacctatatggttgacgaacagatatatttaacggtacagacaggttataacgcattgcttacagaacctgtatccccggcaaaggcgggaagcacatttaaaggctggtctgacggcagtcatctgtggagcttttcagcagataaagttatagaagatacgacgctctatgcggtttgggataacgatacatttaaagtgacaccggcggcaagcggaagcggttacacagtaacttctgatgacgatcagatggtagcatttggaggcagctatacctttatagtgactgtttctgatcactataatgccgacgcgatgaaagtttatgccaacggagtattgcttgtccctgatgtacacggaaatgtttatacatttacagttgagaatataaccgcggatgttgcgattactgtaagagatgtagcagagggtgtttacaccgttaaatatattgtggacggcgaaatctattacagtgagaatgtggtttacgccggacaagcgcaaagaccgagaacgcctgtaaaggccgggtatatctttgacggatggtttgccggagatgagaagtgggattttgacactggaatagaggacgatttagagcttgaagcaaaattcacccggcttgtatatcgggtaacggtgcccgatgctcaaagcgaatttaccgtaaatgctgtatctgctaatccggtagaatacggcggcagctttgcctttgatattatcgtggcagatggttataatacagcggatatgatggtttacgcaaacggcattcttcttgaaaaactttccgaaaatgaaaatacggtatcatttgagctgacaaatataacagagccgcaggctataaccgtaaggggaatcggacagaatacttatgccgttacttacagagcaaatacaacagagtatgtaggcaatatgcctgacaatgcaataaaagcttacggcagtgatatagccatatctgatttgctgcccgaaagatatggatatcgcttcctcggctggtcaactacagcaaatgctggagtcgaatacacggctttagatatttattctgaaaatagtgatcttacactttatgctgtttgggaggcgatgacctttgctgtttcttttgaaaccggcggaggaagcatagaaagcggtgaggtaactgaatacacatacggaacgggagctgtactgccgactgaggtgataaaggaaggctatgattttgcaggctggtatgaagatgagcttttgcagggcgtaagagtatatgagattaaagagactgattacggcaacaagaagtattatgccgcatactcaatggctgatgtggtgataaatggttatacaggtgaatacgacggcaaagagcataatattacttatacgctcgctgataatgtttccgttgcagattatcagtggtattttgttccggatggcgcgagcgaggcgatcgcggtttcgtcagactactatcatatttatgcggtaaaggatgcagatgaaagcggcgaatattactgctgtattgagactgtttccggtagttatgtaatacgcatgtttacagagaaagcaaaagttgcaatcactaagaagcctatttccgtaaaagctgccgacagcggcaaggtttatgacgcgcagcctcttgcggtaaatgaaattgagctgacagatggaagcagtttggctgataatcatataatatcggctgttatgacggaagaaagtacattgaccaatgttggcaacaagactaacgaaatagaacgaattacaattttagatagtgaaaatagagatgtgacggcgagctacgaaatcacaaagcaaagcggtacgctcagcgttacgccgcgtgctcttatcgtttctgctgaaaatgtgagaattgcggcaggctcggcgctgaatgaaaatcacttgtataaaataagcggtgtgttgggaaatgaaaatctttctctggcaaatacttcggcttcagcgaaaaatgcagacggtgaagatgtttctattgcggacattgcagataataccggtaaatacaccgttacaattgtctatagtggatttgacggcgaaggtagcgagaattaccaaggcagcggtacaatcacatctacagttactgtttataaaagcactggaggaagtactggcggcggaggtggcagcagcggcggtagcggcggtgtatcaacaacctacacggttgagtttgatacaaatggcggcagcagcgttgcaagccaaagcgtaaatgcgaatgcagcggctacggaaccaaaggctccggaaaaagaagggtatgcctttgacggctggtacattgacaatcgcttaaccgaaagatttgattttgccacgaggattacaaagagcattactctttatgctaagtggacagcgtctaaaacgggagaagaacagaattctgaaaatctgcctgctgcagacccgacggaaacaggcgttgctgatctgctggaaacagaaaggcatattcagtatctgaatggatatgacaacggcacctttaggccgaaaaacagcatgacaagagcagaggcggcgcagatgttctataacctgctgcttaacaaggaggcagcgggcgtgagcgcatttgatgatgtaagccggaatgcttggtattacgatgctgttagcactcttgccaatatgggtattataaagggcaagggaaacgatatattcgatcctaagggaaagatcacaagagcagaatttactgccattgcaatgcggtttagcaatattgatgcaaatgggtctaaaacctttaccgatgtttctgaaaagcactgggcggcaaagaatattgcggatgccgcagctctcggatggatttcaggaaacggagacggtactttcagccctaacgctttcattacccgtgcttccgcagcaaagattgtaaataatatgctgggaagaaaagcagatatggaatatgtaaacgcccatgcagacagcattaagcttttcaaggatgtttcgtcttcagcttggtactacgcagatgttgtcgaagcaacaaacgctcacgaatacgaaaaagcaggaagcatcgaaagctggaaacaaaattgaaacagaaatgcttggccaagtaaaaaaagcataattcaggccccatctgagaaattggacggggcttgtttaattgcggtgtttttatttttgcattactgcaaataatcggcaattttacatattgagtatagaagctccacggaaaaatttattttagaaacggctaaattacaatttagtttaatttgattagaaattacagaatttaattcaatttgcttgaaatatattcacaaacatgatatagtatatacgaaaagagttgccagataagcggcggacggtttactcccgcaagggaggtgatgcgtatgagtgcaagtgaaataatggcttttacagctttaattgttgacattgtattggctacatacatcatcacaaaaaagaaataaaccgcccaagcgaccaaacttagcggtttatcagaagtaatttatttaggagcatccgttggccggcaactcttttacttgtattatatatgcatttttgcgaattagcaagtgctttatatattggaataagtaaaccggataccgatatattgtgattgattacggcagtattttgcacagttttgtgtatacttttgccgtttgtgaagcggatttatttttgttttaaaaaacgataatttgtgacggttttttgtttttgagaacaaaaaactttacgcagtaaaaaaattatgatatcataaatattaaattgataaaagctgcaaacaaaatttttgcgtaagcacaaaataaaaatataaagcagttagaaaggttaaaaagggtgctgaaaaatggatatggtaaaatacatgaatgcgaatgttacgggtatcaaggctagcgaaatcctcgaattttccgggcttgcagcgaatacaccgggctgtatagggctgacaatcggagagccggactttacgacaccggagagcataaaggaaaaggcggcggaggcgctcgctgaaaataaaacgcactatgccgacggcaatggtctgccggagcttagagctgcaattgccgagtttgaaaaaaagcagaacggtctcagctacagtccggatgaaattattgtaacggctggtgcaacagaagctatttatgctgctatgacggctattcttgaaccaggcgacgaagttattctaccgcttccggattttagcttttatgatcaggtagtcgaaattatgggcgcaaagtgtgtatatattgatacttccaagacaaattttcagatttcaaaggaagacctggcggcggcggtgacggagaagacaaaggcgatcgttataaacacgccgaacaatccgacaggtgttgtatatacgagagaaaccgtgcagggaatacatgatgtgctggcgggcaaaccgattttcataatttgtgacgaggtttacaatcagctcgtctacgcggatgagtgcgtatcgctggcatcgtacgaagacttgaggcagcagaccct

SEQ ID NO: 2291 - DNA, 2113 bp, Unknown
  16S sequences of unknown bacteria
ggccggcgtcggctgataaccgaccgcgccgggcatgcggcccagcagcgcgctgacctcgctgcccgcctgggtgaaccggaagatgttgtcgatgaacaacagcacatcctgatgatcgtgatcccggaaatgctctgccatcgtcacgccggagaagctgacccggaagcgggcgccggggctctcgttcatctgcccgaacaccagcaccgtatcgccgagcacgccgctgttctccatctcccgcaccatatcacacccctctctggtccgctcgcctacgccgacgacgaccgaacggccgccatgacgcatcgcgatgttgtggatcagctcctggatcagcacgctcttgcccacgccggctccgccgaacagcccgatcttaccgccgcggacatacggacagagcaggtcgatgaccttgatgccggtctccaggatctgcgcgcttggatccaactggacaaacgctggcggatcccggtagatgggcaatgtcggcgcatcatcgagcgcgcctttgccatctatcggctcgcccagcacattgaacacccggcccagcacctgctcgccgacgggcacatggatcatgcggccgtcgctggtggccttcgccccgcgcttcacgccctcgctcgcgcccagcgcgatgcagcgcacccgttcgctgtcgggatgggaaagcacttccgcacacagccggcgcccatccgcctgcaccaacaccacgctgaacaaaggcggcagttcgccttccgcaaagcgcacgtcgatgatcggtccgacgacccggaccactgttccgatcatttcactcatcgtccatctctcctgtcactgccaattctgtgatctcccgggtgatcagcgcctgccgctcccggtgatactgacgctgcagcgtctccaacagacgcttcgcattttccccggcctcctccatcgccatggcgcgcatggcctgctcgctgagcttcgcttccagcgcataacgcctgagcgcagcggccagatgatcctctgccgccatgcgccacatcgcttccggctcctgcagcacgcgcggatcagccatgggcagcggccagatcttcaccatcttcacttctgcgctgagcgcattgatcctggcggtgtacagcacgtgcaccgctgtgtcggccggttcgatccgcgcggcgagcgcagacagctgcgccgttgatcctgcgatcacctcggcatccggcatccgccagctctgcgcctttcgcccgatgatgacgcatggcccgctcaccttgctcagcgccgccttgcgcagcataggaagatatgcgccgcaaagccccatgtccgaggcgaagatcaccgtcagccgccgttggggcataaggggcggctgcagccgcgccgtcatcgcttccagcgcctgcgcatatggcaggaacgcatctagctggcgctgacggctggaagcggtcatccgcagggcatccgtgatcttctggctctctctgcctaaggccatgcggcggcgcagctcactctggctcatcgcatccggtgaacgcgtccagcgcgcgttccatcctttcttcatccagccggccgctttcctcgatcgcctgcatcagctcttcgtgctcgccatgcatgaaggctaacagccgctcacggacaaaggagagcttcgtgcgggccgtctcatcaaacatatgccgcttggccgcctgcaaaaggacgcattgttccgccagcgtcagcggcgcaaaccgctgctggacgagcagctgcgtcagcgtctccccagggcggatgagcttgcggctcacctcgtccagatcgctgccgaagcgggcaaatgcgcgcagctcctgaaactgccggctgccgcctgccgcatcgccttgctctgcgccgcgccaccgaccctggacacgctcagaccgacatcgatggccggacggatgccagcatggaacagatccggctgcaggaagatctgcccatccgtgatggagatgacgttggtgggaatatatgccgagatatcgttgccctgggtctcgacgatcggcagcgcggtcatggatccgcctccccgctcatcgctcagcctgcc

SEQ ID NO: 2292 - DNA, 1641 bp, Unknown
  16S sequences of unknown bacteria
atcggcgcgaaggcgttcgagcagtgcgcgggattcctgcgcgtttccggctccgacgagatacttgacaatacgggagttcacccggagagctacgcggcggcgaagaagctgctctcatcgttcggctacaccgccgacgacgtgcggcacggcaggctcgcggagctcaggaagaagtgcgagaaagctggcataaaaactctctgcgccgagataggcgtcggagagccgaccctgcgcgacatgataggcgagcttgagaagccgggaagagacgtgcgcgacagcctgccgcagacggttctccgcgacgacattctcgagatgagcgacctgaagccggggatgattctgactggaaccgtgcgcaatgtcatagatttcggagcgttcgtcgacatcggcgttcatcaggacggactcgtccacatctccgagatcgccgacaggtatataaagcatccgagcgaggttctcgcggtcggcgacgtcgttcaggtgatggtgaagtctgtcgacacggcgaagaagcgcatctctctgactatgaagatcaaaaaataaaagtgcgtccgggcggctctcatgccgtccggattcttaccggaggcgataacaggttttgaaaagacatgacgacaacagccgcccgcgtgtgccgaagaagctgtcggcgctgataacgtcgatagtgtgcgtcgcggcggcgctcttctacatagtgacaggcgggaatctcggggatttcctcgagaagaacggtattgacataaacgatctatggaagaacaccgcgacggttacggacggcgagctcgaggtacacgtaatagatatcggacagggcgacagcatccttgtcagatggaacggcggaaatatgctgattgacgcgggaccgaactctggcgaggacgctctgagggcgcaccttgacgcctgcggggtgaaaaagctcgactatcttgtctgcactcacccgcacgaggatcacatcggcggtgccgacatggtcgtgaagaactatgagatcgggaagattctcatgccggtgacgagcgtttccacggcgaccgtgaaccggctgctcgacgcaatcgaggaaaaggacgtatccgtagaggctccggcgccgggcgacgtctacactctcggcgacgtctcattcgaaatacttggtccggacccgtctgtcgaggacgacgcgaacaactcgagcatagtcctgcgcctgcgcttcggcgatacatatttcatgttcacaggcgacgcggagaaggagtcggaggcgaagatactcgagagctttcccgagagcgacctgaagagcgattttctgaaggtaggtcaccacggctcaagcacttcgacgagcgaggcgttcctcgccgccgtctcgcccgaatacgccgcgatatcctgtgagaagggaaacagctacggacacccgcaccgcgagacgatagccgtactgaaaaagtacggcataaccggggacagactgcttcgtaccgacatatccggaacgatagtggtcgtttccgacggtcagacgctgtcagtcggctcaagcggaaactaaaaagtctgaaaataaattttcagaccaaacagttttgaggctttcacgacattggg

SEQ ID NO: 2293 - DNA, 2689 bp, Unknown
  16S sequences of unknown bacteria
cgagtgggcggccctccgccgtttcatccaccgcctcgccgcctccgatccaggacgctgaactctggtcccccggaaaggaaaatcacggggcgccgtctcatccgttcggatactgcaaaccccatggggattcgggggaggaaaggctccttccgatgaaggaaagacgccggcccctgcggggaatactgaagctcgtgcagcggcacatcggggataccgaaggcgtccatccgggtggatatcccctgcatttataggacggtggcggcctcctgtcccgggagagagccgccaccgcccgtctgctgaatctctgccatagtttttggaaaagacggtgatttttatccgacgcggcgggccgctgacaggacggtatgccgcagcagcaccgaggtggtgaccgccccgagggaaaggctgcttttggtcatacggctgacgatgtcctgtacatcggccacgtccacatccccgcacagggtcccggtttcatccgtgctgaccccgacatccacgagaaccgtccggtctgtgacatggccgcggccgatcagatgggccttgccggtcgcggaaaccagcagatcggcccggcggcagatgtccgcgagatcccgggtcctcgaatggcacatggtcacggtggcgttccgggccaggaggagcagggaaaggggcttgcccacgactgggctgcgaccgaccacggcggcgtttatgcccgaaagctccactccggtgtgctccagaatctcgatgacggcctgagccgtacagggagggagagcgcggcggtctccggcatagagatacgccatattggtgtatccaaacccgtcgacgtccttggcgggatggatttcccgcttgatggtttccgcctcgatatggcgggggaggggctgcagcaggagcaggccgtccacctcgtcgttgccgtttgccttccggaacgcggccaaatattcatcggaggtcacatcctccggaaaacggtgaagctcggcttccaccccgagcagcccgcatttccggatgaccgcagaggcgtaggcgctttcgtccgcgttgtccccgatctggaacagggcgaggcgcacctgcacatccgaggctgccagagcctcgattttttgcgcggtatcggtatcgatcttggcagagacctctttgcagttgaagaagtcgctcatattcgcattctccttttatggacgaggggcgtcagcccagcttgtcctccacttttttcatcataccgccggacagggtatccgcttcccggcgcaggcggtcgcgctgttcgaaaagcggggccgcacgatccggatcccggatcatccctgcgttgatcgcgacgttgtattccgcacccttgacacaggtgtggcacaaagagaccgcaatgccgatgtcgctgatgagaagcttcgggcagatatctgccagccggtcgagcaggcgcagcgcggcgcagccggtttccatgatgtcgagaggggtttgtgccgcctgctcgagcagcgcttccatgcgggatgccttgtcccgtttttcctcgtcggtctggggcctgaccttgtacatggcctgcagcggctcgaaggaacgggcgtcttcttcaaacaggccgatcagacggttttccaatgagctgagctgatccagcagggaggcatattccgtctgcagagccggctccgctttgcgttcctgcagatggcagaccatccgggcgagcgcggtgccgagtgaccccgccagcgcggaaacgccccctccgccgtaggcgttgtccggagaggcgattttgccgagtatggtgtccatggtgtcgttcatgcggtttcctccatcgttcagaatggccggtacggcgggagacagccgtccggcgtactgccgctattatagcatggctgacggcggaatacaataaaaacggccgggttgggcacggctggggattgttctggttcgtataaggagacctcttttgggcgttttcccttcgggaaaacctgttgcgaagccttccttaatttttcaccagtacgaccggcggttccaaaacgctaacacaagacgaaaggatacaaaaaagatgccccatccgcttttgcggcaagattcgaacccgcgccgcaggcgcgcaaaccgcaaaaagctgatggtgaacagcaaaacgctgtgaggacgtttacaaccgagcaggtgagccgatagctttttgcgaaaagtcgtcgcgaacgatacatagcccgcagcgacgcggctcccctgccaagctcgaaccaacgacccaccggtcagaaacagagttgtttcttcctgctcaggcaccgcctgcatctgccgctggcagcggcggtgcctgagccagttaacagccgcgatgcgtctgccgaaacacagggtctccgccccgatcccaatagcagaaaaaagacgagacacggcaaaaaaaccgtgtctcgtctttttggctccccctgttggactcgaaccaacgaccctgcggttaacagccgcatgctctaccaactgagctaaggaggaatgtgttgtgggggtttaccccacagaggtcggcgcctacctattttcccaggccgcttccagccaagtatcgtgggcgcaaatgggcttaactgccgtgttcgggatgggaacgggtgta

SEQ ID NO: 2294 - DNA, 6004 bp, Unknown
  16S sequences of unknown bacteria
taatatttagttttatcataagtagatagaattaaaataaattgattaggaaaaaatataatgatataatacagtgtgttagatacatatttatttttatttatatataaaaatacaaatttaatatgaaatatataattgtatttaaaatattttgatttgtgttatattaaattaaacatgaggatcaaagtggattagaatggattctatttccagcaaaaatggaggtcatgatgaagaaaaagatttgtttatttctcgtattggttctgacagtctgcatgtttgcaggctgtgcccaggaaggcggcaaggacgcttcttcttctgcggagcaggtatccgccgaaaaaaagacggtagaactgaccgatcagaatggacgcattgtgacggtggagtatcctgtggaacggatcgcatgtatgcagcatcattctctcgatattctgacacagctgggagcacaggagcagatcgtttgtacggaagataaatggatgaccgatctgggaagctacatgaaagacgtttttccgggaatcgaggaactccctaccgcgggtactctgagcgatccgaacgtagaggcgatcgcggcgctggatcccgatctcgtcattttagcggctcagtgcaatgaagatgcggtcgctcagtttgaaaaattaggaatcccggcgatcgtcgtaagtctgagaggagaaggcaagcaggcggaagcgcagaatccgaatctcagcgacgcggacgcagcttatacggaaggactccagtgggcggtagagacgcttggcatgctttccggcagagaggacaaagcggatgaactctggaagttcgctatggaatccagatcttatgtcgaagagcagctgagcgatatttcggaagacgagcgcgtcagagtctttatcgccaatgaaaataatcagacttacggggacgacaaatacgtaggctgtatgctgctcagagcagggggcgtcaatgtggcggccgaggatatttccggctataaggagtacagtatcgaacagctttacaactgggatccggagatcattatcgtacaggaccgttatcctcaggtctatgaagagatcactacagatgaaaaatataaggaactgtccgccgtgaaaaatggaaaagtgatcctggcgccttactggaccaagccgttcggaaatccggacagcgactcggtcgctctgggtgaactctggatggcgcatcagttctatccggacaagatcagtgcggattatgtggaaaagagagcgcaggagttctataagaatttttatggaacagattttatggaaagcgttgaataaatcgtatgagcaggaatttttgcagacgttttctgtttatcgcagttctgtttctgctgccgctgatttttatcctcgtctctatgatgatgggttcttatcatacgacgccgggagagatcttccggatcattctcggtaagatgacaggagagacggcgggcgtcgatgaaaagacagtcaatctgttctggactatccggtttccccgggtaatggcggcctgcctggcaggcgcagggctctcactctccggagccgtatttcagtcgatgtttaaaaatcctctggcgtcaccttatacgctgggcgtatccaacggagcgggattcggcgctgctctgggcattgtcctgtctctgggtacgataggcgtacagggaatgtcggcgtgtttcggcctggtatctatcggagttacgtttcttctagcttcgagaagcaagagcggatcgacgacacttattttagcggggatgctggtcagcgcacttttttcttctctggtggctctgctgaagtttatggcggatccctttgaaaagcttcctcagatcgttttctggctcatgggcagtttcagcggcagcagccaggaaaaggtgctgtatatccttccggtatatatcgcagcatttgtgctgatctggctgtatcgctggaagatcaatgtcatgagtatgggagatcaggaagcggcttcctatggcgtcaatgtcaagctggaccgtatcgtcgtcattttgtccgccagcgtgctcacttctatggtggtgagcatctccgggattatcagctgggtgggaatcgtcgtgccacatctggccaggatgatcgtaggaccggatttcagaaagatctgccccgtcagcgtgtcgctgggaatctgttatctcctgatgatcgacggtttctgccgcacggtgagtaccgcagaaatcccgatcggtgtcgtgacgggcatcatcggcgctccgctgtttatgtactttatcatgaaaaaaaaggtggattggtgatgagattagaagtaaaggatatctcttttcagtacagcgaagacaggacgattttcaaagatctgacgttttcctatgagacgcctggaatcatgtgcatactgggatctaacggcacaggaaagagcacgctgctcaaatgtctcctcaatcagaaccgcattcagaaaggcagtatccggatcgacggaaaagaggcggctcgttaccggccgagagaactggcccgcaagatcgcctatctgccgcagactcacatgccgtctttttccttttcggtgatcgatgtggtgatgatggggcgcaccgctcatgtcggatatttcgccagcccgggaaaggaagatcggaaaatagctgaggagaatctgaattaccttcatatcggtcatctggccgaaaaaccgtataccgcgctttcgggcggcgaacggcagatggtgatgatcgcttcggcgatggcgcaggaaccggaactgatcattctggacgaacctacttctcatctggatttcggaaatcagtttcgatttattcaattagtggaaaaacttcaggctctcggcatcggtgttctgatgacgacccactttcccgatcacgcactctatctcggctgtgataccgtaatcttggacaaaggtgaaattgtcgcgtccggaaatgccaaggatgtgattaacgatgaaaatatgtcgaggatctatcgtatagatgctcatatcgtcgaaattgacggcagggaaatctgtgttccattttaagaatgtattgaccggataaaaacatcccctccgcggatctttgccgcggaggggatgttttgtttttttattgttcttttttagaactcaccagattaaatgcgacggtaccggcgagaatcgcggcgatgccgatgaaatgataccagtaaaacggctcgctgagaaatatggtgcccgccaggacgcttacgatggtagccacattgttgaaaagccctacgtgcaccgccggaagcgccttcagcgcataggcggagagaagagaggtgatcagggaggaaagcactcccaggaaaaagatcgacagcaggaaggtggcgtcggtaaaaggtcgaaagaattctgtcagcgtacctgccgccgcatgtctccctgctgccaccgcattgaaaaagagaaatcccataatgctcatggcacaggcgatggtaaatggggtgtaatcggcagaaagtctgcgtaccagcacattatacagcgccagggagacggcggagacgatgatcagcccaaaaccgataaagctgtacccggagagctgaaatccgttcatcagattgatgaagatgacgccgccgatagacagcagcataaagaccgcctgtattttctgtatcctttcctttagaagaagccccgcgatgatcagtgtgaaaatagggacgacagcgtagataatcccggcctccgaagaggaaatctgcgtcatgcccagagtctggaagagaaaaaagatgatgggatatatgatgccgtaaggcagaatcctcagaaaatcccgaagatggatcgtcaggctgctgcggcgaaacaaagtgaaaatcagtacggagagcgccgccagtgtaaaccggtgagccagaagatccatagtgtccgcacttcgcagcgcgattttcagcgcaagaaaggaaaagccggtgatcagtgattgaagtgtgatagccgtataggcttttgcggtaatgttcataaaatccctcctgtcattttctattttattacatttcagtaaaaggaggataaaatatttatccatcatgaggaaaattttgttttgattaaaaaattttttcgaaggtgtccctttttttaacagcagatcgttttataaagataaggaaaaacaaaaaattgtctatactgaaattatactgaatgatagaataacaacgaaaaagtttcagagaaatgaaacagaccgcggcaaaaagatatcttatatataactcgataatattcacacagaaatagtttataacaaacagtacggagtgattcatgccgctgctgaaagtaccggaagttttgctcgatttaaaggatttgttcaaccggatgaagacaatgaaacgatcgatagtcacgagaaagtcagaggaaaagagaaaagcagaggacatcgatatcagagactttctgtatcaataccgcggctttgtatatgcgaatgccattaagatactgaaagacacagatcaggcggaagactgtgtgcagattgcttttgaaagagttctgcgcaatatcgaaaaaatccttgggctgaacgaggcgcagatctgcagctacctctacaagacagtccgctcctgcgccgttgatatcctccgcaaagagagacggtgcgtaccgatggagcgcgaggatctggaaatcatcataaacagacagcgtacagatgaaattctcggcggctgcgactggagcgaccgttttgaagagatatttttgaaattgagaggtgatgaggtctctatgctgatcagcaggtatcaggatcatatgacgtatgcacagatcgctgaggaactggggctgagtgaagatgcgtgcaagaaacggggacagcggctgaaacggaaaatagcgaatcttttgtcgcaggaaaaagggggaacctcggatgaatgaaaacagagatcatagagatgacggattctcagaagaaatgacagagttttcgaaccgttcagagaacagcgctgatacagaggaaacggccgagatgcgggatgtgagacgactgagatggaacagtgagcgtgcggatgcgtctctcagagtatttgcggaatactgcagtgaaagactgcgttcagagtgtgacgagcttcgccaaggcagctgtaatactgcgataccggaaactctgaccgagcgattggacgagatggcagaacgatttgagtcggaaaagaaaaaagaaatgcgccgcaggaagacaaaatcgctgtcaaaagtctgcgcttctatcctgctggtctttgcagccgcagccgtgacaatcgatgcggacgctctgcgggtaaagttctatgagtttttttctcagcaggaagaaaagggcatgtatatctcatttaaagaggctgatcccgatgattcgccgggcggggattcagacgactctgaaagcaggatccccatcgccgtcgagctgccggaagagctccatacgattctctatcccgctgacatgaaagagggataccggctgtccgaagtggatatcgtcggagatcatataatgtttaccttttgggatgaagggaaggagacgtatattctgtttgagtatatgaatctcgatgcagcgatgcaggtggatacggagtattcggacaactcaaagacgaaagtaaacggtcaggaagctctcctgcagaagacggaatccggtgaactggtgctctactggccgaaagatgactatctgctgatgctggacggaggcagatcgctttgcacgaaaaaagaattggttcagatggcggaaagtgtacaatggtacgaccggaaggtctttgtgcaagattgaggaaaagaagccagggagccgatgacgagaagtaagaaacaatagaagattaat

SEQ ID NO: 2295 - DNA, 6962 bp, Unknown
  16S sequences of unknown bacteria
ccttgtcgcgggcgtaggttcccttgaggtagccgtagctttcttcgaagccgaagatgtaggtgtcgtggccggtggtttcgtacttcttgatgacctcgccgatgaacttgaagccggtgaggacgttgaagagacggatattgtggcggcggcagatttcggtcacgatttcggtcgtgactattgttttgacggcgtatggattttcgggcattccggtggtttcgtaggctttgatgatgtagtcgaggaggagcgcgcctacccggttgccggtcaggcagacgaatttgccggtcttgtcgcgggacatgatgcccattctgtcggcgtcgggatcggtcgcgattatgaggtcgcttccgattttttctgcgagctttatgccgagttcgaataccgccgggtattcggggttcgggaaggagacggtcgggaagttgccgtccgggatcatctgctcctcaaccgggtagatgttcttcagtccgactctcttcaggacttccggaacgagaactctgccggtgccgtggagaggtgtgtagacgatcttcaggtcgtccgccaccttcgcgatgacgtcggggttgacggcttcggcgatgactttcgagaggtaggtctcgatgaggtcgtttccgatataggtgatgagcccggactttatgccctcgtcaaggggtatcatcttcacgtcgtcgaagatatccgcggcggctatgaactcggagacggtcttcgcgtggtccggcgggagctgcgcgccgtcgtcccagtacgccttgtagccgttgtactgggccgggttgtggctcgccgtgatgttgatgccaccggcgcagccaaggtgacgcacggcaaagctcagggcgggcgtcggctcgatctcggggtacacgtacgccttgatgccgttggcagccaagacgctcgcgcacgttttcacgaacgcctctcccccgttgcggctgtcacgtgcgatggcaacagacggttcggaaaaatgcgcgttgaggtagttggcgaagccctgggtggctttcccgaccgtatagacgttcatccggttgggacctgccccgaggatgccgcgcaggcctgcagtgccaaaggaaagctcgcggtagaaggcgtcttggagcgattgcggggactgccgcagctcgtcgagctcagccctcatagaatcgtcgacattgcggtgccatttctcgaactgtgcgtctatctcgctcacgattgctccttggtctgtgcgaaccgatgatggtacgtgctgttaaagctctttctcgatttcgaattttaccgaaatggaatctttgcccacgcggattttggggtggtccttcaggtccagatagtacttctccgcgaggtcgcggaaactcgactccagcgaccgcgagaactggctgaggtcctcgcgcgagaccttcaggccacgcgagtcgcggtagatatcgacgtttttctgcacggcgggcttttcggggacgatcttgctcagaagcgtcttgcagggctcaatctggcctgcaagtatgcggtgcgccgtgcgttcggagatgcccagcccgatgccctgcgcaatcttgaccagctcgagcgcatcgctgcccagtgctggccgcactacaacgggcagctcgtcgggatcgtcgcagaacagcagctgttcgtcggtgagcagcttgcgcccctggtcgacaagcgccgcgaggatatcggtgggggtgccgtagtacacgttcacgcggtctttggaatccagcgcaaactcgacgatggtgcgcatgacgttgtgcggaccgcggcagatggtcaccgcgccgtcttcgtcgcgttcgagtcgcggcaacgacgattggtcggccttctcggaaagctcgttgaggtcgaccacgacttcgaacgaagtacccaggccgacgcccgatgcgaccacgcgggagctcagggaattggatttgatggaatagagcgccatgcccctgccgtgcacgccccactggtccatgaccatggtctcgagcttcgaggtgacgcgcggctcgaagatggcctcgcgcatgtggtcggggacgccatccccgtcgtcgatgaacacgaggcgcttctcgttctcctcgcgcaccgtggcgacgtaaatgctgtgcgcatgcgcgtcgcgcgcgttgcgaagcatctcgatgacgatgtcctccaccgagcgtatgtcatgctttgcctgcctgcgctctgcctcggccgtgcgcaggcgcacaaagccgtcaccgaggttttcctcgacggccagctggtcatcgccggagaccgagcttatgaaatctgccaggtcgctgtcgaacatggacactccaaccttaaaaaagcagaaacggtacaccagggtctcgtgtaccgtttcgatgtttcttgcatggggaacaacgggctacttggcgagagcctcggaacgggactcgcgaacgacgaccacgtgaatctggcccgggtactgcatctcgtcttcgatctgctttgcgatgtcgtgtgcgagcaccgtcgcatgcgcatcgtcgacgacctcgggctcgaccatcacgcgaatctcgcgacccgcctgcatggcgtaggtcttctcgacgcccttgtggctgttgcagatctcttcgagcttctcgaggcgcttgatgtagttctcgtagctctcgtggcgtgcgccgggacgtgcggcgctgacggcgtctgcagcctggatgatgaacgcgagcacagtcgagggttcgacgtcggcatgatgcgcctcgacggcgtgcacgattgcggggctttcgccgtagcggcggcacaggtcggcgccgatgacggcatgcgagccttccacctcgtggtcgactgccttgccgaggtcgtgcagcaggccagcgcgcttggcgacgatcgggtcaagcccgagctcggaagcgatggcaccggcgatggaagacacctcgagcgagtgcatgaggacgttctggccaaacgaggtgcggtacttgagcctgccgagcgtcctcacgagctcggggtgaaggtcgtggatgccgacctcgaacgtggcctgctcgccggcttcctgcacctgctgctcgacgtaggccgtcgccttcttgaacatctcctcgatgcgggcagggtggatgcgcccgtctgcgatgaggttctcaagcgtgatgcgggcgatctcgcggcggacggggtcgaagcacgagagcgtgacggtctcgggcgtatcgtcgatgatgaggttgacgccggtaatctgctcgaacgagcggatgttgcggccctccctgccgatgatgcggcccttgatgtcgtcagatgggatcgagacggacgtgaccgtgcgctccgccgtgtagtctgcggccatgcgctggatagccacggagagaatctcgcgggagcgcttgtctgcttcggccttggtgcgggcctcgacatcgcggatgatgccggcggcctctgcgacgcagtcctccttgacggtgctcagcacctgctcgcgcgcctcttcccgcgacatggcggctacttggagcagcttcttgtcggcgccttcgatcttgctctgcaggtcgtcgtgcatcttctcgacctgcccctgcagcgaagagatctggtgttcgcgcttgtcgagggaatcgctgcggcggtcgatggaatcttcgcgctgctgcagacggtcttcgcgctgctggatgtcacgcgactgcttgcgcgcctcgtcctcggccttctgcttgatcttcaaagcctcgtcttttgcctcgatcgcggcttctttcttgattgtctcagcctcgcgcttcgcatcggcgacctttgcctcagccacggaaatagcgctgttcgcgttgtttttgatcatgacgcggctgatgaggaatccgacggcgaggcagacaatcgcgactacgatgtagataacgatgtccatgacgtacctttctggtctttcaagcaattcaagtcgtaatgaagatacgtgaccggccccgacaaaaagaaaaccggaacgtatccggcagtcatcgaagttcgtgcttatttactgttttgacccaatatctacgtgagagaggacttaagtcaatgttctataaataacaactcgaaaaaacgagtgaaggtgatgaatgccagaaaacatgctagcacatcaccttcacttccactgccctcattgacgaatatgacgctcacgcgttgccgcgggaacgcgacaggtagtcatgcaccgcgcgtctggacacctcatgcgagtaccccttgccgaggagacggcgcatgtaggagacgtaggggtctgcggcgtgacaggagcgtttctcaagctcgtaaagcgcgcgctcgtactcctcttcgggcgaggcgaactcgttttgacaggccgagatgacggaggaatccaccccgcactcctcgagcctgcggatgatcctctcccttccccacccagcatggaccttgcccctgatgaacgagcgggcatagcgctcgtcgctgatcaggccgacgcgcagtgccgtgtcgatgccgtcttgtatctcctcttcggaaaagcccgagcgggcaagcctttcgcgggtctccttccggcttcgctcgcgcacgttggaaagtgccgtgatcttgtccatgacggcgatgtggcgcttcaaagaaacggtctgcatcgacgttacgcgctctcgccgtcagagagctcgacttccgagtccgtcacgctgcccgtggcgctttgcccctcgccggtgagcgagatggtctcgtcgtcgtcgaaggtgtcgaccggcagcccgatggcctcgcgaaccttgttctcgatttcgagcctgagggcggggttttcctgcagcgttgccttggcggcctcgcgcccctggccgagtctgtcggactcgtacgtgtaccaagagcctgactttgcgatgatgccctcttcgacgcccatgtcgaggatgttgccctcgcgggagatgcccgttccgtacatgaggtcgaactcggcctgtctgaacggagccgcgcacttgttcttgacgaccttgacgcgaacgcggttgccgatggcctcgcccttttccttgatggtctcgatacggcgaatgtccaggcggaccgaggagaagaacttgagggcgcgaccgcccgtggtggtctcgggattgccgaacatcacgccgatcttctcgcggagctggttgatgaagatgcaggtagtgttggacttcgaaagcgagcctgcgagcttcctgagcgcctggctcatgaggcgcgcctgcaggccgacgctgctatcgccgatctctccctcgatttccgctcgtgggacgagggcggcaaccgagtcgacgacgatgcaggagacggcgttggagcgcacgagcatgtcgcagatctcgagcccctgctcgccggtatcgggctgcgagatgaggagctcatcgatgtccacgcccagacgcgcagcgtagacggggtcgagggcatgttccgcgtcgatgtaggcggcaaccccgccctgtccctgggcctcggcgacgatctgaagggccagcgtggtcttgccgctggactctgggccgtagatctcgatgatcctgccgcgcgggacgccgccaattcccaatgcggcatcgagcgcgagcgagcccgtggggatgatgtcgacgtccataatcgagctgtcgccgagcttcatgatggcgccctggccgaatttcttgttgatctgctcctcggtgaccttgagcatgttgtctgaacttacgttggtgaagtcgatcttgtttgttttggcacgagccatggaaacgctccgatctagcgacgattacctgacggtgatatgttgactgcatgctaatcgaacatgtgttcggtgtcaattcgagtggtccgaacgcagcgaacgaggtgactctaccgcggctcagcagtcaaaaccaccctcaaacaaccgtgaattcagagagctgggacagagttgggcccgagccgaatccgagccagacaagacgtcgttacgagcaacatccgagctattcaagacccgcgcagctcaaagagcggaagtctacagctcatccaaaagcagctgcagcgccgtgcgcacggcgaggctgcgaacctctgcgcgcgagtcccctcggcaggtagtgagcgttcgctcgccttggggcgcgtgcagcccgaagcagaccgtgcccacgggctttcccggctcggcaccgcccgggccggcgatacccgtcgtcgaaaccgcatactcgcaacccagggccttggcagcgcctttggccatcgcttgagcgcattgctcgctcaccacgccaaacgtgtcgatcacgtcttcggggacaccgagaacgccttttttgacttcggcccagtagctcaccacgccgccgcgcacgacatcggacgagcccggaacagcggtcagcgtcgcggcgaccagaccgcccgtgcacgattcggccgtgccgaccgtaacgcccttttgacgcgcacgctcgagcacctctgcggcaagcgcctcgttttcctcatcgagcaccatagtcacgcttctttcttcgagccaaagcccagcaggtccttggtcttgttgaagtagtcgagcagcgagacgagcgtcatcacgaccgccgcgcccagcacgacccaggaaaagatcgtgaatcccgttgcgacaccgccgcccaggagcttgatctgcagcgtgtctttgacgatgaagagcagaatcgcgaggatctgcaggccggtcttcaccttgccgtagtagctcgccgcgatgaccttgccctgcgcggcggcgcccatgcgcagcccggagacgatgaactcgcgcgcgatgatgatgagcgcgacccacgagggaaacgcctgcagctcgacgagcgcgagcatggcggcgc

SEQ ID NO: 2296 - DNA, 21813 bp, Unknown
  16S sequences of unknown bacteria
cccggggcgtgtaccacatccggtacacgccccgggattttgtttgttctaaaacaatacatttcagtggtaaaaattagaaaatcttgttgtcttttccaatttcgtgtggtaaactgaatttgcgacacaaatcaatatcgtttctcaagggcaagtgtgcagtttttacctcccggtaaaaacgcatgctcttttccgcatacttgtgtttgagatcggagatttgtgtcgcagcaatcggagccatgcgtttttcagtgcgcagctccggctgcgcacttttttgtgtttaagggaggagccgaaaatgaaacgtcatgtattgcaaattgctatggtgctgtgcatctgtctattggcgtgtggattggccacaaaagcatcggccgcagaagttgttgactccggcagctgtggagcgcaaggggagaatgccacatggacattagatcgtgcggggacacttacgatcagcggaagcggaaaaatggcagattgtattggcaatgacgccccctgggccggaaactctgttaaggtcgctatcataaaaaagggtgtcacgcacattggtatgagcgcattttctaaatgtcctaacctaagctgtgtctacatccctgacagcatcaccgacatagcggaatatgcgttcagtggctgtaccagtcttactgcagtgcatattactgacgttgcatcttggtgtgaaaccagtttcggaagtgttgaggcaaatcccctcatttatgccaacaggctctatttaaataatgtgcttcttacagatgtagtcatcccggaaggtgtaaagcgcattgagaaatacgcattctacggctgccgcagcttgaatcgtgtttctattccgtctggtgtcacagacattgggcaatgggcgttttatgagtgcatcagcctctccagtgtcgacatgccaagcagcatcacaagtatcggagattacgcattctctggttgctccaagctggatgccgtgcatattacagaccttcctgcatggtgcaatattcaatttaaatccgcctcagccaatccgctctacaatgcgaacaagctatatctgaatgatacgcttgtaacagatttggtggttccaaacactgttaccacaatcagcccttatgcatttataaattgcaccaactttatccacatcactattccaaacacagtaacaagcattggcaacgccgcattcaggggctgtactgcactaaacaatattgtaattccaagcagtgtgaccagcattgaccgtgatacattttcgcgctgttccagtcttaccaacatttctattcccaatagtgtcacttccattggctattctgcattctcttattgcagcagcttgaccagcatcacgattcctgatagcgtcgtaaaaatccagtccaatgcattctccgcctgctatgcactgaaatacgttatatttgaaggagctgctccaagtatcggcgatagtgccttctatcaggcaacgctctattatattgaaggaaaagacagttggacgacgcccctatatttgggctaccccactgcaacatgggacggtatacacattcctcacgatcacgactatgtatccgttgttaccgatccaacttgcacagaacagggttataccacctatacctgcagcatttgtgatgattcttatactggagattacgtagatgcgttgggacacgattggagcgaaggaaaggtgatcacagaagccacctgcacagaagaaggcagcgtagctctcacctgcacccgctgcgcggccactgcaaccggccccctttctcccctcgggcatagctgggatacgccagtctacacctggtccaccaaccatgcttctatccttgcatcccacacctgcacacgcgacaccagtcatgtagaaacggaaagcgggcaaattacattctgggtgacgcgggaagcaacgatcgaccgggaaggcgagatcacctacaccgccacctttgaaaatcccgcgtttgcaacgcagacagaagtcgtagccatcccgaagctgaccccgcccgagccgacgcagaaccccttcaccgacgtctccgcgaacgcttactactacacccccgttctctgggcggtcagcaatgagatcacgtccggcacgagtgcgacaacgttcagccctgacgcgggatgcacccgggcgcaggtcgtcgcgttcctgtggcgggccgccgggaagccggagccgaagcaaagcagcaatccgttcgcggatgtccgcgacgggcagtattattacaaggccgtcctctgggctgtggaacatggcatcaccgctggtaccagcgccacgaccttcagcccggatgcgacctgtacccgcggtcagattgtctccttcctctggcgctatgaaggcaagcccgcggcaaatgccagcaacccatttacggacgtcaaacccggcgcatactacgaaccggccgtcctctgggctgtcgccaacggcgttaccgccggcaccagcgccacgaccttcagccccgacgcaacctgcacccgcgcgcaagtcgtctccttcctgtaccgggaccttacaaaataattttcgccccaccacccctggcagcaagcccactgccaggggaatttttacagcctgccgcacacaccctttctattgaaaaagggtgcactgcaaggcgcagactgcaaaaaccggcccgggcttttgtgcaaaagtctgggccggtcattgattccttttttatttcttttttcgcttgcacgctactgtacaacccgcgcaattccccgcgcaggggcactttcggctgcgtatcacagcaatcacaagccatacggcaatcagcgccaggagcgcatagtcaaaaccgcccatagagctgcctcaaaacagcgtgatcagcgcatacacgccaaaagcgcagagccatgcaatggcgcattgcagcagactcacgccagccgcccgcaggccggagcccaactcccgcttgatggcagcgatggccgcgacgcagggcgtatagagcagcgtgaacgtcaaaaacgaaaaagctgtcgccggagtgaacagcgcatacagcgccgcgccggagttactgcccagcaaaacgcccagcgttgaaacgacagattccttggcgataaagccggagatcagcgccgtggccgcccgccaatcgccgaagcccaggggccggaacagcggcgcaagcagctgcccgatggcagcaagcagactatcggcagaatctgccacaacattgagatgcgcatcaaaggtctgcaggaaccagacaatgaccgtcgcgacaaaaattacgccgaaggcacgctgcaaaaagtccttggccttatcccacatcagcagcaggacactcttccaggacgggaatctataattcggcagctccatgacaaaaggcaccggattgccccggaaccccgtcgtttttagaatcaatgcgacaataacgcaaacagcaatacccattgcatacatgcccaccatcaccagcgcctggccccgggcaaaaaacgccgcggcaaacagcgcgtaaatggggatcttcgcgctgcagctcataaagggtgtcagcaagatcgtcatgtgccggtcccgctctgaggagagggtccgtgacgccatgaccgcggggacgctgcagccaaagccgatgagcatcggcacgatactgcgcccggaaaggccgatctttcgcagcagcttgtccataacaaacgcgatccgtgccatatagccggtatcctccaaaatagagaggaagaaaaacagtgtcacaataataggcaagaaacccagcacactgccgacgccggaaaatatgccgtcgatcaccagactgtgcaccacaggattgatcccataggccgtcagtccccggtcgaccagctccgtcagttgggcaatacccgctcccagtaggtcgctcagagattgcccgatgacccggaaggtcagccaaaaaatcaccagcatgatgacgaggaaaatcgggatcgcaaagacccgatgcgtcagcacactgtcgatgcggacactacgccggtgctccttgctctctgcacagcggacgactgtcttacggcaaacctgctcaataaaattataccgcatgtcagccagcgccgcttgccggtccaagccccgctcctcttccatctggagcacagcgtgctcgatgccatccagctcattctgctccagctccagccgctcaatgatagaaggatcttcttcaatcagctttgtcgcagcaaaacgaggcgagattcccgctttctccgcgtggtcctcaatttgatgggaaaccgcatggatgcagcggtgcaccggcccggaggggcagaaatcataaaccttcggccgctgccggtttttgaccgtgtgcagcagcgtcgtgatcagttcctcaacgccctcgcccacaaacgcactaatcggcaccaccgggatgcctaacgcgtccgccatcccggtcacgtcgattgagccgccattgttgcggacttcatccatcatatttaatgccagcaccattggaatacgcatctccataagctgtagggtcagatacagattgcgctcaatattcgtcgcgtcaacaatattgatgatgccatccggtttttcattcaaaataaaatctcgggtaacgatctcctcattggtatagggccggattgaataaatccccggcaagtcgacaacggtggcatttttcacgccgcgaatctggcccattttctggtccaccgtcacacctgggaaattgcccacatgctgattggagccagttagctggttgaagagcgtcgttttgccgcagttttgattcccaaccagtgcaaaaatcatacctgctcctccccatgtacagctgtcgtctgcgccttctccagggcagttacctcaatatctgccgcatcatccttgcgaatactcagggtatagccccgcagctgcagctcaatcgggtcgcccattggtgcgatttttgttaaggtcaccttcgttttaggaataagtcccatatccagcagcctacagcgcagcggtccggctccgccgaccttcgtgatgaccccggattgcccgacagtaagttggtccagtgtcataaaattcccccttgcatgtcattgtgtatctgtgtaccattgtgtgctgtattgattatgtagcaccagtataatgcaccactgccgcaaatgcaacaattttcccacattttctccttcggatccagcctgtacttttccagaaaagtacagtataatagccccagaaaaacagaacgtaccggcgtatgccgggttcaaggagcgcacaccatgaaatacgccttttatactctgggctgcaaggtcaaccagtacgagacccaggccatggagcaatggctcaccgccgccgggcataccgtcggcagctttgaagagccctgcgactgctatattatcaatacctgcaccgtcaccgccgtggcggacaagaaaaaccgcaacgtcatccgccgctgccggaagctgaatccggcggcgatcctcggcgtctgcggctgctatgcccagctcaagccggaggaggtcgccgggctcggggtggacgtcgtggcaggctccgccgggcgggaggacttcctgcgcatgatggacgaggccgcccgcacccggcaaaagcaaatccgtgtggacgacgccctgcgccgccacagctttgagctgctgcccgccggggggctcctgggccgcacccgggccatgctcaaggtccaggacggctgctgcaacttctgctcctactgcatcatccccttcgcccggggcccggtgcgctcgcttcccctggcagatgccgtggcccaggccaaggccctggcccaggagggctaccgggagatcgtcatcaccggcatcgagatcgcctcttggggcgcggaatggcacgacggcagcaccctgggcgacctgctccaggccatcctggccgccattccggagacccgcgtccgcctcggctccctggagccccgcatcatcgacgaggcgctgtgccgcagactccagggattttccaatctctgcccccagttccacctctccctccaatccgggtgcgacaccgtgctccagcggatgaaccgccggtatgacacggcccggtatctggagagcgtccgcctgctgcggcagtatttccccggctgcgccatcacgacggacctcatcgtcgccttccccggcgagacagaggaggaatttgcaaagacgctgaccttcctccagacctgcgactttgccgccatgcacatcttcccctattcccgccgcccggggacgaaggccgacgccatgcccggccagcacagcaacgccgtcaagcaagcccgcgccgcccaggctggcgccgtggcagacgccatgacgcgccgctatctcgaaggcctgatcggcagcacccaggccgtcctctttgaagaggaccaggacggctgcgccaccggccacgcccccaacgccgtccgcgtctacctccccaccggcggcctgcacaacgagattcgccccgtccgcatcaccgccctgttccgcgacggtctgctggccgaggcgccggacctaccgctttttccagcagcaaagccgtaatcgggcgaatacaaatcccccaggcctgccgcctgcgctttgcaggcagcaggcctatttttcacaaaaatttttagtatgtgtaaatatttttatgcaaaacgcttgcgatcgcaaaaaagccatgctatagtgcaaataggtagtactacataattccgcagttccaaagtcccccaagcaaacttcataaggaaccagagaccgacgtacaattattggaggtagctatgatgcttcgaaagctgatttctgcgtctctcgcttgcttgcttatcttttcctgcaccgcaggcgtactggccgcacccccagagcaaatggatccatcggaagcaatcgcaccggaagaggctgtcgattctgcgtacacctacgacgaaaacggaattttgacagaatatgtagaacccatcccggatttaacggacgaagaaaacgcatacgacaaactgattgcattctatggcgcggcagggctgccatgcgacattacctatgaaaatttcctcgattgctttgcggcatccggtctggaatacatcgaagactatttagtccagtgcattgacgagctttacgaaacatattccctcgacaaggatattgatagcggcaaagcccagcctgttttttcacaaagtgagcaatctctggaggagacgctgcagcaggcttacattgccgtgacagaatacagtgagtatctgggtatgccaatgatgacggactttgagaccttctgcgcccagtatgcatcgtctggtctgtatgatgtggaagtataccgggaccactgcaaagacgaaatttatgccgcgtttttgcgaactgaagaaggtatggttccgcacgaaggcatgccccttgaatctgagtccgaaccagttgaaaatgcatctggcctttcagtaatgtcaatgaccggagacgattactttgatacagaatacaaagtggtccttccggatttagacgatgcacacaatgcatactataaattggttgcatattacgaagtcttaggttattcttgtagtataacatatgacgacttctatcgtaacttcttgaattctgacgctgacagtgtagaagtatacctggggcaatgcattgaaacgcttgaaaacgagtacgaagatctcaattccgataaaagtggcagccaggcatggtattataacaccggcgcaaacctcccacgcccagcaaagtatagtaaatacaacttgcttagtgttgtaaaaaaaggtgacttgctctacgaaaagcgaggcggttttgctggagtccttggtcacattgcaattgtggaaggtgttttttggagcgtccaatattctcaattctatatccgtttggttgaagcagttagcactggtgtatgtcgaggtgtctttgacgagaatcggctagcagtcaagggtgatattattctgaggccgaaaaatgcaaccgataaacaaattaatgacgccgttgcatctgcggcgcattggtattgttcggaattggcttgggcagcatattttaacactggcttagatttagattaccctaatactgctgtcgaggtattgccgttgcacatctataactctcagagaacaacccaggttccctattccacaaccaagccgtcgaccacttttgtagatataaaccattgggcaaaaaatgctattagttttatgcttgataacggtgtcatgagcggaatgacggcaaacacatttgccccagatcgaagcataaatcgtgcaatgtttgtctcaatgttgtaccggttagcaggttgtccaagcatctcagctgcggacaaaacaaacaacagctattcagatgtgacaaatcagaattcatactattaccacgcagtcgtgtgggcaagtagcaaagggattgtcgctggatataccgacggaacatttaaacctaacggactcgtcactcgtgagcaatgtgcctgtttcttgtatcggtatgctcggtttataggtttaaatacttactattcagagaccagcctaaaccagttcactgatgtcaatcaagtaagtagctatgccttgattcctatgaaatgggcagttacaaaaggaatcatgagtggtacaaccacaacaacgctttctcctaaaacgacatgcacacgtgctatgtcagctcagttactgaaaaaggtgattgacgttctgatgtaacgaggtgaaattcaaatgcgaggaaaaaatcaagcaacaaaaaaggtattgctgtggtgttgcagattgttattctgtgcaacctgctttgtagtaacatattttctaatacgtaaggattcagaatctcaactgcccctagccctccttttcatgcctttggttggtttcctagccggtattttaattaccttgatccgcaagcggcccgactggtggttttgcgttgcacttattttgggctggctcatctcgcaggtggcagtgcattcgttcacggaattgtatgcattactgccagctacaattgcaaattgcttactgccttgtgccctattcgccttaaccagtttagcctgtaacggaatcttgcagaaaaaacagccaatgtgaagtgtaattcgcttagaacagaaggtgccttgtaatgaagcgaaaactcattgatccacccacccgctggggctattacctgattggcatcgcagcaggattcggtgtgactgccgggattctgcaatcgccgattggcatgtttattctactgccggcattgccgcttttatgtatcatcctggcattggtgtttaccctgcggcagcgcacggcggatgtgctcttaccactgctgctattgcttggcatggccgcagcatttcaactgtggtgcgttgccgagcatgaaagcagttggttgacgcttttgcgtgcatttttctggccctgtctattctcctatttcgtaaccgtgtatcttgttctgcactggtctgacgggtggtgtaaaaaaagctgctggctttgctatcttctggtcgcagcagtcagctttctcctcccctggctgacctatgtgggagaagtacatgtgctgcagccgtatttggaggatgccgggctgtatggcgggccgtcgctgctgcagctgctaattattcccgcgctctgcttgcttctggggatctggttccccattcggcaaggccgcgtggacctagtgatcccgctgttggtgcttttcggatatagcatttccatggccttccacgtacgcttgctggagttattcctgggcacacagctggattattgctccttggcgctgattctttacctggttccagccgttgtgtttggtctgccaaagcgaaaagggacacacatagccgaaaactcagggctagcttgattgtagccagcaacacaattgttcgaaatcagaattgaattgacactgttacaaaattatccgaacgcggcagtcctcctccgggctgccgcgctttgcttgtaaaaagccaccaacgccccgccgtactgtatccggcggggcgttggtgcttttgggtggcgttatgtctttttcataaacttctcgccgcacttggggcagcggatgttgatcttgcccttgcccttggggacgcggaccatctggtggcacttggggcagctgaaatagcggttgtcccggtcccgtaggcgtgagaagaagccgacgaagcgctgattctcccggcggcgcgccgaaatattccgggagaacatccggaagatcacagcaaaaaatggcacccaggataagtacgccagccacggcaggcgggagaacgagcctgccagcgaaatggccagcccgagcaccagcagcacgacattcaattggtccgacccataccggccatacataaaccgggcaaaccacccattgaatctgcgaaacataccatcacctagcttcaaaaaggataaaagcgccgcaccttgcccagcctttgccgctgcggcccggtgcttaacttctcttaataaattatacagcaattatagccatccccccagcagaaaacaatgcccccggggaattgtttacggattattcatgtttgccccccactgccgtgatagactgtccgcaatgcagccaagttagcggaaaattccccgattttccggccaaagggtggtttttgtattgagaaacagaatatagtctgatataatataaggaaatgtttttaaattggatgggaatttgaatgaagtacggaacctggaacacagcaacttataccgcaccgcaggtggacgcgctgcagcaggcgggctacagcccgctgactgcgcgggtgctctgcagccgcggcatcaccactgcgcaagacgccgcccgctttctcgcctgcgacgcccccctctgcgaccccttcctcctgcgggagatggacgccgcagccgcccgcatcctgcaggcactggagcagggtgaaaaaatcgccatctacggcgactacgacgtcgacggcatcaccgccacctgcctactgacagactttctgcgcaccttaggcgcagactgctgctactacatccccagccgtctggaagagggctacggcctgaaccgcgacgccattgcccggctgcacgcgcagcatgtgcggctcatcgtcacggtcgactgcggcatcaccgccgtagaagaagcggccctgtgccgggagctgggcatcgacctgatcatcaccgaccatcacgagtgcaaggcagagctgccggacgcctgcgccgttgtcgacccgcaccggccggacgcgacttacccgcaccaaggcctgtccggcgtcggcgtcgcctttaagctggcctgcgccatctgcggcgagcaggaggcagccctggcccgctactgcgacctggtctgcctggggacgatcgccgacgtgatgcccctgcggggcgagaaccgccgctttgtccgcgacgggctccaagcgctgcaaaagccccggcgcgtcggcctggcggccctcatccgggagtgcggcctgggcaatcaggagatcactgccacaaccgtgggctatattcttgcgccgcggatcaatgccgcaggccggatgggccgagtcgagctagcggtcgagctgtttttgacggagcagcccgcccatgcggcccagctggcacaaggattatgtcaacttaacaagcagcgtcaggccatcgaggccgggatctaccgccaggctgtcgccatgctgcccgcggaaaagacgcctcccgccatcgtcctggctggggacacctggcatcagggcgttgttggcatcgttgcctcccgtctggcagaggaatacagctgccccaccttcctgatttgcctggacggggaacacggcaaggcctcctcccgctcctacggcggcttcaatctctttgccagcctgcgggatttggctgacctgctggaaaactacggcgggcacgaattagccgccggtttcaccatcgccagaggcaagattgatgccttccgcaccgagatttcccgccgggcgcaggactttgccgagtctggccaggcccaccgggcactggaggtcgactgcacgattccgccggagcttttgaccctgcagaacatcgacgggctgcaccagctagagccctgcggcgccggctgcccccggcctgtcttctctctggagcaggtactcgtcgagcagctctcagagatcggcggcggcaagcatctgcggctaaagctccgctggggcccccggccggatcagatcctcagtgccatctttttctcgaccaacgcactacaggcagcgatcttcgccggagataccgtcgacgtcgcctttaccccacagatcaatgaataccggggcgtccgctccgtgcagctgaatttggtcgatatccgcccctgccaggcagaacgggaggccacccaggtccagcgggaggtttatctgcgtcaccgcagatgcaagcccatcacggcggacgaggccgagagcctgctgccgcgccgcccggattttaccgccgtctggcgctatctcatctcccaccaggacaagggccgggtgcaggacgattttgcgtgcctgtgccgcaagatcctgcgccacaccggcgccgcctgctccatgagccgcatccgcgtctgcctggacgtctttgacgaaatgggcctgatcgacctggagcagcaggccaaatacctctccatcaccatcacggcccaggggaaaaaggtcgatctggccaaaagcgccatcatccgcagcctggagcgctgcaaacaggaggacacacatggaaacattccaacaacggtatgacgccatggtccgggccatcgcccggtatacgccatatgtgaatatgcagctcatcaaccaggcagtggattatgctgccaataagcacgccaatcaggtccgcaaggacggctccccgtatatcatccaccccttggccgtggcggagattgtcgcagagattggactggatacagattccctcgtcgccgccctgctgcacgactgcattgaggacaccgactctacccacgacgacctctcccgcctctttggtccgacggtcgccgagctagtcgagggcgtcacaaagctgacccgggtcgagtacagcacgctggaagagcagcagatggagaatctgcgcaaaatgtttctggccatgagtaaggacatccgtgtcatcctcatcaagattgccgaccggcttcataatacccgcacgatgcagtaccagaccccagccaagcagatttccaaatcccgggagacgatggatatctatgcccccctggcccaccggctgggcatgcagaagatcaaatgggagctggaggacgccagcttaaaatacttggacccggagggctacgccagcctgacggagcatttaaatgcccgcaaagccgagtccgaccgctttatgaaggccatccagacccagatcaccgcccgactgaaccaagtcggcatccagggcagcatttatgggcgcatcaagcatatctattccatctaccgcaaaatgaaagcccagaacaaaaccatcgacgagctttatgacctctacgccttccgggtcattgtcgattccatccccgattgctacaacgtcctggggcatatccacgacctgttcaaccccgtccccgggcggttcaaggattatatctccacgccgaagcccaatatgtatcagtcgctgcacacgacggtcatcggcacccagggtatccccttcgaggtgcagatccgcacgtgggacatgcaccagacggcagagtacggtgtcgccgcccactggaaatacaagcagggcgtctccggcaacgaggaaaaggaatttgaatggatccgccgtctgctggaaaaccagcaggaagccgacgctgaggattatattcactccctcaaggtcgatatgttcgacgacgaggtcttcgtcttcacccccaagggcaaggtcatctccctgcccgccgggtcgactcccatcgactttgcctatgccatccactccgccgtaggcaactccatggtcggggccaaggtcaataaccgcatcgcaggctatgacctgccgctgaaaaacggcgatatcgttgaggttctgacctcaaagaccgccaagggccccagccgcgactggctgcagatctgcaagagcaaccaggcccgcagcaagatcaagcagtggtttaaaaaagaacgccgggaggacaatattctccacggccgcgccagcttcgagggcgagctgcgccggatgaacctgcagccgtcgatcctgcagaatccagatatcctgcgggccgttttgaaaaaaaacagcttcgactgcctggacgatatgtacgctgccatcggctatggcggcctgaccgccgtcaaggcggcaaaccgtgtgcgggacgacctgcagcatgccacccgggctgcccgggagcaggccgcactggaatcccgccagacggacggcaagccgtcccaccgcaacaccagcggcgtcgtcgtggagggcatcgactcttgtatgctgaaattctcccgctgctgcaccccagttcccggcgatgagatcatcggctttgtcacgaagggctacggtgtctccatccatcggaaggactgccccaatgcccagggctctttggacccggcccagcagggccgctgggtcaaggtctcctgggccaatgatgaaaacgaaagcttctataccacgctggaaatagaatcaaccgaccgcgacggtttgtggctggatgttacgactgttatgacccaggcacgggtaaaaatctccgagctctccggcaaggacctgcctgggaaccgtgccattacaaccctgaccattgaggtccagaatgtggaagaattaaaccgcgtccgcaccaagctgcggagcctgcccggcgtgatgaacatccgccgcggccagcagtaagaacaggagggtaccccgtatgcgagcagttgtcacaagagtcaccgaggccagcgtcaaaattaacgaggccatctgcggcagcatcggtcagggccttttgatcctgctgggcgttggccctgaggatacacccgcccactgccaaaagctagcggataagattctcggcctgcgcatctttgaagatgacgatggcaaaatgaaccggagccttgccgatgtcggcggccaggtcttggtcgtcagccaatttaccctctacggcaactgccgcaagggccgccgccccagctttgtcggcgcagccgggcctgatttgggagcgcaaatgtatgcgctgttcctgcgcacctgcgcagagctcggttttccgccgcagcacgggcagtttggcgcggatatggccgtcgcctccatcaatgacgggccagtcacgctcattctcgacacggcggaactgatgtaagcgatttgcagggggaaaacaatatgaagatcaaacagctgacacttggcttatacgccaccaattgttatatcgtctatgacgaggcgacgcgcgacagcgtcgtcatcgaccccggctatacgccggaggtcatcttgcaggagctggagcagctgcagctgcagccccaggccatcctgctgacccacggccattttgaccatgtcggcggcgtcgcgccgctgtacgcggagctggactgcagggtctatctgtgccagaaggatacccagctgccgccgtatatcaccgccgggcagctgtgctacacggatttttacgccgagggcgacgatttgaccttcggcgcgctgcgattccacgtcatcgagacgccgggccataccccgggctccgtttgcttgctctgcgaggatgtcattttctccggcgacacgctctttaaaggtagctgcggccgaaccgacggccccggcggcagctggaaggacatgtgccgctccctgcagcgccttgcggagattcagcgggactaccaagtcctgcccggccacggcgaggcaacgacgctccgccaggagcagctctataacgcgtttatgcaggaggcccgcggccaatgaagctatatctgcagggccacgactgccgttacgccgtggagcaactgcagttggccctcttcggccagccgctggagtatgtcgaagcgctcttcccggcgggggaggacggcgccgtctccgcgttgcacaccggcccccaatggctgacggcaacatgcacgatcacccgcggcggcaaaacagtccgcgccagccgccgcctgcgccgggaccggcagacgccgacgctcctgcggcgcattttgcagcagagctattatctggccgccgtcaagctgctggacgcccccccggcttggggtgcgctctccggtgtccggcccacgaagctgacgacgcagcacattctggcaggcggtgaccgccgctctgccgaccggctgctgcgcgatacattttacgtcagccccgcccggcgggccctctgccttgacgcctcagcagccagtgtcgaagcggcggggctgctggagccgacggatctttctgcctatatcggcatcccattctgcccgtcgcgctgcatttattgcagcttcgtcagccaatccgtcgagcgcttttcccagctgctggagccgtatctggacgcgctgatccgggagatccaatataccggcaagctgctggcggattctccctaccgcatccgcaccctctatatgggtggcggcacaccgacgaccctctccgccgcccaaatgggccgcctgatggacgccatcagcgacgcctttgacggcagccgcctgctggaatacaccgtcgagggcggccgcccggatacgctggacgctgaaaagctccgcctcatccgcagcaagggctgcgcccggacgagcatcaacccccagacgatggacgataccgtgctggccgccatcggccgccgccatacggcatctgacgtccgccgggcctaccggcaagcagtggacgccggttttgccagcatcaatatggatttcatcgccggtctgcccggggataccccggcccgctttgccgcatccctggaacaggcactggagctgggacccagtaatatcacagtccataccttggcgctgaaaaagggcgcggcactgtttgaaagccgcggtggtctgccatcggaccgcgacgtcgcccaaatgctggtggacgctgcgcagatgctccgcagcgccgggtacaagccgtattatctctaccggcagaaatatatgtccggcaattttgaaaacgtcggctggtgcaggcatcatgacattggcctgtataatatttatatgatggaggaaatgcacacgatcctctctctgggtggcggcgggatgaacaaggtcaacctgcccggcggtaagctggagcggtttcacaaccccaagtaccccgtccaatacattgaacggctggataccgttctggcccagaaggaggatatcttccgcctgctggcgcagcaagcctgatacgcatttctccgcgccgccccggcggcaggaaggagcctatggatcttctaatttccggcgcaacggtcctgaccatggatgcggacctgcgcgtcctgcccgacgcctttgtcgggatcaccggcggcaagatcagctttctcggcaaagctgccccggtggaaaaaccgaaaaaaatcatggacgccactggcctggtgctgatgcctggcctcattgactcccattgccatctgacccactccattctgcgcaattaccgcgacgacctgcccccactggagcggctggagacccagctgctgcccaagcttgaccggatggaccggcgcatcgccgcagcggcggcaaccctctcgatcgccgaggccctgcgcagcgggatcacctccctgagcgtcctggaccgcttctgcgggcctatcgcccaggtcgtggcggacagcggcatcaaatgcaatctggccccggcggcagagtggtacgaggaagaatttgatttggacgaagacctgcccggccagcagctgcaggagctgcaccgccgctgggcaggctttgacggcggccgcctgcagatcgaggcgggcattcacagcgaatacaccagcggctaccagctctgggaggccctgggacgttatgccgcccaggaagggctcggcctgcagctgcacctgggccagacggcggccgaatgcgaccgctgcctggaccgctacggcatgccgcccgcccagctgctggactgccatgggctctttggcaagcgcgtccttgccgccggcggcggtgcgctgatgccggaggaccggcagtgcctggcgcgccacagtgcaacaattgtctatacccccgtcgccgccctgcggcaggcccagccgctgccggatatcccggcgctgctgcaaagcggcttaaacgtcgcgctggggtctgacagctcgatctatggcggaaaaatcgacctctttgcccagatgcgcgccgccgcgctggcatccgagcacgcaggccacccgctgcccccggcggcgctcctgaccatggccaccgtctgcggagcccgggctcaggggcgggaggccaactgcggccagatccgccccggcatggatgcagacctcatcctgctggacttcaccgcgccgcatcttatcccctgccacgacctgctctctgcgctggtctacaacgccggtgggcaggacgtctgcctgacgatggtccggggcaaagtggtctacgccggtggcaaattccccacgctggatctggccagcgccgtgaacgagctgacccaatacgggatcgaaacgatgtttgcggaaccggctcagcagcccgccacggcggacgaaccgaaaggagcggaacaatgagcaatgaaatgcctatgaaaaagcagagcttcctgggcggtgccgccgtgctggcactggccaccgccgtcgtgaagctgatcgggatgtttttcaaaatcccgctgcaaatggtcatccacgaggcgggctacggctattttacaacagcctatgatatctactccgtccttctgatgatctccaccaccggcctgcccgtggccatgagccggatgatctccgaggcccaggcgctgggggaatacgcccagatcaagcggatctataaggtctcgttctccgttttcctggtgctgggcctagtcgggtttgccgggatggccatcttctgcaagcagctggccagtcttctgggccaacgggacgcctggtacgccgtgctggcgctgtccccggcggtgctgtttatcggcatgatctcctcctaccgtggcttcttccaggggcagagcaatatgctcccgacctccatcagccagatcatggaggcgctctgcaagctcttcatcggcctgaccgccgcctggatcatcatgaaaaagtggaacaatgtccccctggctgcaggcggcgcgatcttaggcgtcaccgtcgggacggtcattgccacgctctatctctcccgcaagcaccggcaggcagaacggcagctcgcagccgccggcggccattgtaagagcaaaaaggcgacgctgcgtcagcttttgtacatcgcgatccccatcaccatcggctcggccgggctgcagctcatcaatctgctggacgctattatttatatgtatcgtctcaaaggcgccgccggatttacccaggcggaggcagatgtccttaagggtatctacaattactgccagacgatcttcaacctgccctgcgcctttatcacctccatcaccatcagcgtcattccggcggtgacgagccacctggcgatgaaaaataaccggggcgtccggatggtcgaggattccgccatccgcgtcatggcgctaattgcgctgccctgcgcaatggggcttgcctgcctatcgggcccggtctatcagctgctcagctcctacaccgccaccagcctgctcactgcgcggccggtcctggcgatcttaggtgtggccgtgatcttcaactccctggtactggtcaccaacgccattatgcaggcccacggtgatgtcatgaccccggtcatcaatatgctgctgggcggcgttgtaaagatcatcgttaactttattctcgtcggcaatccggccatcaatattgtcggcgcggccatcggcacgctgtgctgctatatcgccatcacgctgctgaacctcatcgcgttgcgacggaagctccactcgaagctctccgtcccgcggctgctggcaaagccgctgctggcgtccctcatcatgggtgcggtcgcaattttggcctataagctggtcagcgccgtcatcccctcgcaacggatcgactgcctgctggccattgccgtggcaggcgttgcgtatctggtcctggtcgtcgtgctgaagatcatcaccgcagacgactgcgcgctcctgccgaagggcgaaaaaatcgctagaattctgcgaattcgataaaatttcccatttttacttgtcataggcaagaaagtgtgataaagtatgatagattttaaagaaaaagagcattatacctatgcggacctgctgcagctggtgcaattcttacggcagcccggcggctgcccttgggacagcgcgcaggaccatcactccatccgccgctgcttcttggaggagacggcagaagcctgcgaggccatcgacgaaaacgatgcgccccatctgcaggaagagctgggagatgtcctttaccaggtggtgttccacgcggatctggagcgggaagccgggcgcttttctatggacgacgtgatcgacgggatctgtaaaaagctcatcgtgcggcatccgttcctgtttggcgcatcgggcgccgcccggccggacgagacccaggccctggagggctgggaggcacgcaagcgcgagctgcgcggcaatccgaccgtcgccgcccagatgcgagacgtctgcaaaaccctacctgggctctggcgtgcggagaagctttgtaaaaaagccgctacgctggacccgcagacggcgcaaaccgctgcggcccaattggcagatgcgcacaccgcactgcaggccgcctgtgccgccgggcaggacgccggggcgcagctgggtactctgctcttttccgccgcccaactggcccagtgcctttcgctggacccggagcagtatctgcatgcagcctgcgaggactacatgcggcaaatcacagcgcgagaatccatcgcgcagacacaaaaatgagagcgtattacacaaagaaaagaggatacaaattatgaacaaaacggaattgattgcaaaagtcgctgagctgacgggctctgccaagaaggatgctgagaaggctgtctgtgctacgctggatgctatttctggcgcgctgtccgagggcgacaaggtccagttggtcgccttcggcacctttgaagtcaaagagcgcgctgcccgcactggccgcaacccgagaacgaaggaagagattgagatccctgcttccaagcttccggtcttcaaggctggcaaggccctgaaggacgccgtc

SEQ ID NO: 2297 - DNA, 10150 bp, Unknown
  16S sequences of unknown bacteria
ccggtgggcttcttctgctaccccatcagtcaggcggcggacatcaccgccttccgggccacagcggtgccggtcggcgaagaccagctgcctatgctggagcaatgccgggaaatcgtccgccatttcaacgcgatatacggcgacaccctgacggagccggagatcattctgccgaagaatcaggcctgtctgcgcctacccggcatcgacggcaaggccaagatgagcaaatcgctgggcaactgcatctacctttccgacgagccggacgagatcaagaccaagattatgtccatgttcaccgaccccacccacctgcgccgggaagacccgggccatacggagggcaacccggtcttcatctatctggaggccttctgccgcccggaccactttgcggaatttctgccggactacagtgggctggatgagctgaaggcccactaccagcggggcgggctgggcgacgtgacggtgaagaaatttctcaacaacgtccttcagtcggagcttgcgcccatccgggagcgccgccgccagtgggagcagcggctccccgaggtgtgcgagctgctgcgcctgggcagcgcggccgccgaaaagaaagccgccgagaccctgcgcgacgttcgccgggccatgcggatcgactattttgaaaatgggaatttgatgaaataacccacgaacgggacggtcttttcacaaagccatcccgttcgtgtttttttcctccgccagatattccccggccagcttcagcagctcggcccggcttttcagccccatggcggcggtcatgcgcttgatgcggtatttgatggtgttttccgtggtatgcagggattcagtcatgtcgaaatagcgtgctccccgcaaaagctcccgaaggatgtccaggtccagactgtccatcccggccagcagttccttgaaacggaagacctcccccacatgggggtcctgatagaaatcgccggggaactccgacgctggttccgccggcagcgtgtccgccatgccggggccgtccgccgcctccagacggcagggcacccagacgcagcggcgaatgtccggctccttttccagcttgcggcatagacgcacggcctgtgccccgcaggcgaataaatccattcggaacagagaaatttcttcttcccggggaagtgcctgttcaccgaaggcgtacagccgggggccgccgccgggcagcagacggcgcagcgtcatggccgccacgtcgttggcgcagagcaccgcgtccagtttgtccgcgtcccgtgccagccgctgggcggcttcgatcagattgccgctgttttcgtaaattttaccctcagggcattggcgcagaaaggcttcccgtttcacctcgtccgccgctgaggacggatgcacggcgaacagcgcccgtctttccggggtacgggcggcaaagatggccgcggcttcctcgtaatccggcgcggcgaacccgcagcgaacgccctgcggcggtacgcccgcgatcaggcagggaaggttccgggccgccagccgggccagatggctttttaaccagcctacggcgctgcccaccagcagaacgggttcctcggcggcttccgcctcttccgtcagcgcttgcagctcccagccccgttttcgggcctcctcccggatgcccgccagataggcctgcgcccagagattggccccgtaggaaggttcgatcagcagttggatcattctttcgccccgtctcgattcgttggatgtaaataaaatattatatcgttcttttatctgaaatgtcaagccaaaaatgcagccgaaagggcggcgcatcttgtgttgaaacccgtccggcaggcgggtacaatcaggctatccgaaagacccccaaaacgaaaggaaggtttgccgatggacgttattctcaaacatgaacctatgaccatcccgacctatgagccttacgccgccaataccctgcccttcttcctggaaaagaaggcctatcagggcgcaacgggccgcatttaccccgtgccctacaccgaccgtctgtccaacaagccggtggataaggagtacgattcctacacgttggaaaacgagcacgtgaaggtcgtgctgctgccggagctgggcggcaagatccacggcgcggtggataagcacaacaactacgagtttatctaccagaacaccgtcatcaagcccgccatggtgggcattgccggcccgtgggtgtccggcggcgtggagttcaactggccccagcaccaccgtcccaccaccttcatgccgctggaagcgacccccaaaaagaatgcagacggttctgtcaccgtctggatgggcgaagccgagcctttccatcggatgcgcggcatggtgggcatcactgtgtaccccggccgctcctatgtggaagccaaggccgtggtctacaaccgcaccgacacgcccctgccctttatgtggtggaacaatctggccgtgcgggtacactcccagtacaaggccaccttcccgccggatgtggcctacggcaacgaccatgaccgccgcgccgtcattcccttcccggtgatgaagggcgtgtacaagaccgcccgtcccttcgactacggcaagggcacggacgccacctggttctccaacatcaagctgcccacctccgtcatggtgatgcggggtcagagccagatgaacttcctcggcggctacgacttcaccgcggacgcgggcaccgtgactgtttcctgccaccacaccagcgtgggcaagaaaatgtggacctggggcgatggtcccttcggccgcgcatggtgcgccaacctgaccgacaacggcgaccgctatatcgagctgatgaccggcgtttacaccgacaaccagccggacttcacctacatcatgcccggcgagaccaaggtgttcacccaggtttggtaccccatccacgccatcggcgaaaccaagaacgccacgctggaaggcgcgctgtccctgagcgtgaaggacggcgaggcgcgtttcggcgcgctgcccacctgcgagcgcaggggagccaccgtccgcctgaccctgaacggcaaggtgctttacgaaaaaaccgccgatctgtcccccgaaaacgcgctgaccgactcctgccccctgcccgagggcgcgaaggagaccgacctgtgcctgtccctgagcgacgcttccggcaaggtgctggtgatctatcagcccattgacatttccaagaagcagcctcccaaggcccggcccattccgccggatccccaggacgtggccaccattgaggagctttatctccacggcgcccatctggagcagtacaagcatcacacctatgtgcccgaggattactaccttgagggcctgcgccgggacgccaccgacctgcgctgcaatctggccatgggccgctccatgctcgaaaagggcaattacgtcagcgcccgccgctatctggacgctgccatcgccaagctgaagatgcgcaacgacaaccccgccgacaccgaagccatctaccacatggcccgtctggagcggctggaaggccatctggacaaggcttacgatctgttctgggccgcggcgtggcaatacggctggcgcagccccagctattatgagatcgcctgtatcgacctgtgccggggcaacagggcgctggccatggagcatctggagctggcgctggaaaccaatgcccgtcacttcgccgcccgggccattctggcctatctgcgcggcaacgcggacgacctgaaggccattctggaaattgcgcctcaggacggtctgacccggttcctgctgggccgtctgaccggcgaagccacgctgagcgcctatacgctgggccgcagcgaggacatgaccgacatcgcgctggatctggctcacgccgggctgaaggccgaggccgaagaagccctccgggcctgcaccgctcccagccagatgctgtactatcatctggcccacctgactggcgatgcgccccagcattgcagcctggattactgcttccccaaccggctggaggacatccccgccctgcaggcggacgaatggcaggcgcagtatctgctgggctgcctgtactacgaccgcatgaactacacggccgccatgaccgcatgggaaaaggcggggaagctgaacccggcggacgcttacaccaagcgctgcatggcgcaggcgtgcttcgaccatctgagccagcccgcccgggcgctggagctgatgaagcaggcgctggaactggcccccgacaacgcccgcatcctctatgagcttttgcagatggagaagaatctgggcttctcggtgaaggatcgtctccacctgctggagacccacagcgagctggccaagatgcgggacgactgcttcctggacgagatcatcctctacacccaggacgagcagtacgaaaaggcccgagagctgctgctgagcaagcgcttcaacatctacgagggcggcgagggcaagctgacccgtcaccacggctggctgtataccctgatgggccagaaggcgctggaagcgggcgacgctgaaaaggcgctggaatggctcaagaccggtctggtctatcccgccaactacggcgagggccgtcactacagcgcgcaggagggcaacgtctactactacaccggcctgtgccatgaagcgatgggcgacgccgccaaggcgaaggaggcctatcaggaagccgccggtcagcccagccagatcaccgaaatgaccttcttcaccgcgctggcggaagccaagctgggccgggaggaagacgcgcgcaagaccttccggagcatggtggaggaaggcgaaaagcggcaggcttccagccaccgctggggctactttggcgtaggcatggccgcgcccctgcccagcgagctggacatcaagcgcatgaacctgatcgacgcgcacctgctgatgctgctgggcaaagcgggcctcgggcaggattaccagagcgatctggacgctttgaaggtctacgatccctacaacagcaagctggacttcttccagaagctgggactggtgaaataaaccagacaaggacatacaaaaacacgggctgcgggaaaaatccctgcggcccgtgtttgattgatgcacttacagcgcggcaaataccttcgcgccccgatttttcagccatacatacaacagtgcgcacagcactgccgtcagcagacagaaaacggcggggatcactgcgggatgcagattccggcccagcgtcatggccgcgccgccgggaagaagagcgtacacccagccgcccagcagggccaacgccacgctgccgccctgcttgacgggggtaatttcgctggtccagtgcaggttgggcattttcaggcccatggtcagcccgaacagagccaatagcagtacggccagcagactgccggccgccgtcagcagcgacagcaccggcgaaagccccagcaccggcagcgcgcaggccagaaacaccagcatgggaatgcccgtgaacaccagctgcgttttcagtttggctttcagtacctcccatgcagacacaggcagggattgcagcacccacaggctcttgccttccagagagacggacggcgcggccatgtcgttcatggaggccagcagacaggcgaccgagatcgccagcgccgccagcgtgctctccgcgccgggaagcatggccttccagggagccatccattccccgcccttcaccagaagcagcacgcccgccgccgggatcagcagaacgcccagaccgcagttcagcatgtagttggggctggaaacaaaacgccggcattcttttcccagcagcgctgtaggcaggctgcatacccgggccttcttctcccggtagcgggccttggcggcgcttccgccggaggtggccagccgcagaaagctgcgggacaacaacagccaggtcaacgccgtcagcagggccaccacagcggtgaccagcaacatggccagccagtcgccctccgccatacgtccgaatagatacagcggataagccgcacccttgatcttcacgccgtataccaccgcgttcgccaccagatcggagatcacggtctgcgccttgaaataaatgaaatagtacaggccgatccccagcagcgacaccagcaccgtcgtgatgctcttatgcttcagcttcaggctgatcttcgccaccacccagcccagcaggcaggacagcagcagcacgatcagcgagacgatcgccacggtcaaaagcccgcccacgatggctgcggcgctgtgggcgacctgaacccagtacacgatcacggccgggacgatcaccacggcggagtacatcaggcccatcaggtacaccgttaccagccgggaagaaataatgacccgcagcggaatgggcagcgacagcagcaggtcgttatccttggccagatacaggctggaataggtattgaacacgctgccgaacgcacccataaaaatggcgaccagtcccatcagggtgaagtacagccagcccatatccaccgccgccatagcgtcgcacagcatcatggcgacgaaggtgaacatgccgcccagcacgcccaccatcaaaaaaacgaacagcgcaaaatacagaatgacggttcctttggcgcgcttctggctcttcttggcgtcgtacagatagctgcgaaagatttccgccatctgctttttcaccagttgtttcagcattgctctccctccagttccaggaagacttcctccaggctgtcgtcgcccttgacctcttccatggtgccggaacggatcagcttgccgcccttgatgatggccaccttatcgcacagcttctccgccacctccaacacatgggtggagaagaagattgcgccgccccggtcgcacagctcccgcatcatgcccttgagcagatgagaggccttgggatccagccccacgaagggttcgtccatcaggatcagcttgggttcgtgaatccatgcggaaataatggccagcttctgcttcatgccgtgggaataagccgcaatgggctgccccagatcgccggtcagctcgaaaagctcggcgtatttccgaatgcgttcctgccgaacgtccgcctccaccgcgaaaacgtccgcgatgaaattcaaatactgaatgcccgtcatgaactcatacaggtcggggttatcggggatataggccatctgccgcttgcagcggagcgggtcggcctgaatggacacactgccgatgagaatctccccttcgtcaaaggcctgaatgcccgccacggatttcagcgtggtggtcttgcccgcgccattgtggccgatgaagccgtagatttcgcccggagcgatatgcagactcagatcgtccaccgcttttttgtcgccgtaggccttggtgagatgttgaatttgaagcattgcttttctccttgcttgcatcggattttttcgtttccatagaaaaaccgtccaaacgatttcatttctgagcatcgttcagacggttagtataacacacgttgtgcgaattgcaatgatgattcgtcctattgtcaaaatcagtgtctcaaaacgtcgctttcgcgtccccgatcgcctttcgaaaggctgcgtcccggtcgaaggcgccgtccacgaagccgggcacttccttcagcgccttgcacaggctcaggctgaagccggtcagaatctgctgcacctcctgccgggaataggggcagttgcccgtgaccgtcagcgtacacaggctgtgcaccgccagccacatatcccggaaataacggtcggcagtagggccgtccatccgataggtctgcatcagtcggtcccgcacctgttcccgtacccggcccatggcgtccagcgcgctgcactgtccctcttcggggcgagtcatgtacaacagctgatacagcttcggttcgtcctgcgcaaactgcagatattgaacgcccacgcccaaaaacggcggttccatcgccagtcctttttccacatactgccggaaaatattctccgcaaacagacgcacttcttttttcagctcgtccatcgtgtggtaataggtaaaaatgggccgggtagaggtgcccagcaccacggcgacctcccgggcggacaccgccccgatgcccttttcccgggcgacggtcagcgcggcgttggtgatctcgtctttggtaaacttcggcttaggaggcaatccgatcatcctttctccgtcaaaagcaacgcgtccagttctccgatcatgttgcaaaacatatgttatataacaagatgattataggatctgcctggcgggaagtcaagctaaatcaatggaaaaaaaaccgaaccagcgcctgaaaggatcatcacctgccgttcacaaattctttgaaaaatgttcgtctttcctccaacctattttcctttttttctgctatcctttgaaacgtaccgagggaggaaaccaaaaggctccccggtagagatcccaaaaggagaaaatcaccatgaaacggaattggaaacgaatcaacgctttgtttttagcgatttgccttttgtttgtatcgtccttcgccctggcggaaggaaaccccggcaacccgccggacggacagccgcctcagggacagggtggaaccccgccggaaaagcctgacggagaagcccccggcgaacccccggccggtgatatgggcggcggccccggcggcatgggcggccccggcggcagcagccagcccgactcctacgctgccgtgcagaccgtatcggaagacacgcagctttccggcgtaacgctggcctcggtggcggcggatgaaaacgcgctgctggtcacggcgggcaacgtgcaggcaacggacagcaccctgacccgtaactccacggattccaccggcggcgattccgccagcttctatggagtcggcgcggcggcgctggtgaccggcggcacgctggaaatccacaactccaccatcaccaccgacgcgaacggcggcgcgggcgtattcgcctacggcagcggcgtcgccaccgtggcggacactaccatcgacaccacgcaggacacctccggcggcattcatgtggcgggcggcggcactctgtacgcctccaacctgaccgttatcacccgcggaaactcctcggcggctatccgctctgaccgtggcggcggcaccatggtggtggacggcggcagctacacctccgagggttccggctctcctgccgtatacgtgacggcggatatcaccatctccaacgcgcagctgacggccaccggctcggaagccctttgtctggaaggcctgaacagcgtcagtctgaccgactgccagctcagcggaaacatggccgacctttcccagaatgacaacacctggacggtcatcctgtaccagagcatgtccggcgactctgaagtgggcaaaggcaccttcaccatggagggcggctccctgacctctctgaacggcggcctgttctacaccaccaacaccgaaagcgaatttaccctgcgcaatgtgcagatcaccgcttcggacgactgcgagtacttcctgcgctgcaccggcaaccagaaccagcgcggctggggccagagcggccagaacggtgccgactgcgttttcaccgccgcccagcaggaaatgaacggcaacgtgatctgggacagcatctccaaccttgacctgtccctgacggagggcacggttttcaccggcacggtgctggatgacgaaagctgcgcgggcaatggcggcaacggcggatgcaccctgaccattgatgaaagctcccactgggtcgtcaccggcaacagcgtcgtgaccacactgaactgttccggctccatcgtggacgcggagggccgcaccgtcaccatcgtggacagcaacggcaacgtgctttccgagggtgaaagcgaatataccatcaccgtgaacacgctgcagagcaccgcggcctgaaaaatcccatcgaaaaagccctgattggccgtcattccccgcgaacagcgctctgcggcccgctccgcttcgcgttgcgggcttcggactgcggtagccctttcagggctgtcctcgtcctcggtg

SEQ ID NO: 2298 - DNA, 2962 bp, Unknown
  16S sequences of unknown bacteria
ctgtttttgcccgccggaaaggctcgcgacctcggcctgcgcgagccgcgagatgccgagcccgtcaagcgcctcttgcacgcgcccgcgcacccgctcgggaggaagcccgaggttttcgggcccgaaggcgacgtcgtctgcgacgaggggcgcgacggactggctgtcggggtcctggaacaccatgcccacacgcgggcgcacctgatatggcgcgcccgcagccgacgtgtcgtgcccgaacacgcgcaccgtccccgcgtccggtacgagcagcgcgttcatgtgccgcgcgagcgtggacttgcccgagccgttcgagccgatgatgcagacgaactcgccttcgccgatagagaggctcacgtggtccagggcgggagacgcggcaccggcatacgcgtacgtcacatcgtcgaactcgatcgccgtctgcaccccgtccacctttcgcgctcgcaggacgcaccgcgcgccccgttgccagatacctcgattgcaggatagcagcaatgcgcgccggctcccttgacgcaggccaggcaggagcgtataggtaggtgcgtacgaatattggatcttcagggcggggcgcaattccccaccggcggtcacagcccgcgaactccgcatccgcggagccggttcggtgaaattccgaagccgacagtatagtctggatgagagaagaatccctctggtgcgccgcgcgtgcgccaggcgatgtgccctggaacagccttcgttgttccaggttttttgttttttggcgcgcacacgccccttcgctcgtcgtccccgatgccaatgcaacctgaacgagggtgtcatgaacgacgaagactacatgaggcgcgcactcgagcttgcggaaaagggccgcgggcacgtctcccccaaccccatggtgggcgcggtcatagtccgcgacgggcgcatcatctcgtccggctaccaccacaagatcggcgacctgcatgccgagcgcgacgcactgtcccgctgcaccgagcccacgcagggcgccaccatctacgtcacgctcgagccctgctgccactacggcaagcagccgccgtgtaccgacgcgctcatcgccgccggcttctcgcgcgtggtcgtcggctcgggcgaccccaacccgctcgtcgcgggcaaggggctcaagatcttgcgcgacgcgggcatcgaggtcaccgagcacgtgctcgaagacgagtgccgcgccctcaacgaggtcttcttccactacatacagaccaggcgcccgctcgtgatcatgaagtacgccatgacgctcgacggaaagatcgcctgctacacgggcgagtcgcgctgggtgacgggcgagcaggcccgccggcacgtgcacgagctgcggcacgcttgctccgccatcatggtgggcatcggcacggtgctcgccgacgacccgctgctcacctgccgcctcgaaggcggcgtcgaccccgtccgcatcgtctgcgacacggcgctcaagatcccgatcggctcgcagatcgtgcagaccgcccacgaggtcccgaccctcatcgcgacgtgcagcgccgacgccgaaaaacgcgcggcactcgaggcacgcggttgcgagctcgtcgacgtcgcacgggcaagcgatgggcacctcgacctcgacgcgctcgtaaacctgctcggcgcgcgcgagatagacagcgtcatcctcgagggcggcgcgaccctcaactgggccgccgtgcaggcaggcatcgtcgacaaagtgctcgcctacctggcccccaagttcttcggcggcgcgcaggccaagacccccgtgggcggacagggcttcgcatcgccggctgacgccctcgagctgcgcatcaaaagcgtcgagcgcctcggcgacgacctgctcgtggaaagcgaggtggtgcgctgatgttcaccggcatcatcgagaccgtcggcaccgtcaagcgcatcgcacgcggcgcgaggtccgcctcgctcgagatcgaggcaccgcagatccttgacgacgtgaaggtcggcgacagcatcgccacgaacggcgtgtgcctgaccgccacgagcgtcaccgcccggacctttaccgccgacgtcatgcacgagacgctcgagcgctcctcgctcggaacgctcacggcgggaagccacgtcaacctcgaacgtgcgatggcggccaacgggcgctttggcgggcacttcgtctcagggcacatcgacgcgacgggaacaatcgcacgcatcgagcgcgacgacaccgccatctggtacaccatcgacgcggacccagacgtcctgcgctacgtcgtggagaaggggtcgattgccatcgacggcatcagcctcaccgtcgcgcgcgtgaccgaggcgagcctttccgtgtcgaccattccgcacaccaaccagcagacgacgctgcccgagcgtgcctgcggcgatgtggtcaacctcgagtgcgatgtcatcgccaagtacaccgaaaagctgctcgggctcgcccccgcgacgggaagcgccgggcagggcagcgcgataaccatggaattcctagccaaaaacggcttttagcgaaaaggagcgatcatgaccgactacaacaccgtccccgaggcggtagaggcgctcaaggcgggcaaggtgatcctcgtcatcgacgaccccgaccgcgagaacgagggcgacttcatctgcgccgcgcagtacgccacgaccgagaacgtcaacttcatggcaagccacgcgaagggcctcatctgcatgcccatgagcgaggagtacgtgcgcaagctgcagctgccgcagatggtggcgcacaacaccgacaaccacgagaccgccttcaccgtgtccatcgaccacgtgaacacgacgacgggcatctcggccgaagagcgcggctacacggcgcgcatgaccgtcgacgacgacgcctcgccgctcgacttccgcc

SEQ ID NO: 2299 - DNA, 8696 bp, Unknown
  16S sequences of unknown bacteria
gtagacatggtagacagaggctggaagaatctggacatttattttttgaaaaatcgtttttcctttcgctcacaaaaggaaaaagccacccgaaaacgcgatggttttcaggtagctaaatgcattttccactctttattcacacagaacactgtgcagaatgtccagtccgcgaaggatttcctctctggtaatggtcagaggcggcagcagacgcaacgtatctgttcccgctgtcagcaccagaagtccccgatcgatacagcgctgcgccagctctttatgggagatacccgtcagctgcacgccaatcatcagccccaagcctcgcacaccggcaacataaggactatgcattccctcaatatagtcgcgaatcagttcacctttgattttcacttcttccagcacatcatcgctaagctgttccagcacagcacagccgccggcgcaagaaaccggattcccgccgaacgtagtggcatgcatccccggccccagcacattccggcacttttcattagccagaataccgcccagcggcaagccgccgccaatgcccttggcaaaagaaacaacgtccggcagaatgccgtactgctgataggcaaacagggtgcctgtgcgtccgatgccggtctgcacctcatccaccagcagcagccagtcgttttcggcgcacagtactgccagctggtgcacaaactcccgctccatgggatacacaccgccttcaccctgcaccaactccagcatcacagcgcacacatcgtcgccaccggcatcgcggatggcgtcaatgtcattggcgtcggcataacggaacccttcggtaaaggggaaaaaatactggtggaataccgcctgccccgtagccgacaaagttgtaacggttcggccgtgaaaagagttgttcagcgtgatgatggtgctccggccatgaccgtacttatcaaagctgtattttctggccagcttgatcatgccctcattagcctcaccgccgctgttggaaaaaaaggctgcgctcaacccggaacgtgcgcacaactgctcggccagcgcaatatacggttcgctgtagaacaaattggacacatgcgccaagcgcagagcctgtgcacctacggcgctggcccactgccaattgccgtaacccaggcagttaacgccgatgccagccgtaaagtccacatactcctggccctccacatcgtacagcagcgcaccctgtccatgatcaatggcgataggaaaacggccgtaagtctgcataacgcattgcgtatcccgtgcaatcaattcctggttttccatcacacatgttcctcctcattgagtatcatagtaccgataccttcatccgtcagcatttcaattaaaatggaatggggaatgcggccgtcgatgatatgggtgcgcttgaccccgccggccactgcttcagcgcagcagtccgttttgggaatcatgccgccggtgagaatgccctgctcgcggtaatcctccagttccccgggatgaatcacatggatcaggctttcctcgtccttcggatcacggagcacgccacgcacatcggtaagcaggatcagcttttccgcctgcagcgctacagccagctttgccgccgccgtgtcggcgttgatgttgtaaacatacccctcatcggtgttgtccgccgcctgcgccactgtggctacgatgggaataaagccattggccagcgctgtctccagcacattggggttcaccttcgtgatatcacccaccagaccgtaatcctccccgtcgccccgatctagttttttagcctgaatcagagccgaatccaaccccgaaaggcctacggcatggccgccgatacgggagatccgatccaccagatttttgttcaccttgccgcacagcaccatctgcaccacatgcatggtctctttggtagtgtagcgcaggccgttgataaagcgggattcgattcccatccggtccaaaatctcgctgatctccggtccgccgccatgcaccagcaccactttcacgcccaccaggttcagcaggacgatatcctccatcaccgcagcaaagaggtcgttgttgatcatggcgtttccgccgtatttaaccacaatggtctttccatagaatttctgaatatacggcagcgcctgcaccagcgtttgcgcccgctcataatttgtactgttcatcgttacccctcttcttttccttgctcttgtccggaagttccttcctgcttacaaatccagctccatccagcacgccgtatcccggaaaccgctgcgcgcatgacagaggcgcccagccagaacttggcaacgtttttttcgcgtcctttcactgattcagcagggagatatccgccgctgccctgtggaaggctgcgccgatatactcacgtgcggtaatctccgttgatctgaacgtagtcataggtgaggtcacagccccagcaggtacagcatccatcgccctctcccatggaaacggcgataaccacttcgccagccgagaggacctgcctggccaatgcctcgtcaaaaggcaggccgcggcccgcgcggcagacgtccaccgcgccgttctccgaagaaaacgttacatctacccgttccgggtcaaaagactcgccggaatagcccatggcacacaatacgcggccccagttggcgtcgcagccgaacaccgccgccttggtcaagctggaagcgatgacgcttttggcaacggtttcggcgctctgctcgtcccgcgcgccggacaccgtgcaggtgatcagatgcttggcgccttcgccgtccctggccatctgccgggccaatttgacgcacaatgcactcagcgcttccacaaacagagcataggcctcgcccttttcggtgatctccacattgccggccataccgttggccatcagcacgcaggtatcattggtggaggtatcgccgtccacgctgatgcgattgaagctgatacgcacagcctcctggagcgccgtgcggaccagctctttggaaatcgcacagtctgtgaccaaaaagcacagcatggtacccatattggggtggatcataccgctgcccttggaaataccgccgattgtcacggttttgccgccgatttccaccgtcacggcttcttcctttttcacggtatccgtggtcataatagcttgggccgccgcgtcggaaccggcgcggctcaactgttccgcgcagccaggcagcgcctgttcgatggcggaaatgttgatggtctggccgatgacgccagtggaaccgaccaccacatcctccggcgcaattcccagctgttcagctgccgcccgggccatccgttccgcgttttcaccgctttgttcgcagcaagcgttggcgttgccgctgttggccaccacagcctgagccgcgccgttctgcagcgcttggcgcgtccacagcactgaagccgccttgactacattttgcgtatacatgccccaagcggcacagggtttttccgaaaagagcagcatcaaatcctttttatccgcgctgctgcccgctttcacaccagcgtgtacgccggccgccgtaaatcctttcggcgcacatacgccgccggaagtccagttcaacatactcattccttcttttctttccagttcacacagggcagaatggtttagcccgtaccgccgtgtcactttgccctaccaacagtgcacagccggtgctcacagattcaaccccgtggtttcttccagtcccagcatcagattcatgttctgcaccgccgcgccggaagcaccctttccgagattatcaaacagagccgtaatcagcacctgatcctcatggccgcagatgatcagctgcagtctgtcgctgccggccatggtattagcggcaattcttttttccgtatagcccagcggcgccacagaaaccagagcagcaccggagtagtgatcctccagcacgtcatgcagctgcgccgctgtgggatggcccggcagcagagcggtgtgcagcgtcaccgaggtagccatacccttgtagtaatcgtccacaatggggcaaaataccggcgcacgcagcagggaacacactttctgcatctccggaaggtgtttgtgctccagattcaatccatacagctgcggtgcatacagtgccgcccctttgtccgccacctcgtactctgcgatcatcttttttcctccgccgctgtagccagtcagcgaaaagcaggtcagcgggtaatccggcggcagcagaccgtatttcaccagcggatacacagcggaaataaagcccgtggcatggcagccgggattggccacgcgcttccccgcggcaacggcggctcggtgctccggcgacagctcggcaaagccgtaggcccagccctctgctgtgcggtgagccgtagaggcgtcaatgatccgggttcggtcgttctccaccaaggccacagcctcccgggccgccgcgtctggcaggcacaaaaacacaatatccgccgcgttgatgcactttttccgctcagcggcgtctttgcgtttgtcctcgtcgatcagcagcagatcgatatcctgccgctgcgccaaccggtcgtaaatctgcaggccggtggtaccttccttgccatcgatatatacaatgggtttgctcatgaatcacacattctctcttgtttgaataaacgcttcgatctcacggatctgccgctctgcttcagccttggcagggccgccgaacgaggcgcggctcatagcgcagttttccagattcagcgcctcgtatacatctgcttcaaacagcggcgaggttttttgcagctcttccagcgtcagctcctccagcgtctttccctgctcttggcagtagtacaccagattgcccacagcagtgtaggcatcgcggaagggcattccttttttggtcagatagtcggcacagtcggtggcgttgataaagccccggcccgcggcgcggcgcatgttctccggatgcacagtcatcgtctcgatcatgccggcaaacacaggaatgcacaattttactgtatcgatggcatcaaacaccggctctttgtcctcctgcatatccttattgtaggccaaaggcagggacttcatcgccgtcagaagactcatcagagagccgtacacacggccggttttgccccgcaccagttccgccacatccggatttttcttctggggcatgatggacgagccggtagaataggcgtcgtccagatcaatgaatttaaactcccagctgcaccagaggatcgtctcctccgccaaacgggagaggtgcatcatcagaatcgaacaggccgccaggaattccagcgcataatcccggtcgctgacgccgtccaaactgttacccatgggccggtcaaagcccagctctccggcagtggcaaagcggtcgatggggtaagtggtgccagccagggcgccggaacccagagggcattcgttcatgcgcgcgcggcagtcctccagccgcgtcacgtcccggcagagcatgtgggcataggccagcaggtgatgggcaaaggtgatgggctgcgcccgctgcagatgagtgtagccgggcatgaccgtctctgtgtgctgtctggcctgctgcagcagcaccttctggaaatgcagcagctgctccacaatctcgccaatctgccgccgcaggtacagccggaaatccagagccacctgatcattgcggctgcgggcggtgtgcaggcgtttgcccgcgtcgccgatgcgcgccgtcaaaatggtttccacattcatgtggatatcctcgttgtcggcggaaaattcgatcttccccgcctccacatcggcgaggataccgcgcagccccgcgcggatgttctccgcatcagcgcgggaaataatgccctgctcgcccagcatggcggcatgggccacactgccttctatatcctcacggtaaagccgctggtcaaaggggatggacgaattaaaatcgttgaccagcgcgtcggtttccttgcggaatctcccggaccacagtttcataaacgaaattcctctcttacagtcgtatcattttataaaaagaataaatatgcatcccgccgggcccatacggcgcggggcggggaaccgtttccccgccccggcacagcgccctgccgattactttttctttcccgccgctttcctggcagcggtcttttgggcagtctcagcagttttcaccgccgtctcgcccgcccagcaaccgcatcgcccacggctttagctgcggtcttgtccgccttgacggatgcctttttcactgctcccctttggcgctcttctcctcttccaccgcagcagcacgacgctcgtccatcagtgcctgcacggtgatgggcaggccgaagagcttgatgaagccttccgaatccgcctgattatagatggactcttcttcgccgaaagaggcgatggcgtcgtcatagagcgtatagggcgaccagacgccggcgttgatcatattacccttgtacagcttcagccgcaccgtgccggtgacatgctcctgcgtggaggtaacaaaagcactcagcgcctcgcgcagaggcgtataccactggccgtcgtacaccaggtcggcaaacttgatagccacctgctgcttgtagtgggccgtatccttatccagcgtaatggtttccagcacctggtgggcgcggtacagaatggcgccgccgggtgtctcatatacgccgcggctcttcatgcccaccagacggttttccaccagatccaccaggccgatgccgtttctgccgccgatttcattaagggcaagcacaatctccttagcgctcatttccttgccattgagggctacaggcacgcccttttcaaagtccagcgtaacatattccggctcgtcgggtgcctgcataggcgaaacgcccatctccaaaaagccctctttttcataagtcggctcgttgccgggatcctccaggtcaaggccctcgtggctcaggtgccacaggtttttatccttggaatagttggtttcccggtcgatcttcagcgggatgttatgagcctcggcatattcaatctcatcctcgcgggatttgaattcccagaagcgccagggcgcgataatagtcatctccggggcaaagtgacggatagccagctcgaagcgcacctgatcgtttcccttgccagtgcagccgtggacaatagcgtcggccccttcctttttcgcaatttccaccagacgcttggcaatcagcgggcgggcaaaggaggttcccagcagatacccgtcctcgtacacggcaccggcctgcatggtgggaatgatgtagtcgtccacaaattcctcggtcaggtcctccacatacagcttggacgcgccggtggccttggcctttttctccagcccctgcagttcatccgcctgacccacattgccggacacggcaataacttcgcagttgttatagtgttctttcaaccaggggatcaggaccgaagtatccagaccgccggaatacgccaaaacgacttttttaatctctttcatcgacgaaacgcctccgtatgtaatcaaaatttcttttcccgttcttccatcaggtatgcctattataccccttttgaatgattattcaatacaaaatccccgcctttttctattttccccgttttacacaacttttctgtgttaccctaaattctcttttgtggttttgcactcttttcacgaatatattcgttaatattctgtataattattcattttattttttcttgcgccatccggtcaagatgctataataaaagcagtacgcattccccgcccgcggcggtcagcgtccagaaaagaaccgttattacaaaacaaaaggagatccgaccctatgtctattcttgtgaccggcggcgccggctacatcggcagccactgcgtggccgccctcgtttcccgtggcatcgacactgtggtggtggacaacctgtccaaaggccaccgtgaggccctcaaaggcggacgcctctatgtgggcgatgtgggtgaccgagtatttttggaagacgtgtttcgccgggaacacattgaagcggtgatccactttgcagccttctccctggtgggcgaaagcatgagcgtgccggagcagtatttccgcaacaactgcatggccggcctgaccctggtggacactatggtgaaatacggcgtaccctaccttatcttttcctccaccgccgccacctacggcgagccggagtacaccccaatcgatgaagaacatcccaaacatcccaccaacgcttacggcgagagcaagctgatcgtggagcgcatgctgcgctggaacgaccacgctcacggactcaaatatgtggcgctgcgctacttcaatgtggccggcgcgttgagcgacggctcgattggcgaggatcatagtccggaaacccacctgatccccatggtgctggccaccgccctgggccagcgggaaaaactgagtctgttcggcacagactatcccacccgggacggcacctgtgtgcgtgattacatccatgtggaagatctgatcgacgcccatctgctggcgttggaatacctgaaagccggccagccctccgccgcattcaatctgggcaacggccagggcttcac

SEQ ID NO: 2300 - DNA, 15406 bp, Unknown
  16S sequences of unknown bacteria
aacaacaagccggcagaaactatcgaatacgacaagcaggtcagatacttcacgatatacataggcgactacgactcctccgcatggcttaaatctgtcatccccgacttctggaaggacgaggcgcgcggaactgttcctctcacatggggacttaacccgaacctatcaaaccgcataccgatggtgttcgactatgtttacaagaacaaatccgacctcgactacttcgtaacgggagacagcggggcagggtatgtaaatccgtccgctctcgtgctgaacagacgccgctaccgtactctaccagacgcaaccgcgacatgggtggaatacaacgcaccgtatctcggcagattcaacatggacatatgcggattcatcttgaacggagctatgaactactgcaccgaagtctacgatatgtactcgaagataacgcccgtcggagctttctccaatagcagcgaaaagctaacgctgtacaacggaactccgattctctccatgactgactaccagtctcccgagcagtccttctatcacatgaagaataagataaacttctccgtgttcagaacgatacgcataagcccctccgaggtcaaggatattgcaatgcaaatcgaagaatactgcaacggcagagacacgcgctttacctacaaatacgtaggaccttacgagctgtttgacctcataaagcagtccggtctcggcaaggttgttgacccgataggataatatcttaggataaaaaataatcccaagctcacgcggaaagtgtaaaatctgcgcggcttgggatttttttatttgttaaggaactcgagaacttcttccttcgggatgtagcctaccgacgttcccttctcatgtccgttttcgagaagaacaagggtggggatggacattacgccgaactttttcgcaagctcaggctcttcgtcaacgttgaccttgcagaaaagtacgtcgtctctctcttccgaaacctcgtcgataactggtgagagcattctgcacggtccgcaccatgacgcccagaaatctataagaaccggctttgcgctttttgcggcgacattttcaaattccgctgtcgtgagctttactactgccatatgttgtacctgcctttctttgttatgactatattataacccgaaaaagtgaatgtttattatactctcgccgaaaagtgtgtgaattttgcggtgactgataattgtgccgaaagccgcctgatttttcgtttagtttaaaatcactgaataattattattttgcacggaaatattatgagttttttttgaaattcacgattgacacaccccacggaaatatgatataatttagtcaccgcaaaggtaaataactgagcataaagccaaggagttttattatgtacagcgttaagagagccgcaattcgaatgttctccacccggatataacatcgggtgttgttgtcacagagtaaaacttactgataaacaataaataatacttgatggaaagtccgggatgcaaacgcgttgctccgggctgtttttatgcgtttgaataattatttatacggtgaaaatatgattgagcttattaatgtgacaaaaaccttccgcaccgagcatgattcggtagaggctgtcagcgatgtttcgcttgaaatcgaaaaaggcgacatctacggcataatcggtctatcgggagcgggaaaatccacccttgttcgatgtattaactttcttgaagtcccgacgtcgggtcaggtaaaattcaagggcgttgacctcgcttctctgtcgaaaaaggagcttctcaaaacccgtcgctcgatagcgatgatattccaaaattttaacctgcttgcacagcgtactgctctcgcgaatgtctgctatcccatggagatatcgggagttccgaagaaaaaggcagtcgagcgtgcaaaagagcttctgaaagtcgtcggtctggaggacagaatgaagtcctatcccgcacagctctccggcggtcagaagcagagagtagccatagcccgcgcacttgcaaccgagccagaggttctgctctgcgacgaagcaacaagcgcgctcgaccccaacacgacatcacagattctcgagctgctgaagaaaatcaactccgagcttggcgttacaattgtagttataactcacgagatgaaggtagtcgagagaatctgcaacaaggtagcggtgcttgaccacggtacagtcgccgaaaaaggtcttgtaaaagatatattcatcgcaccgaaatccgccatagctaaagatttgatacttccgaaaggcgcgacggctcattttacacctaagggcgagcttgtgagaatagtgttcgacggacaaaagtcaaacgagccggttatatcaaatctttcgcttgaatgccgcactgccgtgaacatcatgagcgcggacacaaaggaaatcggcggaagagcttacggacagatgctcctgagacttcccgaagaccaagcgtcggtcgagcgtatattcgcttacctcgactcgcatgaagtacaatacgaaagaatctccgacgctgatattgcggctgagatagaaggaggcgatacaaatggttgagttcctcgacggaatactcgacagcggaatgacgcaggtgtatgtcgaagcgatactgtcaacgctgactataacgcttgtctcgacagtcatcgcgtatatcataggaatcccgctcggagtgcttctctactgcacatcaaaggacagcattttcccgaatcatgcggtaaacactgtggtgggtgttatagtaaacatcctccgctcgataccgttcatcatacttctcgtaatgtcacagcctatcgcgaaaattgtggtaggcacgcagatcggcgacagagcgtttgtgttctacctcgtcatagcggctgctccgttcgttgcgagaatgattgaatcctcgttccgtgaagttgaccgcggagttatcgaagcagctcagtccatgggctcgagcaactggcagataataacaaaggtccttcttcccgaagctaaaccctcgctcatcgtgggaggtgcaatcgcggtgacaacaatcctcggctacacccccatgacatacctcatcgccggcggaggtctcggacagctcgctataagatacggtctgtaccgcttccagccgaaacacatgtatatttcatcactgctgctcatcatcatagttcagattctccaggagggactttccttcctcgcgaagaagactgacagacgtatccggcaaatgatatataagataaattaaataacaattcatttttaaggagaaaaaatcatgaaaaagttcttatccgcagctcttgcagctcttcttgcggcagcatctctcgtatcctgctcttccgcaaagtccgacgacaaaacaatcaccgttgcagcatccgctactcctcacgccgaaatcctcgagcagtgtaagacaattctcgctgacgaaggctacacacttgagataaaggtaatggacgactacgttacaccgaacaatgctaccgaaagcggtgacgttgacgccaactacttccagcaccagccctacctcgatcagttcaacgaagaaaacaagactcacctcgtttccgttgctaaagttcactacgaacccttcggaatctacgccggcacttgctcctctcttgacgctctcgaagacggcgcagtagttgcagttccgaacgacaccacaaacgaagcaagagcactccttcttctcgccgacaacggtctcatcgagcttaaggaaggcgtaggtcttactgccacaaaacaggacatcgtttccaaccccaagaacctcgacatccgcgaaatggaagccgctctcgttcccacagtcctcaatgaagttgctgtagccgtaatcaacggtaactatgctatcggcgcaggtcttaaggtttccgaagctctcgcagctgaaaagtcagaatccaccgcagctcagacatacgctaacgttatctgcgtaaaggaaggcaacgaaaacagcgaaaagacacaggctctcgttaaggctattacctccgaaaccgttaaggaatacatcaactccacatacgacggagcagttgttccgattttctaagataatttaaactgaataagaagcagattcattgtcgggtctgctttttttgtgcttccgtggataaaaccatgcttttcagtcaaaaatacagcggatacttactatatataaggagaaaagcatgaattcaaaagagcttgcgtcgctgattcttgaaaaaatcggcggagttgataacataatttcatatacacactgctttacacgactgcgctttgttctgcgggacgagaagatatgcgacactgcggcactgaaaaacacgcgcggtatcataggcgttgtgtcgagcggagggcagtatcagattataatcggcagtgaagtctcaaatgtgtacgcggagctgacgcggctgacgagtctgacggggctgacaggagacaaatccgcttcgtcctcggagagcagcaaacctgagaaaaaggaagacaaaaacggctttataaaagtcctcgaaaccgtcgcgggaatattcaccccgataatccctgcaataaccggagcgggaatactgaaagcagtcatggcgcttctctcagccgtgggacttttgtcgccgtcatcccaaacctacgccgtgctgacagtttttgcggatgcagcgttctatttcctgccgttccttctcgcgtattctgcggcgaaaaagttcgggtgcagcatagttttagcattgtcggtcgcgggaatacttctccatccgagctttgctgcactgtttaacgacggagcggtgaggtttttcggaatccccgtgagacaggcgacgtattcttcatcggtcatcccgataattttgacagtgtggttcatgtcgtttattgagccaattgccgacaagttatcgtggaagccgataaaattcttcacgaagccgcttataacgctcgtagtcacgggattcgcgggaattgtggtgataggacctctcggaaacctcatcggagaatggatagctctcggcatagaaggacttgacaaaatcgcaccgtggcttgtacctctcgttatcggagtgttctcaccgttcctcgtcatgacgggcactcactacggactcatcccgataggaataaacaacatcgccaccgcgggaatagacaagctcataggtccgggaatgctcggctcgaatattgcgcagggcggagcttcacttgcggttgcggtaaagacgcacgacagcgaaatgaaacagcttgccacctcagccggaatcacagcgatatgcggaattacggaacccgcgatgtacggcgttaacctgaagctgaaaaagccgcttattcccgtaatgatagccggaggagccgccggactttatatgggactttgcggagttggaagatacaccacaggctctccgggacttttagctcttccgggatatatcggaacagagggagcgcggaacatcataaacacgtgtattgccgccgccggagcatttttgataggctttgtcggcactctcatcatatataaggacaaaagcggcgagaaagcaggcaggattacagtcctatctcccgtaaaagggcatgttgttccgcttgccgaggtgaacgacccgacatttgctgagatggtgctcggaaacggatgcgctgtcattcccgaaaacggaagcgtattctctcccgccgacggtgttgttgactctatcccggagacttgccacgccgtgatgataacgacagacagcggagcggagctgctcatccacatcgggattgacacggtggagctgggcggcagattttttaaagctctcgtcaaggtcggagacagagtgaaagcgggacagaagctgatagaattcgaccgtgaatcggtggtgaaagcgggatatgacgtgacgacgcccgttatcgtgacgaacaccgacgatttcgaagagataaaaatatcggcacagactgcttccgaaaaaatgccgcttatggtgctgacggcgaaagaaaaggcaaaggaggagtagtatgttcaaagacggattcatgttcggcggagctatcgcggcaaaccaatgcgagggggcatataacgaaggcgggaagggactgtcggtgcaggatgttcttccgagaggactgcgcgggagcaggagcgaaaaggtagtcgagagcaacctaaagctcatcggaacggacttctaccaccgatacaaggaggacatcgcactgctcgcggaggtcggattcaatacactgcgcctctcaattgcgtggagcaggatatacccgaacggagacgacgatgagccgaacgaggaaggacttgcgttctacgacagcgtgtttgacgagctgaaaaaatacggtatcacgcctgtggtgacactgtcgcactacgaaactccccttgcgcttgccgaaaaatacaacggatggtcggacaggagaactatcggattctttctgaaatattgcgagacggtgttccggcggtactcgggcaaggtgaaatactggctgacgttcaacgagataaattcgcttccgaacgcgccgtttatgtcgggagcaatactcacaccgaaaagcgagctgtccaaggagacggtgtatcgcgccatgcattatcagctcactgcgtctgctgcggcgggaaagctgtgccacgagtttatacccggagctatgataggctgcatgattctcggcgttacggtatatccgctcactcccgacccgaatgacaacctccgcgcgtacatgagggagagggagacgtattccttcgcggacgtgcaggttttcggcaaatatcccgactatctccttcgttattttgagaaaaacggcattgacgcggatataactccggctgaccttgaagtgataaagaacactgttgatttcgtctcgttcagctactattcctcgatatgcgaaacaactcacgaggatatgagcgagaaaacaggcggaaatctcagccgaggatacaaaaatccgtaccttaccgtaacagagtggggatggcagatagaccccgtcggacttagaataacgctgaacaagctgtacgacagataccgcctgccgctgttcattgcggaaaacggaatcggcgcggaggacactctcatatacgaaaacggggaatacactgtcgacgacgactacagaataaactacctctcggcgcatttgaaacagctggagcttgcgctcgacgacggcgtgaacgttttcggctatacaatgtgggcgcccatagaccttgtgtccgcctcaactgccgagatgagaaagagatacggcattgtctatgtcgacaggcagaacgacggcacaggctcgctcgagagataccgcaaaaagtcgttttactggatgaagcagatgcttgcgtcaatggaataaaaaagtgcgctgtgagaatttgagaaaatactcttgcagcgctctttattttattttagaattccgctcttgtctacggcgtcataccaaacccgagccattatctcgtgtcctacatatgtcggatgaatgccgtcccagacaacatagtccgcttttccgctctcgtccacgtattttttcagctcttccgcgaaaggtacaaacactgcaccgtaatcacgagcgattttgcgaacagccgcggcgtattcgggagtgtatttcacgcaccactcgtttttcaggtagaactccgtgccttcttccgccttcggagacatgaatcgaaacggctcgcacataatcagcttcaggtttccgttttgcgcgagagttttgtcaaggagcttcctgtagcacctctcatatgcgtcaacatcgggtaatgtatgaactccaccgtatgcgcattcgcagtcgttcactccggtcagaatgctgagcacagtcggatgaacgtcaagcacatcggtatcggagcgggcgtaaatcttcactatcgtgtctccgctgatacctcggttcactattttcgggcaggttttatagttgtcaagccctatctttcccgcgagaatgaactgatatccgtgtccgagaacgtgattcatgtcccagtcgctctcaacgcggtttccgtgagtgatggagtctccttgaaatagcagcacgtcctgtttgccgagctttatcatttttgtctttcctccttggttttttctccattatacaccgtatttcggatttttgctatagtaatctgaaatttcttttgtcattacttttcgtgaatatattgtaaacccacgcgatatttgttataatgtaggtgacaattgtatttctaccgcgacatataatttgataaggagatataatatgcttccaaacaaacatacagactgggcgcactacaaaaccgtaaccgaaggaatgtattggcccgacggtcaggttcttccttcgttctcgagaatagacggggagcttgacgctataaccctcggatgctacaacgacgacgttaaggtaactctcgccggacttcagggaatggtaaaccgaggaaagactcgcatctacctaaacggaacaaacggacgtcaggaaggctccaacacatggccggaaagactgggactgaagcgcagggacatgaacgacctgttctctttcgtaaagaagtacgcgggagaggttgacggggttgtgctgtattccgcgagaaatccgcatttcagaaacctcgcttcaaccgcggcgaacatacataacgctattccaatggagcagtcgctttatgacacattccatgaccgcggaatagagctgcccgttgtgcttgacctaacaaaagtacacgccaaaacaccggttgaggtttacacatatctctacgaaaacctctggaaggattgcagcagaagagtgttcgtcagcctaagccccgttggacatacatcctttgtccgcgatatggcagccgctgtcggttccgctgtagtatggctcgacgcgagaatcgaggaagaaaaggtaatgcttgacaaattcctgtgcgagcttaaagcgggcgagagcattatcctcggttggtggcctgaagaacgttcgggtatcggctcgggcactcgctacggtgtgtcaacgattccgtctgacttctacgaaaacagcacggttcacgcatccctcagtcatgtaatgcatattccgcccgttccgaagaagccggagcttgaaaacaagatttacctctccttcttcatgagcgacggagacaacgtgcagtactgccagcatcagatgagcgttctgtggggaaataagtcgagagggcaggttccgcttaactggactgtcagccccggacttgccgatatcggtcccggacttctcaactactactttgacacagctacgacaaatgactgcttctcctcaggtccttccggtctcggatacgctcttatttacgatgaacacaacaaagttctgaacctcaccgacgaggacaagaccgacgcgtacacaaaattctcgaaccagtacctcacaaagaacggtatgcgcgttattaccgtgtgggatcagctccgcgaaatgcactataagtattacgaaaagaactgccgcgcgctctacggtgtaacactcgaggactggttccagaatccgaagccgcttgagcttcatgttgagaaccaccgcctgccgtttatgccgaaccgtcccgcatacgccgaaaacacggacgatatgtataagatgcttgaaaagactatccgcgattatgacggaaagaagccgctgttccttgccgcgcagggtgtgacatggtcgctctcccccgagaacattgaaaagcttgccgagagatttgataagctgcagcccggaaagatagaggtgcttcgcgcagaccatttcttcacattgctgaacgaggcaaacggagatcccttcaacctcgcactctcaaagaaggtttcggtaaaggtgaacgacaagacaagcgcggacgtgatattcagcggaagcacatacggcgataatatttggacagcagactccgcaggaagccgcacgtttgacatctacctcggcggaacatacaggatttcacgctatgtactgaagcatgcgggagtaaacgaagaaaactccgacaaaaacaaccgcgacttcaccgtttccgcaagcactgacggcgagaactggactgtgcttgacgaaagacacgactgccgcgatgatattacagatgtagatgtgtcgaaaaccgccgcgaagtacgtcagacttaccgtaagcaagggcggagatgacggagtagttcgcatagcggatatggagctttacggagagatataacagcgatacaataactgaaaaaaaacctcttacgacagttttatgccataagaggttttttgttatgtattatcgaccaattttctcagctttgcgacggcacggtacgctttcgcatagtattcttccgccgtgagatcgtcgtagaaattgctgtttctctgcaaaatctcgagcatgagcgtgccggtgtagcctgaatttcgtatctgctctgccacatgatggaagtttatcaagccgtcgaacggtatcatgtgcaagtctccgttgtattcgcataggttgtcgtggaggtgcagtgcgatgagcttgtctccgaacaggggcatatactcccttcctctcacaaaacaagcctcgtgacccgtgtcccagcagaatccgacctgcggcaggtgtccgtactcttcaaaagcaaaggcaatgttcgcgagcttgcgctgattctcaaacgctatcttcactccgacttctcccgcgtgctctaccagacgggtgaatctttcatgcccgatatcgttgacacacggagcgtcgtctcctgcactgagatgcactatcatcacgggaactccgtagtgcgcgcatgagtcaaggcagtccgtgagagttttcagcatgacctcgccgcactctcccgctctccacatatcgttgatgtttttgaagggggagtgaatggtgtcgtaaacaagccccgcgtttgctatggtttcggcaagtcgacccgcgtattcatcggtggtgtaacccgagaaaacacagtcgaatccggcatcttttatgtacggaattgactcaatcgggtcgagtcccttgtaatttccgcagtttattccgagttttctcatattgttactctataacttcgcagtcgccgagaatttccggcttgtacttcatcgaatccgcttccgttatctcgcgaatcacacgacacggattgcctgccgcaaatgaatgtgcagggatggaatgagtgacgacacttcccgcgccaattacacagccttctcctatggtaacgcccggaaggattgtcacgttcgcgcatatccagcagttgtctccgatgtgtactggcagggcatagcaaagtctgcgggcttctccgtcggggcatttcagcttaagtctttcctcgggtagcatcgggtgtacgggcgtgagaattgttacgttcggtccgaagtcgcagtgctcgcctatcacaacctctccgtcgtcctgacaggtgaagttgaagtttacgaatgtgcattttccgaccttggtgttcactccgtagtggaatgtaacaggtccttggaacgtgacgttttcgttcagctcaccgagaatctcacgaagaacctcgcgtcttgcttccgggtcatattcgtcaagggagttgtacttctggttcagcttgtgcgtcttcttcttccgctcaactctccattcctctgcgggagaaaaaagtattccttttccgttgtttaacatgattggctcctttcggttgttcatattacaatatttcacagctgattgtagcacaacggacgagctaatgcaagtatttttgttgattttgtaccgcaccgtctccgaaaacgtagagataatagtcctcgagcgtcggagttacggtttttgctctttcgtcaggcttatcatccgacagtacgcgcagtattacatcccctgcttcatcgtcgcgggcaatgttcgtcacacggaatctctcctgcatcagctgaacatccgcctcggagcagtacacgttccacacctttccgtcgattttacttgtaagctcatgcgggggagcgctgtcgacaattactccctttttcagcataataatatcacgtgcgatgaactcaacatcggacacaacgtgcgtggctatgataacgattttgtcaaacgcgattttggagatgtagttccgtatcgcgatacgctgcttcgggtcaagtcctgccgtaggttcgtcgagtatcagtatctccggtgagccgagcacagcctgagcaagggcaagacgctgcttcattccgccggagagtgcgccgattttcctctttgttacgtcgtcaagctctaccgaggtgagaatttccttgatttcagcctttgccgtcttccgtgaaagccccttcagctcagccatgtaccacatgaaccgctctaccgagaaattcctgtaaagtccgggatactgcggcatgaatcctatcttctcgcggaatctcacacccatgtcgcgcacattctcccgcttgccgtcgctttcgtagaagatttctcccgagtccgcgtcaagattgtcggtcagtatgttcatgagcgtggattttcccgagccgttcggtccgagaagcgcgtatattcccgcctcaagctccgctgaaaacatatcgagagccttgttgcttccgtatgattttgttactttgtcaatagtcagtttcattattttctcacccactttctgtatgaaaggacagtcagcatcaacgcggaaatcaggcataaaatccgtgacaagaggtcgccgacagcgttctgcggagtcagcatatcacagtagtcaaggatattcgcgccgacaactccgagtatacgaacaaaatgcggcactccaatgagcaggaacgaacacacgacggcgctgagctgttttccgcagatggttgaaaaggcggcggtaacgatggaggtcagcagatacccgagcaggctgacagcttcgtatgcggcaaggtattcacccacggtcatgctgtttttgatttcgttgaaccgcggcatgctttgaatcggagcgtcaaggaagccgatgtcgtatgaacgcgtcagaattataaatgcggttccgtggagcaggataaagagcaccgcgccgagggtcagtgtgtacagtagctttgtgcgccacattacctttctgccgtttttcgacacgcgcattatcgacgcaaatcccgactcatactcaagagaaaaagcgcacgagaacacaaggattatcgcaaacagcgcggataggtcggacgtaacgccgaaatatcggtcaagtccttcgtcatatacaaactgcacatcgggatagtccgcctcaaccgaacgaaggtaatccatgcgctgaacgagctttttgcacgcgttttcgcagaagtttgcatagtagtatcgctttttgtagccttcaaactcatctgccgtaattttttcaaggcgatagtcggtctgtgcggcgtcatattcggcaatggagcggttgatgtagtcctgctcctcttttatatagtcgtatttttccgccgacactacgccctctactgctccgatgtacttcatgtactgcttttccgtggagctttttgacggggagaaaatcacagcggatatgcaggttttcagcaaaatcgcagctaagatgacgatgaaataccgtccgcagattatatgtttgtagaattccgtgcggtacagcggctgaggatgagctttttcgagggagtcggcttcgattttcgcttttctgtaaacccgcaccttacggctctcacgtccgacggagatgaagcagattatcaccgcaagaactgtagccgagactattgtgactatcgtgtagttcaggcagatgcggaagaagttgattccgcggtatctctcgaagagaatattcacattcgcgagagcaccggggctgaatttcgtaaggctgtagagcgcggagctttggttaattcccgatgtgagcgcacctattacagctatggcggcgcatatcacgagagcggggcggtagttgtcgaaaaactgagctgaaaccgcgccaatcaggctgaatattccgaagaacagcacccgaagagcaaggtaggcgcaaaggtattcccctatggtgagactgtacgggcagagcacaagagcatccaccgactgcacaggctcggagagggaagacagtccgcacgagagcgaaaacactatgagcggagttagagtgaacacaagggttatcgcagcggaagccagagcaacaaacgagagctttgcacgccgcagaggttttccgccgtattttgccgtgcgctgaatcccgctcattcccgcgtcggagtcacaggtgaaggctgtacacagtgttgacgctaccgctatggcaatgagtacagtcgtgatgtcctgcgagaagaattcgttccagccgcgaaccatgtcagagcttagcttttcttcggtcagtggagtgtagaagcggcaaagctcgacatagtagctgtagaaatagctgtcctcgtcagtctcgcgcagtcttgtcaccgcgtcacggagcagaagacgcagcttgttttcgtagcttttctgccttgacacggcttcattcacgtccgaaaacagcgacatatctccgtatccgtcatagttcgagtattcgttttcaaaaatcgggaagcgcaaatcgaatgagcgcatttcatcgttgtatttttcgacttttttcgtgtgcgcggcataaatctcggcgtatttttccggctcgttttggctgagcgaaatcatctcgtcctgcagctttattatgccgcgattgtccgaggtgaagtacgaccgatactccgccgcggtaagaacaatattcaaaacaaggagaaaagtcaaaaatatcagattgaagcgcgtgcagtatttgcttatttcataccgcagaagccgcataatccccctcctttagttatgcattaatacaaattaatccacttgagcgtgttttcttttacgttcactctcgctatcgagccggtgtagtaggtcgacatatcgtccccgcttccgcgcaccttgtagtattgcaggtagaggttatccccgactacacaatacgccgcgccgagagagcttgaagaagagaacagaatctctccgtggttgtcgaagaacagttctccc

SEQ ID NO: 2301 - DNA, 20346 bp, Unknown
  16S sequences of unknown bacteria
cgccgcgaaaacggcagccgtactctttacgacttccgctccgaacagagcgcggaacttaaatcgcgcatttcgtccgttgaaaacaaaattgcttctttcggcgcgaacaccgacgcaaaaacgctcagatcggcgcttgcggaatactattctttgcccgagacagagcgttcctatgtctattcttacagatatctttcgtcgcttgcgaaagcaaagaatatcgacgttgaaaagatcgccgcagagacgtccgttgtcgaaagccccgaaaaagacgaacccgacgcgccgctgctttattttacggcgtccgaccgtgcagcggttgacgcgcttcccgaaaaactttcgaccgaacaatatgtcaccgtcacaacgctgttgtcaaaactcgaacgcagcgaagattttgacggcaaggacttatatcttgaaaaactgacgcgcgcaaaagctgaaatagcggcagttcaggctgaaatagacgcgctgaacgccgagataaaagaaaaactgtacccgtttgagaaaacgtcgcttgcggataaaaagaccgttgacgatatagtcgaacgctacaacgcgcttgccgattatgacaaactcaaaatagaacgttgggaagacgtgataaaaacaaaaacgcgaatagacaatctgctccgtgcgcttgtcatagccgccgcagccgttgttcttatcgccgcgcttgccgtattcgtggtgcttcacgtccgcaaacgcaggctgaaaaaacgccgtgaaatggacgaactccgcgccgaatacaaaaacgaggattcggactgaccgaacttgtgccgaatatattcaatctaaactcacatttgcacagacaataaaatccatatcggcacagccgaaaacaaggaaaggggagaggtaaaacgaaaaaggacataatcgccgtattcgcgcttatattgcttgtcgcgcttgttatcaaaggcacgaacattcagtccgtggacgagtattatctgacgcatatcgacgacatcagacccgattccgagaccgtgacgataagcattcgctgcgacacggtgctttcaaatctcgacgacctcgaccctgccttaaaacagggggattatattccctcggacggagtgatactgcccccgacggagtacgttctgcgctccggcgacaccgtctttgacattcttgaccgcgccgtgcgatataacaagattcagatggagtatcagggctcggacgaaaacagttacggcagcgtttacataaggggcataaattatctttacgagttctcctgcggcccgctttcgggctggatgtaccgcgtggacggcgaatacccgaatttcggctgttcgaaatacgaactcaaagacggtcagaacatagaatggatatacacctgcgacctcggcgaagacgtcgggtgcgaatgggtgggagaggagaccgcaaaatgaaagcattcggctcatataacccgctaacgctgtttttatactttctttcggtcattctcatctctgcgtttttgcagaatcccgtgctgaccgtttccgcgctttgcggcgcaatactcttttctgccgctctttcccgccgccgcgaacggctttccgacattgctttttatatcccgctgtttttgcttgtcacggtcacaaatccgctgttttcgcataacggtcagacccctcttttcttccttaacggcaacgcggtcacgctcgaagcgcttttttacggtgtcggacttgccgtcgcagtctgcggcgttatgctctggtgtaaatgcttcggcaaaattatgaccgctgacaaaacgctttaccttttcggcaaaacgctcccgaaaatatctgtcgttatttcctgcgccatgcgctttattccgcttttcaaacgccgtctcaaaaaagtcagccgtgcccaaaaggcgatggggctttattcttcaaaaggcattgttgaccgtgttcgcggcgcttgccgcgtctttgtttcaatgattgcgtggtctctcgaaagttctatgcagaccgctatgtcaatgaaagcgcggggcagcggactttcgggcagaacccgtttttcgttgtttcgtttttatccgcgtgacggtgttttgcttgcggcaacggtatgccttgtcgggctttccgtcgtcggctcggcgctcggtgcggtcgatttctactattatcccaaagtctcgcaaattccgctttcgccgctttccgtcgccgtttacatcgctttcgcggcgctttcgcttatcccgttcgcagttgaaattaaggaggcaatcgtatggaaatactcagtatcgaaaatctgactttcacataccccaaaaccgaaactcccgccgtcgaaaacgtcagtttgcaagtgggtgagggcgactttgttttgctctgcggcgcgtcgggttgcggcaagaccacgcttctcaaactgcttaaacgcgaacttacgccgagcggggaacaatgcggcaacgtaaaattctgcggcaagccgctttcttctctgtccgaccgcgaagccgcctccgatataggttttgttatgcaaaaccccgatgaacagatagttacggataaggtctggcacgaactcgcatacgggcttgaaaatctcggcgttccgtccgaaacgatacgcctgcgcgtcggcgagaccgcaagttggttcggcatctcggacagtttctgcaaatccacggacgaactctcgggcgggcaaaagcaacttttgaaccttgccgccgtgactgtgatgaacccgcgcattttactgcttgacgaaccgacgggacaacttgacccgatagccgcaacggaatttgtctcggtgctcaaaaaactcaaccgcgaactcgggcttaccgttataatcgccgaacaccgccttgaagatattttccccgttgccgacaaagtcgccgttatggaacacggaaaaattgttgtctgcgacgcgccccgtgccgtgggcaaacgtttggctgcgataaacaaaaatcatcccatgcttgcggcgcttccgtctgccgtccgcatttattcggcgcttgaaggtttttcggagacttgcccgctgaccgttcgcgagggcagggacttcctcgaaaaaaacttcgcgcccgctccgaatgctccgctgccgtccgatgaacccgattcgtccgctgcggaaaaagataaaacgccggcagttgaactcaaaaacgtgtggtttcgctatgaacgcgacctgcccgacgtgcttcgcgccacctgcctgaaagcatactcgggagagattttctgcctgctcggcggcaacggcgtcggcaagaccacaacgctgaacgtcatcgcgggacttaaccgcgcgtatcgcggaaaaactcttatcaacggcactccgatagccaaattcaagggcaattcgctttatcgcaaaaacatcgcgcttctgccgcaagacccgcagaccgtgtttgtccgcgatgaggttcaaaaagacctcgaagaacttgccgaagcgtgcggactgtcaaaacccgagcgcgaaaaacgtatttctgaaatttccgaaaaactcggaataacaccgtttctgaaaaaacatccgctcgacctttcgggcggcgaacagcaaaaatgcgcccttgccaaaacgcttttgtccgagccgaagatattgcttctggacgagcctacaaaagggcttgacgccttttcgaaagcgtccttggcgtctcttctgcaaacgctgaaaaatgacgggctttgcatttttattgttacccacgacgtcgaatttgccgccgaaaacgccgaccgctgcgctcttttctttgacggtgagatacttgcctgcgacactccgacccgctttttctccgaaaacaatttctacaccaccgccgccaaccgcatggcgcgccgtctttggaaaaacgctgtcacctgcaaaagcgttgtcgcaaaatgcagagcgcagaaaaagagcggagaataagtttataaattcaatgacggaaacaaccgtatataaaattctttgtatgccgtctttcactgcttgcgaaaggactttgttatgtctctcccgacagtaaacaaatcggaaaaactgaaaaaaacgctgaccctgcttattctctgcgtgctcgtgcccgccgtcgttcttatcggcgcgctcgtgttcggctcccgcagttacgcatggataagtctctgcgtcgtcgtgctttcgatagttccgttttttatgcgctttgaaaaaagcagtctcgatgtcaaacggcttgtcctcattgcagcccttgtcgcactttccgtcgtcggcagaatggcgttcgccgccgttcccggtttcaaacccgttgccgcgcttgtcataataaccgccgtccacttcggcggcgaagcggggtttatggtcggtgcgctctccgctcttctgtctaatttttacttcggacagggaccttggacaccgttccagatgttcagctggggtattgtcggacttatcgcggggcttttagcccccgtgctgaaaaaacatcttgtcgcgctttgcgcttacggcgcacttgcgggcggcttgtactctctgctcatggacgtatggtcaacgctctgggcggacggatatttcaacatcaggcgctatctcggctttgtcgtctcgtccgcgtcattcactctcgtctacgccgtctcaaatgtcatttttctgctcgtctgcgcttatcctctcggcaaagtccttgaacgcctgaaaaccaaattcgggatatgaactgaaagtcggaaactgacatccgaaccgcaaaaagaccgaaaatgcgaaaaaccacattccgagaaatttttcttatccaaaattccttatgcttcaacgataaaaaaatatagtcttttgcggaaatcaaacagtataaaaaaaaggggctgtaaaaaaaacgcaagttttttttacagctcctttggggataggaaaaaaggttcagaatgggtgaatcgaatccgaaggcgtacataggtacgtcgagaggtgagattcgcccatagcaaaaaaggcgtattaaaatcttattttatgaaaaaacacaaaaatcgttgtttcgagtcgctttgtttatcttatatattattgctctttttgtatttttcagccttttttgcggtctgggctttttttacagcccctttgcttttttatatacttttgcggtttgtaaccgcagaagtattgacaaagctgaaacaaaacggagcggcattgccgctccgttttgctttatgattgaaagttaaattgttttaatatcgggaaatgtgaaaccgaattttttcattgcctatttcgaaaacatcgccaaacgctttatcgtcgggtcggagatgaagttcgcaatgttgaaaagaatcagagtgtcggtcggggcgaattcatcaataagcgcggcaaggtcgtccgggtttttggagaaaaagcgcaggtcgagcatacaaatcttttcgtaatgcgttgtcagcaggggaacgaaactgtttgcgaaagagtctttaacaacaagcaggcgcttgccgtttttgacgcctgtttcgatgtccactctgccgtagttgccgccgaggaagacctgatacttgtctttcttttcaagcgcggacataacgtagaacgaatccgaagtcttcccgtcgtgcgttattttcaatgtttcggactgcttcggaatatagagttttacctcgtcctttgccgcaaacgggagcagaactttcgaatcgtgcgtgccctgaaactccgttgaaacggtttttatctcaaaatccgatttttcaagcggttcaagccctgccgtcttgcagaactcgcgatacgccgtatacgcgccgtcgcttgtccaatggtggtcggttctgtaatagagttgttcgtcggaagcaaagaacgcgtctctcacatccacgtttttgcccgccgtcacacccgcaaaaatgttgtttatctccgtttgctggtcaaactcgttcgcaaacgcgggcagtttgtcgcggtatatgagagaggctgacggaacaagcataaagtatttgtttccgtccaaattctcaaagaatttttcgacgccgagaacgtttgaagaaaccgttctttcgttaacttcttcgggcgtgcattttgtcatataataaccgtctttgcagacccatatcccgccgatatcgcgcctgttcaaaaggtaatccgcgcttgcgtttatcgccgtgaacgtgtcacgcataacaaaacggtcgttgatgtattcctccgttttttcgcagaaatcgccgtcctcgccgaaaagggaatccgccgtcagtttcgggaaagtcgcaagcattctgttttccgtttccgagaaatcgtcggggctgtatatcaggttcgctatcgccagcccgaacagaaaaacgacgaaaacaacggttgttattatatatccggtattctttttcacagcaacctcctaaaacctgaaatagaggaacggattgtatgaatccgaaaccagacttgcgaccgaaagaatgagcagcgctatacagaacacgtttttgacaacggtctgcaccgccaccgccttatcctcggacgggaatatttttttcatcagccttgcgggcaggttcgtcgccgcgggtatgagaataacgagcagtatcgcgtttgatataagcagatacagcgcgtttgaatcgtaaagcgacgtgttcacgccgaacatcgagccgagatagaccggtatctgcgtgaaatcctcaaccgcgaaaattatccagctgaaaataacgagcagcagcgtgtaaacgcttccgacgaaccacggcgctttttgcagccgcttgagcaggaaagttttttcaatgatgagaattattccgaagtaaagaccccagcagaggaagttccagcttgcgccgtgccaaaagcccgtcagcccccaaacgataagcaggttgagtatctgccgcgccgtgcccttgcggttgccgccgagcggaatgtagacatattcgcggaaccatgttccgagcgagatgtgccacctgcgccagaagtcggtcacgcttcgcgccatataaggatagttgaagttttccaaaaactcaaagccgagcattttgcccatgcctatcgccatatcggagtagcccgagaagtcgaaataaatctggaacataaacgcaaaagcgcccagccacgccgaaagcaccgtcgggttttccatgaccttgaccgtgtcccacagcgcgccgatattgtttgccagaagcacttttttgccaagacctatgcagaatctctgcaccccctgcgcaaacttttccgccgtgccgtctctgtattcaagctgctccgccacgtcctgataacgcacgatgggtcccgcgataagctgaggaaacatcgtgacgtaagccgcgaggttgatgatgtttttctgcaccttcgcgtcgttgcggtaaacgtctatcgtataggacatcgtctggaacgtgtagaacgaaatgcctatcggaagcgcaagtttcaaaaattgaatgtcaagtccgaatatgttgttgatattcgacaggaagaagttgaaatacttgaaaaatccgagtattccgaggttcaggataacggataccacaagcaccgcttttgccgcgccttgcttgccttttgtcctatttgagtggataagaagcgcgcagatataattgagcagtatcgtgaatatcattatcacgatatatttcggctcgccccacccgtaaaagaacaggctgaaaatcagaataaacaggttttcgattttgaaatgttttttctttgtctggaccgacattctgcgcttaaccgacggcggaatgaacacgtcgtaacggcagaacagcaacgccgcaggcaagaagaaaaacaggaacaggatgctgctgaaagtcataaagagagtatcctttttcggtgatatggttatgttgaaaatgcccgcattcagagcattttttatgctttgacagagtgcttttttcagcccgcaaaagattatgatgtcgtcttatattgcggaaaaatatttctttgggcgatttatttcactatcgccgccgcaggagttgcgtccgtcgcaaccacaacaacaacatagttgccgttctgtgcgatcaccgcattgttcagttttgccgcttcttcgggtgcgtaactctcgtaaacgcccgccatatcggatatgtatgcctgcgcctgcgtaagcgttgtctttgccgtcgcttcatcgggtgcttcgaatattacaagctggtctgcggatgttccgggcgccgcattgtatgcaaggcacttaacgtttgtgtccgttatcgaatattcaacaagcgcgttttccgctttaagttccacaacttctttgtcaaaagtaactttttcaagaatggacgctttgacagccgccgcgtcgaacgcctgcgcctgttctgtcgttttctgctccgtgtcggaaccttttgtcgtgttgttcgtgtccgaacctttgcagcccgcaatcgcaagtacagtcagcgccgcaagcaccgtaacaagaatctttttcatttgtgaattcctccgtaatattgtgaatgtaatattatttgatgtgatgtaaaacttcggtcgggtatatttccccgaagtttaattacccgtatgcgttctgaggtaatacagccaaattctgcacagcgaaccgccgaaatgcaatccgtcctttgccgcttcgtccgagggaagcgttccgctcgacgttttcatgttctccgaaaccgcgaggaagtaaacgccctcctcctgtgccaactgcataagcgcctgattgtattcgtttattctcgggttgttgaacacatccgagttcgcggattttgtcgccgttacgggcaaaatatcttcaacgtaaatttttgccgatgggtttatggacttgatgtcgcgaatgacctctctgtatttgctgataaaactcgatttggaatagccgcactcgttcattccgaacgctatgtaaactttcgaaaacgagaccttgcgcagcgcctgcgaagttgtacaagccacgccgtcaaccgttgtgaccgcttttgaatcatagccgaatattgtcagcgatacttttgtataatcttttgcggtagtggagttcgtcagtcccgtgtatgccacaagcccgaccgaacgggagtctcccatgaataccgcatcgtcgaaccacgaaagcgagaccgccgatgatttcggggtaaagtacgaatatgtgttgggtacataatatctgttcaggtcttcggaagaactgtttccgcccgaattaccgcccgaaaccgaagtctcgataagcggattttttgtcgtctgctgtgtttcggcagaggtctgctccgtgctttgagccgtgttctcgctctgcgacgtattttccgtcgtgttatcgggcgtgggttcgcccgaaggctctgtcgcgctcatgtccgaaccgctcggctgtgtctgcgcgttaggtgtggtctccgtcggagcggggtcttttccgccgttgcacgccgcaagaaaagcgaccgtcagcgtcaatgtcagcaatgccgcaagtattcttttcataccgtttgcctctctttttcttttactgtgcaaaaaaatcttctatctcttttcttgaacagcccacgctgccctgtatcatatcgtctttgccgccgccgcgtcccgaaagagtctcgttcatcttttttgaaaactctctcattccgccgtttttcgatgccgcaacaaacttgtatcccgtgccgtcgccgcccgaaaacgccgcgcacacgccgctgcatttttccatggcttcgtttaccgtcagccgcagtatatccgcgtccgcgccgtcaataaagaacagcagatttccgtccgtcggttcggcactctgcgcccgcaaagtcgctatctgttttgaaagttcggcgtttttcgcttttacttcacgcagctcttccgcaagcctttcgaccgctttcgctgcctcgctctgttttgcggagagtgacgccgagatttttttcacgttcgcatatttgtcgttgtaatcgtccagcgccgcgaagccgcattttgcgtgaatgcgaacgccgcctttccaacgcactctgtcaagcagttttatctgccctatctgtcccgttgaacggacgtgcggcgcacagcacgcgcaaacgtcgtatccctgtatcgtgacaattcttattgcgtccgtcaattctttttttgagcggaattccatgtcttccagctcttccggtgacggaaagtccgtctccacggcgatgtcttttgccaccgcttcgtttgccatgcgttcaatccgcagcaactcttcctccgtcggctctttgtcaaaatcaagcgtcatgtcctcgtctccgaggtgaaaaccgacattcgtcagcccgtattcgcgccacgcaagccccgaaacgatatgctcgcccgtatggtgctgcattttgcggaaacgctctttcgcgtccacttcgcaaaggacttccgcaccgagcggcaggggagatgtaatgaaatgcactatctttccgtctacggtttttgtgtcggaaacttcgatgccgtttattgttccgcggtcgcccgcctgtcctccgccctcgggaaagaacgccgttctgtcaagcacaacaccgttctcggtgacttccgtcaccgttgcgttgaactcaaacaaaaacgggtcgtcgtaataaagtttttcggtcatatatgcgcgtcccgtaaaatataatattctttgtacattataccatataaagtattttttgtaaagagcaaatacaaaatatcggcaaactttcatttttggcaaacggaaattcgggacgtttcgacgttctctttcgtttttccccaaaaagcaatatttttcgattgaattatgcaaactttttctgaactttaatcgtgagggtttttacgaacacctttttttgaactcgctttttgacccgttcggtcgttttgcacaactgtaagagcaactgcttggtaaagccgttgctaaccgtgctgatacatgtgttatttgtgtgattatgtcacaattctgccgaaaatgatttttcgaacaaaaaagagcacctcaaaaaatgtcggtgattgcaagcggtttcataccaaaatggtatgtgttaaactttttgtgatttttgtcaaaaatgtaacgaacggtcttgcaaaacccgacaatatatgataagatatatgcgttatgcttaatgttacataacatacggcaaaaatgcttgctcaggcttgcgtgattgcctttaaacattgaaaaacaagtcggtcaaaccgcaaattttacaaggaggggcttatggctcatttgaatgaaaacgccgttaaacacataacggagatctgcgacagacacgcgggagaaaaaactccgctcatcatgattctgaacgatatccagaacgaatacggttacattcctctcgaagttcagcagatagtttccgacaaaacgggaatttccgttgccgaaatttacggcgtcgttactttctattccttcttctcccttgttccgaacggcaaatacgttatcggcgtatgtctcggaaccgcttgctacgtcaaaggcgcacagcaggttatagacaaattctccgaaattctcggcatcggcgcgggacagaccacagaagacggtcttttcacaatagacgctctccgctgcatcggtgcctgcggtatcgctccggctgttaccattaacggaaaagtttatccgaaagttaccgtggatatggttcccggcattgtcgaggaatatcgcgccgcggctcaataataagttataaagaaaaagaatgcgcgtcgggtctctccgcgccgaaaggtcagaaaaatgaagataagcgatataaaaactttgcttgatgccgaagtgctttgcggtgaggaactgctgaacaccgaggttttttccgcttgttgcagcgatatgatgagcgacgtcctcgcatacgtcaaagatcagggagtgcttctgacgggacttgtcaatccgcaggtcgtcagaaccgccgaaatgatggacatggtctgcgtcgtgttcgtccgcaacaagagaccttccttggagatgatagaacttgccgccgacagcggtatagttcttcttgcgaccaagcgccgcgctttcgaggcaagcggacttctgtattcttccggattggggaaaaagtgatatggcagacgtgactttccatttcgacgttgacggcgcggacttttcgtccgcgggcgaagcgtccgtcaaggtcaagaaaaaactgcgccaactcggtgtttctcccgacgttatcagaaaagtttcgatagcgatgtatgagggtgagataaacatggtcatccatgccgagggcggcgttgccgacgtcacggttaccgataaagaagtcgtgatagttcttgccgacaaaggtccgggcattcccgatgtcgctcttgcgatgaaagagggctactcgaccgcccgcgacaatatccgcgctctcggattcggcgcgggaatgggacttccgaatatgaagaagtacaccgattcgatgaaaatagacaccgaagtcggcgtcggcacgaccataaccatgaaggtcaatctctgattgcaatatcgggtctcaacacaagtaatgaaccttgcggaacaacggcgttccgaaacagaaaaatatgcgtgaacctttttatctttccgaaagggcgtgagcatcgatgcaggattacaaacattccgtttctctcgacgagtcaaagtgcgtcggttgtaccacctgtctgaaacgttgcccgaccgaagcgataagaatacgggacggaaaagcgagcatacgctcttccaagtgcatagactgcggcgagtgcatcaaggtgtgcccgcacaaggcaaagcgcgccgtgcacgacaaacttgaccgaatgaaagagttcaaggtgacggtggcattgcccgcacccgcgctttacggtcagtttgacggcatttcaagcgccgactatataatagaaggcttgcacgccgtcggattcgaccatgttttcgaagttgcctgcgccgcggaaatggtctccgcgtacacgcggatgtatctgaaccgcaaggatatagtcaaacccgtgataagttccgcgtgtcccgtaataacaagaatgatatgcatgaactatccgtatcttgcggaaaatatcatgcctctgcttcctcctatcgagatcgcggcaaagatagcccgcgaccgtgccgcggaacttcaccccgacgtgaagccctccgagataggcatatttttcatatctccctgcaccgccaaagtcagttacgtcaaaaacggctttgcgggggacaaaaacaacatcgactgcgtcgtttccgttcgggacacttattttaagttgcttgacgcaatgaaaagcggcgaatatcccgcgcatacttccgaggcgggaatgataggcataggttgggcaacgaccggcggcgaaagttcggcggcgttcaacgacagttaccttgccgcggacggcatcgaaaactgtgttcgagtgcttgaccagattgagaataaggatataacgggacttgattttatcgaactcaacgcttgcagcggaggctgtgtgggcggtgcgatgaccgttgccaatccttatattgcccaagcccgtttgcagtcgataaaacgctatctgcccgtcagcccgaacaggccgaatgacgatgacattcccgaatactgctttacggacaaatccgttttttacggctcggaaatgcgtctttcggaagaccgaaacgaggctatgcgcatgatgagcgatattgagaatatcacagccaacctgcccggtatcgattgcggctcctgcggcgctcccacctgccttgcgtttgcggaggatgtcgtgaaaaaggagaccgagatagacgaatgcaccgtaataatgcgcgaactgttccaccaatgtctgagcatgcggcaggcaaacgagctgacaaagaaatttatcgcaaacaaaaaggctcatataaataaggaggatgaagacgatgaaacttgacactcttgtttcttctctttctctttcctgcgtcgtcggagatatgccgtccgatttcaacggcgtttatgccggggattttttgagccgcgcgatgagccgcgtcgaggcggataatctttggataaccattatgaccaacgtcaatgtcattgcggtcgcaagcctgacggacgcaaaagccgttgtgcttgccgaaaacgtcgaacttgctcccaacgccaaagccgccgcagaagaaaaggggataaccgttctttcgtccccgctttccgtttatgagatatgcggcattttatacgccgcggatctttccgaaaaaggttgaaaacgccatgcgcgatttcaaatatgactttcacgttcattcctgcctttctccctgcgccgaaaacgatatgacgcccgccaatattgcgggacttgcgtctttgctcggtttggagatagttgcgctgaccgaccataacacgtccgcgaactgccccgcgttttttgcggctgcaaaacgtccccgtatcgtccccgtcggcggcatggaacttacgacagccgaagatattcacgtcatctgtctttttgacacgcttgacggcgcgatggcttttgacaaagcggttgccgctcatcggataagaatagcgaaccgccccgaaatattcggcgaccaacttgttatggacgcggatgataatattataagtacggaacccgacctgctgataaatgcgaccgaccttgatctgtatgcggcgcacgcgctctgcacggaatacggcggcgtttgccaccccgctcacatagacaggcagtcgaacggtatcgtagccgttctcggtgattttcccgaagaaccgcgcttttcgtcatttgaactgaacgacggcgcagcgtttgacgaatatatacggcggttcccgaacctgaaaaacaaaaatttcgtcgtctgctcggacgcgcacaggcttgaagccctttcggacggttcaaactcgatatctttgcccgaacctcccgaagacggcacttccgtttccgcctttttgcggaaagcgcttatcgaaaaactccgaaattgacgaacggagaaaagctatggatgatttttccctttacgttcttgatataacgatgaattccgtccgcgcgggcgcgacagagatagaaatttcgctcaccgaagacgaaaacggtatgctgacattcaccgtcacggacaacggctgcggaatgagccgcgaacaggtcgaaaaactttccgacccgttttttacgacaagaaagacccgttccgtgggtcttggcgttccgtttctcaaaatgcttgcggttcagacgggcggcgacgtgaagataacttcgcgctccgaaaaagagttccctcaagaccacggcacgacccttacggcaacgttcggactacatcacattgattttattccgctcggagacctgaccgaaacggtcgtaagtctgatacagggcaatcccgacatagatttcacttttacgcacacaactcctcgcggacaagtccgcgtctgctgcgccgaactccgcaccgttctcggcgacgttccgctctcggaatatgaagtcctcgattggattcgcggctcgatgaacgaggaatatgcggcgatgaaaaggtaggcgataagagttccgttttgtaaagtcaaagcgttataacttttataatccctaaaattgagagaaaaaaataataatatatatccaccaagaaaggaattcaagttatgaaatctcttctcgtaaaatgagcgagagcgcattttacgaacagccatgtgcgtgttgcgaagcaacagtttcgcacggcgtataaaaatcggcttttaccgtttattcggcgcagcgcgacgatataaacattcgcgaagcgaaaagaaaaaggctgtgcggctgacggcgagttccgttttgtaaagtcaaagcgttataacttttatacttcttaaaattgagagaaaaaaataataatatataccatcagaaaggattttcattatgaaatctcttgaagaacttatggcaatcaaacagaagatgcaggacaaagtcgcagtccgcaacgcggaaaacgacaatgttcgcgtcgttgtcggtatggcgacctgcggcatcgcggcgggcgcgcgccccgttctgaacgcttttgtggaaggcgtaaacgaagcgggtcttgcaacgaaagtttccgtaactcaaacgggctgcatcggactttgccaatacgagcctatcgttgaaatttacgaaaaggacaaggacaaggtcacctacatcaagatgacggcggaaaaggcgaaagaagtcgttgagaaacatctcaagggcggcaaagttatttccgaatacacgataggcaccacgtctttataattaacaggaggaaaaaacgctatgtttcgaattcacgcacttatatgcggcggtaccggctgtacctcttcgggcagcgccgagatccaggaagcgctccacagggaaatagccgcacaaggtcttgaagacgagatcaaggtcgtgcagaccggatgtttcggtctttgcgctctcggtccgataatgataatttaccccgagggagtattttacagcaaggtaacggcggacgacgttcccgaaatcgttgaggaacacttcctcaaaggacgtcccgttgaacgccttatatacaaggaagaggagaacgagaccgaggaacagattctcaactcgtccctttccaacacgcagttctacaaaaagcagttgcgtgtcgcgctgcgtaactgcggcgttatcaaccccgaaaacatcgacgaatatatcgcgatggacggttatttcgcgcttgcgaaggttctcaaagagatgactcccgaggacgttataaagactatacttgattccggtcttcgcggcagaggcggcggcggattcccgaccggcagaaaatggcagtttgcccgcaacagcgtttccgataaaaaatacgttgtatgtaacgcggacgagggcgaccccggcgcgttcatggacagatccgttcttgaaggcgacccgcacgcggttctcgaagccatggctattgcaggttacgcgataggcgctgacgagggttggatatacattcgtgcggaatatcccatcgcggtcgcacgtcttaaaatcgcaatcaaacaggcaagagagtacggcgttctcggcaacgacatcttcggcacgggctttaatttcgatattcatatccgtctcggcgcaggcgcgttcgtctgcggtgaggaaaccgctcttctgacctccatcgagggtaacagaggtatgccgcgctcccgtccgccgttccccgcaataaaaggtctgtggggcaagccgaccataatcaataacgttgaaacctacgccaacatcgcgcagataatcctcaaaggtcccgaatggttcgcttccatgggaaccgagaaatccaagggtaccaaggtattcgcgcttggcggcaaaatacataacaccggtcttgttgagatcccgatgggcacaactcttcgcgaaatcgttgaagatatcggcggcggcgttccgaacggcaaaaagttcaaggcggcgcagaccggcggtccttccggcggatgtattcccgcatctcttatagataccccgatagactatgacaacctcaccgcgataggctccatgatgggctcgggcggacttatagttatggacgaggacacctgcatggtggaccttgcgaaattcttcctcgagtttaccgttgatgaaagctgcggaaaatgttctccgtgccgtatcggaacaagaagaatgcttgaaattcttacaaggatcaccgagggcaacggaacgctggaagatctcgacgaacttgaagagatcgccgcgacgcttaaaaccaactctctctgcgcgctcggtcagaccgccgcaaacccggttctttccaccatcaagcatttcagagacgaatatctcgcgcacatcgtggacaagaaatgtcccgcgggcgtctgcaaaaaacttatgcactacaccgttatcaaggataagtgcttcggttgcggaatgtgtatgcgtgcctgcccgacaaacgctatctcgaagaccgattacaccgcgcccggcaagaaactgcccgccgttgaaatagactccaagaagtgtatcaagtgcggcgcttgtatcgcaacctgtaagttcaaggcaatcgttaaggaataatttgggaggactgaaataatggctaagataaatattaaaatcgaaggagtcccctacgaagtcgaagagggacttaccgtcctcgaagcggcaagagtatgcggctacgagataccctccctctgcgctttcaaccacggcgaatgctctcagggttcctgccgcgtgtgcctcgttgaagccaccggcgcaagaggcctcatcgcttcctgcgtttaccccgttgcggagggtatggagataagaatttccactccgaaagcggcggcggcaagaagagcttccgttgaactccttctttccaatcataacgtaaactgccagcagtgcggcaaaaacggtcagtgcgaacttctccacgtcgctcagcttgtcggcgcgagagagggcagattcgcaggcgcgaaaactcccgcgaccgttgacagactttctccgtccataatgcgcgacacttccaagtgcattctttgcggcagatgtatcgaacgctgcaaaaacgctcacggtctcggtattctcggctttgaaaacagaggcttcaaaaccatcgtaggacctgcggaaaaccgttcgtttgcggacagcccgtgcattctttgcggtcagtgcgtttccgtatgtccgacaggcgcattgatggaagtttccgaaatagacaaggttgacgcggctatggctgcgggcaaatatgttgttgttcagaccgctcccgcggttcgcgcggcaataggcgaagagttcggtatgaaaatcggaactcccgcaacaggcaaaatgtttgcggctctccgccgtctcggcttcaacaaagtttacgacaccaacttcggcgccgacctcaccattatggaagagggaaccgagcttctcggcagacttaaatcgggcgaacatcttccgatgataacctcctgctctcccggttggataaactttgcggaatacaattacggcgatcttctcgatcacctttcttcctgcaaatccccgcaccagatgcagggcgcgataatcaagtcctatttcgcagagaaaaacggacttgacccgaaagacatctttgttgtttcaatcatgccatgtaccgcgaaaaaatacgaaaagacccgtcccgaaatggaagttgacggcattcgtgacgttgacgctgttctgaccaccagagaactcgcaaaactcatcaagcgttccggtattgatttcagaaagcttcccgacgaagaacccgacaacgacattatgggtgagtattcgggcgcgggcgtcatcttcggcgttaccggcggcgttatggaagcggctctcagaaccgtttaccacgttttgacgggcgacgagtacggcaagatagagttcaccgaggtcagaggtttcgacggaatcaaagaggcgtcgctggaaatcaacggcacccacatcaacgttgcggtcgctcacggtatgaagaatgcgagagttcttcttgacgagatccgcgcaggcaagtccaagtatcagttcatcgaggttatgggctgccccggcggttgtatcgcgggcggcggtcagccgtttgtaaaaccctgtttcctgcccgacgaggacatcgatattctcgacacctacaaggaaaaaagagccaacgccctttattccgaggatgagagacagactgtcagacagtcccacaacaacacgcaggttcagcagctttacagggacttcctcggcgagcccaattctcacaaggcgcacgaactccttcacacgcactatgcggcgcgcgtcggattcaatgacgtcaaaaagaaataacgggcatcatcttatatcttatatctgtttgacaatataagcggaacggggcggtaaaaccgccccgttcctgctgtt

SEQ ID NO: 2302 - DNA, 2598 bp, Unknown
  16S sequences of unknown bacteria
cgacgagattgaggtttcgtcgtgggggtgcgagagccgcggggtcagcttcaaccggtgctatcagatacggcgcggtcacgagatcatggcggaggcgtcctcggtctgggggctcgtggggattgaggatcataagctgtaccgcatcgaggatataaagctcgggttcggaaccgacgagccgcttgagctcgacgcgccgaagagggttcatatcccgcgggagctgaatctggctctggtcggcgagaggactatcgtttacagtgaccttgactataacaatcatatgaataacacgaattatccggatatgctgtgtgattttgtgccggatatggtcggacggcgggtcgcttccctcgggatcagcttcgcgcatgaggcgagactcggcgaggtgctgaaggtgtatatgaccgagagcgagggtatgtactatttccgcacggtgcggagcgatggtcagatcaacgtcgaggctatcatgacgcttgagtgataagctcattgttgtgaggctgacaatgaactatcaataatgaattaaaaatgtcgcgcgtgagaacgggcgacatttttgtatggagatttgtaccggcgggaaatcgtgtcagagcgagttcattttccggtatttctgcggcgtcacgccgaacttttctttgaagcgccttgaaaagtagaactggtcgcagaaaccgtagcgttcgctgatgcgggagatctgcatatccgtctcgatcaggagctggcggcagccggacatgacttcggtgtcgatgtatgtgccgatcggcatcccgacttcctcggagaattttttcttcagtgtcgaacgggcggcgaagatggctttgcagatgtcgccggtcgtcatgttgatcgacaggttctcatggatgtatccgagggctcttgacacctcggaagagtagcggtgcgtcgtcagcttcacttccggcgcgccggagaggaggtttaacaggacgcgcatgagttccgatttcagtgagagtgagtcggagaggtcgggggagagatattttgagacgagttcgagcgtcttttccgcgggatattcgcattcgagcgggtatgggtattcggcgagaaagtcgtatccgctcgagttgacaaggcggatgttgaaatacaggaaatgtatgccggtttcgcagccattgtcgtagatgaggtcggacgggatgaggtaggcgtgtccggggcggaggtcggtgcgctttccgccgcttattatgtaggcgtcgccgccgaggatgaagtagagctttgagtagtgcggcgggatagagcgggtcttgtaccattcggtgccggcaatcagatagccgcttatcaggatttctaccgatatattgttgacggcgtcggcacagagttcgttggtttttaacagcatagccaaatctccatattttatgaacattattgcattgaataactgtctgcaatagtatataattgatatacgaggtccggttggagccggacagatgagagaatcatatttttatgaaaggcaggaaaacaagatgaaaagaatgaacaaggcgctcgcgtcgatgattatggcgggaacggtctgcgcggttatgatggcgggacctgtgtccgccggggttatgcaggacagcgctccggacgcttcgaagcttccggcgggaacgcttatctacagcgaggatttcgaggggaagagcgcggcggatactgataaggcgcttgagttgctcggatggaagaaggctgaggggctgagaaccttcactatgaagctttctgtcgcggacggtaagctgtatgtcgacaaccttgacgattcgagtgaggattcttacgcgcttatcatggacagcgattaccttaagaaggtctgcaatcaggattatacttatgagtatgacgtgacttaccgcgacgcggggaatacttcgaggtatgtgtcgctgctttgcaactatgacggggtcgacaattacaacacggtggatatgcgtatccgcggcgacggttacaaccagacgaggcacggggattcgtggattcattataatgatacgacctgcccgctgcgcgcgactgatgatacggctataatcactcagttgttcggggacgagttccaggaggacgggatgcttctcaaggatcgcaaggtgactgtgcgtgtcgaaacttcgatagagaagggaccgaccgtttatgtcaacggcgtcaaggcgtcggatatgcaggcgaaccaggatcagtggaatacgatagattcttacgcgatctgcttcaaggcgtcgaagctcattaaggctgagatagacaatatccgcatctggaccggaatgtctgagaagcctcttgaggtgaagacggttgacgcggcggctgatactccagcggcggcaacgtccgacgtgtcccttgcggtatccgtggctgcctttgcagtggcgtgcgcggctgtggctgtcctccgtaaaaagagtgtgtgaattcagaataatgcttctttcccccataatgtataaagtttgagggagagaggggggcgggggagagaggacccttttcaaaggg

SEQ ID NO: 2303 - DNA, 13416 bp, Unknown
  16S sequences of unknown bacteria
attatatctgaatataataatttgtcaatataattattaattttaaatactattttttgaaaatgaaacgaatgcggttgggtaaactatttctatagaggtgattttgtgaaaaaaatgaggacgtacggaacgggtattttaattggattgctgaatggtctgtttggtgctggaggaggtatcgtagcggtaacggcgtttgagaaaatgggaatgccagataaatcgtcgcacgccactgccgtagcggtaatgatctttttgtcagcagtcagcggatttttgtattggtataatggatatgtatcttttgctgatgttctcccttacctgccgggaggaattgcaggttctgttttcggcggttggttgctgccgaaaataccagatttctggctgaagaaagttttttctctttttattttgtatgctgctgttcgattatttttgaaataaggaggagggcattggcatattgcccttattttgatctatgaattggcttctttcctcgattattgcatttgcttctgctgccattgcatccatggggattggcggcggtgcggttctgctgttatttttgacagttttttctgatatcccactggctacggcacagggaatcaatcttctcttttttctgccaataggagcggtagcattgctgttccatcaaaagtcaggccttttgcagataaaaaaaggggttgtctgcgggctatggggcttgcctggcgtttttctcggtgtatgggttgcatctcggatggaatcttttgtcctttccaagctgtttgcaatttttctattttatcttgggcttaaaacattcttttctaagaatacaaaaaagccccggaagaaaagagatgctccttccgaggatactgtatgagaatgatgttgtattttgtttttggggaggatttatgtccgcaggattttgtccatgggttttcctttgaccaactcgtcgattagcttgtcgagataccgaatttcccgcatcaaaggttcctcgatattttcgattcgcactccacaaacagtaacttttattttatttcggttttcattcatctgcggagcgctttgaaaaaacgcctcgtagtgaacgttttgatctcattggagatccagttcctgttggctgtatccggtgagccagtgaatgatttcatctacctcatcttttgtgcggtctttacagacgcctttatggataaggagagggtagactttagagaagggcatttgatatccgttctctttctacatcattcatcgctccttgcagttcctatttttcgtccggatggttttgccgataggaaagatagctttccaaaataatagaggcagcaacctcatctaccatgtctttgcgtttttttcccctgacgttggtttcatttaggtactgatgggcggtgacggtggtgccgcgttcgtcccaaaggataacgggaacattgactttttcctgaagcttttgagcaaacaaagcgcatttttgcgcccgctcaccggcactgccgtccatattgaccggatgacctactacgattttgccgatttgatattcctgtgccgcataagcgacctgttcaattgttcggtcaaagtcgtattcgtggataacacccagaggagatgctaaaaattccgttcggtcacaggcggccagcccagtgcgggcatcaccgtaatccactgccatgattttcatattgatacctcctgttttacttttggctccagatgggacagatcatcataatagtctacccggatactgcctttatcataaattacccggcttactgctgtgttttgggagaggggaatttccccaatccgctctagagaaattcccagtgcatggcatagatagcagcgtagtgcgcatccgtgggaaaccactgcaatgatttttccgtcgttttgagcggcaatgcggtcaattgtgctgctcaggcgatggtgtacctgcacaatgctttcgccgttgggcgcacaaaaatgtgcttcgtcttcacaccagaggcgccactgatccggaaacagcacaggcaaatcggaaaaatgtttcatttcccattctccggcgaaaatttcacacaatccttcctctgtttggaccggtagatggtgatagtgattgacagcttcggccgtttgcattgctcgttgaagagggctggaataaatagcgtccaacggaatttcccgaaagcgttccgccagctgtggcaattgcgccatcccttctgatgacaatcctaagttagaacgtccttggaaaatccgttctgtatttccgacggattttgcgtgccggaccaaataaaccgtggtcattctcattttcctccgttccacgttcaaaaacttcttttgcactgcttcgggatcaatatgcgcaaaaaaacaagccgttccccgggaaaggggagcggctttcgaaaactatttcgtaccgaaaatcctgtcgccggcgtcgcccaagccgggaacgatgtacttatgctcattgagcttttcgtccaccgcgccgatataaatctgtacgtcaggatgagcttcctgcaaagcggcaagaccttcaggcgctgcaataatgcacataaagcgcacgcttttggcgcctttgtttttgatctgcgagatagcgtcgatggcggaacctccggtggctaacatcggatccagaacaataacatcccgttctccaatatcagaaggcagtttgcagtagtattccaccggcatatgagtttcaggatcgcggtacatgccgatgtgaccgatttttgcggcaggaaccatgcgcatcacaccgtccaccatgcccaatccagcccgcaaaattggaacaaaagccagctttctgccggaaataaccttggttttggctaccgccacaggagtctcaatctccacttccttcaagggaaggtcgcgggttgcctcatagcacatgagcatcccgatttcgcccaccagttcacgaaattccttggtgccggtgtttttatcccgcataatcgtcagtttgtgctgaatcagcggatgatccataatgaccggttttaacataattcatttctccatttccgccccaacggcatttttgataatacattcccaaaagccggaatcgtcctatttctcctccagcttcatcaactgttccacccgtcttgcatgacggccgccctcaaatggcgtattcaaaaagatgtccaccagttccagagcaagacccgggccaatggtgcgcccacccatgcagatgacgtttgcatcattgtgcagacgtgtatatttggcgctgaaataatctgagcatagcgctgcgcggattcccttgattttattggccgccatagaaataccaatgccggtgccacagcagaggatgcctttgtcgcacttgccgctgataattgctgcacaggttttttctgcaatcagcggatagtccacgctatctgtattgtaagtgccgaaatcctcgtaaggaatcttattttcgtccagatgttttttgatttcttctttcagcgcaaaaccgccgtgatcactgccgatagcaatcatctgttccattcctttctatcgcatcactaaatcaaatttttttctgtttttgcaaaagctcccgctgtgcttggggaagccgcaaatattgcggaaccagttgtgccggatccatgcccaatccccgacgcggcaatgccgccatgcacacagcagaagcccgctgaaaccggagatgctccggtgccagcagaactttgtcgctttcccaactattatagcataattgtgcgccgtctccaactaaaatcagcggcaaatcagaagaaatctcgcttaattgttcccacagctgttcgatggacagcgctgcatctccggtcagccgctgcacggactctctgcctaccaggaaagtagcagtatatacctgctggcagcgtgcgtccatggcagctaccgcaatacattcctgaccgatcagaaggtaggccagcgcctccagcgttgatacagaaacgcaacgtttatttgtgccgaacgccatcccttttatcgcagaaatgccaatgcgaagtccggtaaaagatccgggaccggtagaaacggcaaattcatctacctgcgaaatatcctttccgcaagcgcttagcaggttttgcgtcataggtaaaatcgtttgactgtgtgtgagctttacatttacaaagctttctccaatgatccgcccatcctcccacagcgcaactgaagccgcaacggcggaggtatccattcccagcaagatcaaaaccggcttcctccttccaccgtgattcggcgcttttcttcttccaaacgctcaaaggtcacccgaatggtattttcaggcaatgcccgctggatgttttcactccattcgatggccaagatcgcaccggtttccagataatcaaaaaatccggtagagtataagtcatcgaaagaagcaacccggtacatatcaaaatggtatagctttggtgtgctgcggtattcgtgcacaagagcaaaggtcgggctggaaacctcgtctgatgatcctaggccacgcgccaatccacggacgaaagtggtttttcccatacccagtccgccgaagaaagccagcacgtcattcccttttaatttaccagccagttcctgggcaaatttttctgtctccgccgcgctgtttgtgatgattgattgcataaataaacttcttccttgttagaataagcctttgatatgaccttggctgtcgacgtcgatctggcaggccgcaggggcttttggcagaccgggcattgtcataatatccccagacatgacaacgataaagccggctccggcagacagttttatatcccgtacattaacggtaaatccggtaggacggccaagcttagccgggtcgtcggataaagaatattgggttttggccacgcagatcggaaggtccgctttgccaagcgcttcaatgtctcggatggctttttccgctttaggcgcataagcaacatcttcaccgccgtaaatttcagtgacaatcgtcttaattttttctttgatcggcgctttttcatcatagagcagtcggaacgcagagggctgtgcgcaggccttgacgactttctgagctaggtcgattgcgccatcgccgcctttggcaaatacttcggacagggaatactccaccccgaggcgctgacagcattcggccagcactttaatttcctggtctgtatcagtcaaaaaccggttgatagctactaccaccggcacgccgtatttacgcatgttttccacgtgcgcttccaggtttaccagcccttttttcagtgcatccacattttctgcagcaacctccgttttgggtataccgccattgtatttcagtgcgcgcagcgttgctacgattacaatagcagacggagccagaccggcataacggcatttgatgtccaggaatttttctgctcccaagtcggaaccgaatccggcctcggtgatgcagtaatccgccatcttcagcgccagttttgttgcacgcaccgagttgcagccatgcgcaatattcgcaaacgggccgccatgcatcagcgcaggggtattttccaacgtctgtaccagattgggcttcagcgcatcttttagcagggccgccattgcaccgtggactttcagatcccgggcataaaccggttggttgtcataggtataggcgattaaaatagatcctaggcgctctttcagatcgcccaaatctgctgccaagcacaaaatagccattacctcactggcgacagtgatttgaaaaccgtcttcacgggggacaccgttaatttttccgcccagtcctacattgacaaagcgcaatgcccggtcattcatatccaggcagcgtttgaacagaatccgcctttgatcgatgccaagcagattgccctgctgcagatggttgtcgatcatggcgcacagcaaattgttcgccgcagtaatggcatgcatatctccggtaaaatgcaggttgatatcttccatcggtacaacttgggaatagccgccgccagctgctccgcctttgatgccgaacacgggtcccaaagaaggctcacgcaaggcaatgactgcattttcgccgatttttgccattgcctgtccgagaccaactgatgtagtggttttgccttctccggcaggagtggggttgatagcggtgaccagtacgagttttccgtccggcttattccgcaaacgggcaaaaatatcttccgaaagctttgctttataccggccgtacggctccagctcttccggaaggatgtccaatttttccgcaatttcggtgatcggaagcatttttgcgctctgcgcaatttcaatatcgcttaacatatttcctcacctttctctttttgtattcctaagaggcactctaaaaaagaagcttttttgagagattcataaaaatattacggaatctctatacgcaccaacatcaggaatcttgattttccgcttacgctgtaaatttattataacacattctcacgaaagacttcaattctttttctgattccattggtttcagataaaacttgtgatatactaatggcgtccacaggactttccctgttttttgcaacaaatctgcgcttttaggcgtttaattggtattttgaaacttttttcattcaaaaaggggcggaaaagtgaaaaaaatttggcacggcttggtccgttattggaaagaaacagataaaatccttttatttttatgtttggtttgttcggtttacagcatcgttttaatgtgcggtattcatcattctgacatggctaccgcccgcgcggttaaaatgcagatcgtcacctcagcgatggggctggttgccgcggtggtcatctccagttttgattaccattttttatcgaaattgtggaaactgtattacccggtttgcattgggcttgtcatgttgacttacttttttggtgaacagcgggtggaatcggttgacgatcaggcgtggcttccgatcccttttttggggattagttttcaaccgtctgaattgttgaaaattgcttttatcctgacctttgcactgcatttggaaaaggttggggatgatatcaaaaatattaagaatttgcttttgctctgcctgcacggtgcgtttccagtgcttctggttcattttcaaggggatgacggtacggcgctgatttttcttttgatctttttatccatgcttttttccgccggtattcagtggcgatatattgcgattgcaggcgctgcgttggtcatagcagccccgttggcttggctgtatttaatgagcaacgaccaaaaactgcgtgttttggcgctgtttattccggatttagacacaaatggaattttataccaacaatataatgctaaaattgccattgggtctggcggcggatttggagaggggctatttattggggaacatgtttacgtaccggaaattcataacgattttattttttcttttgtcgggcagtctttaggttttgtaggctgcatgtctgttattctgcttctgttttttatctgcacgcgtctgttggtgttttcccgtcggtctaacgatttgttgggcgggtatatctgcattggcgtttttgcgacgattgcatttcaaagcatcgtcaatataggaatgaatttgagtatactgccggttattggtgttacactacccttttttagctatggaggtacttcggtgaccaccctttatatgggaattggtcttgctttaagcgtttatatccataataaggatcatttgtttttggatgattaggcttattgtatattccagctttttcgttgtaaaatacggatacaatcctctgaggaggctttttatgaatccgataaagcaatattgaaaaaggtaccgaatatggatggggcctatgtggaaattccttttgacgttcgaaaagaattcggcaaagggcgggtcaaagtgagcgcgacttttgatggtatatcttatgaaggaagcctggtccgaatgggagtgccctgccacatcatcggagtgagaaagaacattcgggcagccctgcgaaaaaagcctggtgatccaattctggttatgctgcaggaacggatttaacaagcctgtcataaatgctaaaaagggaggtggtctttaagatcgcctccctttttgaaaaaagttggaagaatgtggggtttatgctataatgacctcacagtataatcggatagcaggatcaatagcagcggtttttcaagaccgattgttacaaatcagatctcaaaattgcgttgttgccgggcagggtatccggtattttgaaagactgcaagaggtgaattgcgttgtcggaaaatattttttgtgcggcacagggaattcgtatttcggatctaagaggagtacattgtgcttatgaagttttgaaaaatgaaagcggatggatattcacggtcgtgctggatgcgccacggataccggcgtttctgcaagactactgttgccttttaccagaaccgggatattttaccctggaattaccggtagaaggggaagacgcttacgacatttattatgtagatggatgcacccgcccggttttacaggcaatcgtcagccggtatggaaaccttctgtcggaggatggagatgtccgttttggattttcttcacacgaatcagaggaacaggtgtatgtgggggatttaaaaaccgttcaggtttatacagcttctccgcagacagtgcaaaaacttctggagaaatatgagatcccggaagagcctggatgcttaaagctgtgggatatcctttctgatgaaaacccgtgtgaattgattcatgtagaggtggaagaggaaaatattttcgatttgccggaacttttgtccgaggcaggtatctatttttctggccgcagggaagattgatttgacttattgcagccggatggaatatttttctgcggatagaatccgttaaaatggtaattccccatatttttatttacaccgaccgttcgtttacatgtttttgattggatggaatgaattgaaaaattttcaagaagcgccaagaaaaataaatccggacagcggctatcctttcacggcctgcgccagctgagttccggtataatagtgaagcaggatttcttcgtatccgcttccttggcgcgccatgtagtctgcaccatattggctgagcccaacgccatgtccatagcctttggtcgcaaataaaaaggagttggtttgtgccgtgatggtaaagttggtagagcgaagtcccagtaaggtgcgaagatcttttccactgatttgcagatttcctgcctgtaatgtaagaacatatccggaaggagagcgggatataatttgaaaccagctgcgggtgtcgccggacagtgtcaaatcgggatatgcttcggttaaaattccttttatctgctctgatgcaaaggtaacggaagtttcgaattggtctgccagcgtgtcgccgacgctgtccaccggtatcagataaggaacggtaccgttccatacattcgaagcaaattcggttgcacctgcgctcatagaatgatatgcagcgagaattggctcctcttggtaaactaaaacagtagatgcaacttcgtcaactgcatttttaattttttcccaatacgtttcgcccagatcaggataacgttccaacatttgttcccgtgttacgtatccctcccagttggagggatctgcggaaaaatcagcgccgcctagatcttgcgaaggatgttcctgacaatatagcgcataggtatgagatgccacagcttgtgccttcatcgcttccaggtgaaacccgggggggagttccgcagccacagcaccgtacaaatagtccagaacagcaactttttctacttgaccggtactgcggtctaaaatagaaaaatattccggctgcggtacctgcagagcggccagtgtgttttgggttgactgtgatatgctgctgggcagggattgcaggacttcttcttggcgaatgggttggctgacagcgctcgaaacgattttatccacggttgtgtctgacctattttcggtcttgtccgggttcagtgctgccaaaggtaaaagaaagacaatcagagaaaaaagtgtgaaaaaagaaagaagcgttttcatggaaaatcctcctcttgtccaaatgtatgaacaaaaagcagagaaaatacctggcaacaagataaaaaagtggcaacaggatgaatctgttttatgatgaagggtggaagcaggagagggagacttttgctgcttcaggaagaggcaaagataaaacgggattttggcaacggaaaagggggccgaaaatgaaaaaaaagcttttttatttatgttatacgccggtggttttgtcattggggattctttattgttttttataccgtaccggtgtcagcaatcaaacgggattttatgtgggagacaattttttgctgcctgttttttatttatcgggacttttccttttggctgggttatatttatggtctgttcggtcagccgcaaaaagtgagggaaccagtgcagaaggaaattcttttttgtggggcgtcagcagcatcttgtgcggtgtgttgcttttgctgcgcgctttgaatgaagtgcggcaattggtagggcctttttgggggcaggaatcggttcctgttaaaaatatcattctgccggggttagatggtattttgtcgttggcggcggctttgtcttttgtcgtattgggcatccgtttgttgaatcaaaatttacacctttatcgatattccctcgggctgctttggattgttttttggagtgcttttcgactagtagttcggtttggccaactaccaatggcctttcggatgccgcagcgcctactggaagttttgttgatgacggcccaatgcttgtcctttttagaaggaagtcatatcttatgcaatgttattgggcaaaaaaactatcggcgggcgcttttttccggccatgctgcgaccgcaatcggcttaatttggtgtatctgtccgttaatggcaggagatttatcgttttctgatttgtcgcagatgctggactattcactggaatggggaatcattctatttgtcagttccttttctttttttatcactcccccaaattcaaaaacacagtccacgctgtcatgaacaaaggctggagcagataaccaaccgctggtccccaaaaagaaaatcttattaaaaagttctttcttgcatttttttgcaagatattgcaaaataggtttaatgtctatggggaaggaaagaaagcataatgaagaaacaagaatggaaaagcagcttgatgcttctgcttactgcggcagtgtggggcgttgcatttgtggcacagtcagtgggaatggattatatcgggccttttacctttaattccattcgttcattgattggcggtctggtgttgattccgtgcatttggtttttaaatcgggaaaaatcggaggcggaaaagaagacggagccccaaaatagaaaaaaactgatcgttggcgggatttgctgtggtgtggcactggcagtggccagttctttgcagcagatgggaattcaatacacttctgtgggaaaggcgggatttattaccgctctctatattgtgattgtaccgctgctgggattactgtttaaaaagcgggtttctagcttggtatggattgcagttgtcgttgcggtggggggcatgtacctgctttgcattacagagggcttttctattggaaaaggcgatttgttggtgatggcctgcgctttttgtttttctgttcacatcctgattatcgattatttttctcccaaagtagatggggtaaagatgtcctgcatccagtttttggtttgcgggcttttatgtgctgtaccgatgtttttgatagaacgcccttctctggcacagatttggtcggcttgggtgccattgctttatgcgggtgttttgagctgtggagtagggtatacgcttcaaattgtaggacaacgacatattgatccaacaattgcgtctttgattttgagcttggaatcggtcatttcagtattggcaggctgggctcttttagggcaaaaactgactctgagagaattaatcggttgtattttggttttttgtgccattattttggcacagctgccgcaaaaaactgaaaaagcacaggaagtgccacagcactcataggaaacacatagaaaattgtccccattaaaaaaacagacaaaaaggctttggaatttccaaagcctttttatcattttataatacaggttaaatgtccggtggaatggcatcggataaaatgacatacagattggagaaacgatctctggttaaagagatcggggcatcacaaaaaactgcatcgccgctgggctttatcataggaagggttaacgcagcagttgtcccttccccttctttcgtttgaaaggcaagcgttccatgatgcagctgcaaaagaaagcgacagataaaaaggcccagcccgtcgccacagggcgcccctgtttgcggatcaaacgaataaaaccgctcaaaagcacgttttaaaacctgtggtttgataccggagccgttatcggtaatagtaatggtaacctgcttttcccaaactgtcattttcaaagtgatatggctgctttccggattggtaaacttacaagcattggaaattaagttgcagatagcacataacagcagatcgccatcatacaaagtaataaaggggatactgggaacttcataaaaaaattggtagcctgcattttgtacaagttctttggtatccttgcaaagaacttgtacgaagcggcacaagtctcccgcttgcatttttggctttagctggcctgactggatccggttatccattgaaaaattgacaacagtgcgaagaattcgatagcagtaccagttgatattgccaagatatttttgcagggtttcatccttttggtactcaatttgcaacaggttcagaacagaaaaaatttgagaaagaggcattctgaactgattattgtagacattggcaggctgatacatgctttctttccattctggagaagaaacgttggtatcctgaaaaatatgaacgagaacgccttgtaaaagcccctctttgtccgtttgcggttgaaaaataaaatgaacaggagggcggaaaagaagaggattagccaacgtaaagggctttccctgatgcaaacatgtcaatagtccattttgttttgcgcggataagac

SEQ ID NO: 2304 - DNA, 4481 bp, Unknown
  16S sequences of unknown bacteria
ctcatggggcgcgggctgagcaagggggcgatcgcggaacagctccatgcgcatccttaccgggtgcagatgacgatggcgcaatgccgcgcgctgagcagcgatcagctgctgggcatcctgaagcggctggcggacctcgatcagcggatcaagagcggaagggtggataaaaagctcgggttcgagctgttcctgctctccatgaacgcataaaaaaaaccggcatcctgccggtcatttttatgcgatgctgttgacagccttgctcagacgtgatttctgacgaatggcataatttctgtggtggagccccttgaccactgccttgtccagcttggagctggcttctctgtatgcagctgcggcagcttccttatcgtttgcctcgacagcagccaataccttcttgatcgccgtcttcagcgcggatttctgagcgacaactgcctggtgtctcttgtcatttgtttttacacgctttttctgtgatttgatctgcggcatgattacacctcctgttttccttaaatgcttgtaaattatagcaaagctcagacgaaaaagcaatattgtccgcaaaaaaagccatactggaaatgggtgagcagatgaaggattatcagatacgcagtgatttcgcagacgagatcatttcaggaagcagcgaagaggaggcctacagccatcagacaaatgagggagagcatgtccgggtgagccatgtctgcatccatcgcgcggacaatgtgctgggcaaacagccaggcgattatatcagcatcgagtttgattccctgcatgagcatgaagcgcgggaagaggtcatcgagtcgctgcgcgctgcgctttgcgcgttgatgaaggatacggtgcgccgcatcctggtgatcggcttgggcaaccgcttcatcaccagtgatgcgctcggccctcaggtggcccgcaatatcctggtcacttcgcatctttatgcgcagggccatgcccaccagctgcaaggaacgcgcaatgtcgcggtgctggcgccgggcgtcatggggcagaccggtctggaaagcagcagcatcatccagagcgtgagcggtgtctatcacccggatgtgatcatcgccgtcgacgcgctggccacccgcacgatccgccgcatcaaccgtgtcatccagataaacaataccggcattcagccgggcagcggcgtggggaaccaccggcttgccctcagcgaggagaccctgcatgtgccggtgatcgccatgggcgtggcgacggtgaccagcatcggcgccatcctgagcgaggcgctggaatcacatgacgagcgtgatgcgatcctctcaggcatcgcgaaggaaggcaggctcgacctcgtcgtcaccccgaagtcgatggatgatgagctggatcagctcgtgcatgtgatgggccgcgccctcaatctggccctgcatccgggatatcctgaactttaggttctgtcttctgttgcgcgcgcataagaatgagcaagaggtgagggtatgcgcgcaggattcaagatcgtgatgaagctgggcgtgatcggcggctttttgttctgcacgcccttttttgacgggatgcggcagctgatcgaggagagcagcttcctcaatctgctggtggtgcgccaggaagtgagcgtggatgatttttccttgaagaatcagctgaatgtcatgtctgtcccccaggaggaagaagaagagggcaatgtgagcgagagcacgatcttcacgtcgaaacagccttcgacgccggcggtgaaggaacgcgtgccggggcagaagcgggtatatatttacgacacgcaccagagcgaggaatatctggatggaaagaccgtgctcgacggtgccaagctgcttggcgaacagctgcaggaggccggggtggaagtatttgtggagaccaattccttttctgactatatgaagcaaaatggtctgaattataacgacagttatctggtctcttacaattttctcaatgatgtgctggcggattacggtccctttgacctcatcatcgactttcaccgcgatgccgtgccgcgggaaagctcctttgtcaccttggaaggaaaggattatgcaaagatgatgttcgtcatcggcggactgaacggacatgtggaacacagcgaacagctctgtcagacactgtatgacaaaatcgaacaggtgcagccgggtatcatgaagaagacgatggtgcgggaggcttattataatcagcaggtaaatgagaacatggtgctcatcgaagtgggatcgaacaacagcacgttcgaagaagtgagcaattcggtcgatgtgctggcgcagggcctcatcgcctatctgtccgcatagaggtgatgtgatgaaacggtttgcggcagatgcgctgctcatctttgcgctgatcgtgctgggcacgatgctggatggggcaagggaagaaccggcagaggatgtgaacgcgcagatcgcgcagttcgaagaacaggtatcgcttcagcgcacctggcagggagaagcgggatcgccgatgttctatgaggtgcaggagaacaaggcgtccgcatttgcggccgggacgagcgactttctcgtccggaccattcgggaagtgacgctttccctgacagatttctttacagccttgacgcgctgagtgtataatgagcgctgaaagccggtgataatgatgaaagaaaagattttgttcatggggaccccgccaatcgccaggaccatgctggagcgcttggtcagcgaaggatatgagatcgtcggtgtcctgacccagcccgaccggcgcgtcgggcgcaagaaacagctgcagtgctccgcggtgaaggagtatgctctgcagcagggcctgccgatctggcagccggtgcgcatccgcgacgatcatgaggagctgctgaaggtagagatggatctgatcgtgacctgcgcgtatgggcagttcgtcccgcaggcgctgctcgatcatccccgcttcggcgcggtcaacctgcatgcctcgctgctgcccaagcttcgcggcgccgcgcccatccagcgcgccatcatgcgcggggacaaggaatgcggcatgtccgtgatgcgcatggtaaagaagatggatgccggtgcggtcatggcgcagcgcgcgctgcggatcgaggaagaggatacgtccggcacgctgtttgaaaagctcgcggtgctgggcgcggatctgatggccagctcgctgccgctcatcttcgcgggcgaagcggatttcgtcgagcaggatgaagagcaggtcagcttcgcgcctgccatcacgccgcaggaagagcgcctcgatctgtgcaaaggcctggatgccgtctatgaccaggcccgggcgctgatcccgcagccttgcggatacatcatgcacgaggggaaaaaagtgaagctgcatgcggtgcgccggctgcacaaggcgcacgatctggcagagggcacttgtgccggcatgatcgagcatgggttcgccatcgcgctgcagggcggctacctgctggatgtgcttcagccggaagggaagaagccgatggacgcggcctccttctataacggaagcggcaagcagtgggtcggcagccgcgtcgaatgagcttgtgattttgctttgcaactgagagaagatttgctataatgactctgtttgtttgtgaggaggatgacacatggatcagagtcatattcgcaatttttcgatcatcgcgcacatcgatcatggcaagtccaccctggcagaccggatcctggaactgacgaagaccgtggaaaagcgggagatgaaggcgcagatcctggattccatggatctggaacaggagcgtggcatcaccatcaagctgaatgcggtccagctgaaatatacggcggaaaatggagaggattacctgcttcatctgatcgacacccctggacatgtcgatttttcctatgaggtctcccgttccttagctgcctgcgagggcgcggtgctggtcgtggatgccgctcagggcattgaggcgcagacgctcgccaacgtctatctggcgttggacaatgacctggagatcgtgccggtcatcaataagatcgatctgcccagcgcgcagcctgagctcgtcaagaaagagatcgaggagatcatcgggcttgactgcagcagcgcgccgatgatctcggccaagagcgggctcaatgtggagcaggtgctggaggcgatcgtgcgggatatcccagcgccatcaggagatgtgaacgcgccgctgcaggcgatcgtcttcgattcgctgtatgattcttatcgcggcgtcatcgcgttcgtgagcatcaagcagggatcggtggccgtgggggacaagatccgcttcatggccggaaaaggggagtatgaagtgctggaggtcggtgtccgcaccccgaaggaagtcaagaaggaacggctgtcctgcggcgagg

SEQ ID NO: 2305 - DNA, 27219 bp, Unknown
  16S sequences of unknown bacteria
cagataagataagcgcgcattttgtttgatgataatattataatccattaaatacgaaggagagagaatatgaattatgaaaagacagcggccagcatattagagctggcaggaggaaaagcaaacatatctgcagttacccattgtgtgacaaggcttcgtctgacaccgaaggacagaggtttggtagacgatgaggcaatcaaaaaactggacggagttatcggcactaaaaatgtcggaacccagtatcaggtaatcatcggacaggatgtggaatatgtatacaaaaatttctgtaaacaggctggaatggaagaaacagcaattgtagaagcttcagaaaatgatgaaaaaccgaaagaaaaaatgacaataaaaaaagttgttggaagtgtagttgatgcgattggagcatgtgttacacctatgctgccgatcattacagcagcggcaatcatcaagctgattgcatctcttcttggaccaagcatgttgaatgtgcttccggaaactagcgaattcatgagacttctggcactggttggagatgcaggtttttatttcttcccggtttatgtggcatattccggagcaaagagatttggtgcaaatattccgatggcattgtttattgcaggtattctgttgcatccaagtctgattgatattgtgaatgccggagaggctttccatgtatatggaattccgatgacactgacgacatattcctcaaatttcatttccatgcttcttattacatgggcaatgtcttacgtggaaaaaggtctgaacaaaatcattccgaacagccttcgggcacttctgttcccggtattgctgatctttattatgttgccgatttctttatgcgtacttgggccgttaggtgcaatcatcggaaaaggtattgcagatgccattgtagcactgcatacggtatttggaccaattacaattggaattgtgggagcactttggccgcttttaattgtaaccggaatgcatcaggcattaattgccattgccctctcttatattgcaagtgttggatttgataacagtattctggtaggagcaattgtatcaaactatgcaatgatggcaatctgtcttgcatttcttctgaaagcaaaaaatgcagagaatcgtgcatatgcaagtagtgcgctggttactttggtgattggtggagtcagtgaaccgactttgttcggaattattctgagatataagagaattattccctgtatgatggcaggtggatttgtcggtggtatttatgcgggtattatgaaggttgcagtatattttgcgggttctggaaatgtactttcctgccttggattcgccggagagtatgcaccaagcttgttacatggaattatagcaagtgcgattgcatttgtagtgactttggtacttagtatggtagttggttttgaaaaaaatgagaaaaagaccaagtaggagtaaatcgtgaaaagattattgcttcaaagtgatgattatggaattacagagggtgtaagtgcgggaattctgcaggcagtcagaaacggaatgatccggaatacgggtttgtttgtaaatatgaaaagttctgcgacagcagcggagcaaataaaagatgtcgatgtatgtctgggaattgatattaattatgtggccgggaaaccggtcacagcccctgaaaaaatcccgcatcttgtggacgatacaggtgcatttcgaaaatcgggaagaatactgaaggaaaacagggtagagtatattgatgggattatttatcactttgcagaggatccgtatccttatgaagagattcttctggaaacagaaaatcaggtaaaacagtttgaaaaactgacaggaaaattaccggaatatttacatcctcattcaatatgtacgccaaatacagaacgtgcagccagtgaagtggcacataaatacaatattatgcatagtacagatatgatgaatcatccgaactatcacagcctgccaggagcgatttctctgaaaaaaggatcatcgctggaagaacagttggctcagaatgttgagatggagttcctgactcaaagtcttccatcacttcgggaaaatgaaacgggatattatatttttcattgtggatatgtggactgtgaattgatgcaggtctcttcattgaatctgaaaagaatgctggatctgcaggcagccacaagcgacagggtgaaatcatatattcaggaacatgacattgagctgattacatatcgtgatataaaaggagaactgctttgataagtgataaagtgaaaaacggtgttgaacgtgcacctcaaagatctctgttttatgcagccggttttacggaagaagagttgcagaaaccactgataggaattgtgtcggcgcagagtgagatgattccgggacatacacacctgaacaagttggcggaggcagtgaaggcgggaatatatgcggctggaggaacgccagtcgttgtgccggccattggtgtatgtgatggtattgtgatgggacataaaggaatgcattattcacttgcttcccgggaactgattgctgattcagtggaaacacttgctgtggcacactgctttgatggaatggttctgattccgaattgtgataaaattgttccaggtatggtaatggcggcactccgaataaatattccatccattgtctgctctggcggacctatgctggcgggaagagtgaatggcagaaaaaccagtctgtctcagatgtttgaggcagtaggtgcttataaagcaaatctgatagatgagaaagaactgaagaaatgtgaacagaacagttgtcctacctgtggttcctgttccggtatgtttacggctaactctatgaattgtctgtgtgaagcactgggaattgctctgccgggaaatggaacgataccagcaccttattcggaacggatacagtttgctaaaaaaacaggtatgcagattatggagcttgtgaatgaaaatatcaaaccaagagatattgtgaccagagaagcactggaaaatgcgataacagtagatatggctcttgggtgctctacgaacagttctttacatcttccggcgattgctcacgaggcaggacttaagcttgatctgcatttattcaatgaaatcagtgagaaaactccgaatctttgtcatcttgctccggcaggaaatcattttatggaggaacttcatgaagcaggaggtgtttctgcggtaatgaaggaactgacagaactggatctgatacataaggaacagaagactgtgacagggaaaacagtgtgggaaaatgttcaaaatgccgaaaatcataatccggaaattattcggtcaattgttcattcatattcagaaaccggtggtcttgcatttctgtttggcaatattgcgaggaacggatgcgtcgtaaaacgaagtgctgtagcagaagaaatgcgggtacacacttgcagggcaagagtattttgcggagaagatgccgcagtgaaagcaatttatgaaggaaagatcgtcccggatgacattgtggtaattctgtatgaaggtcccaaaggaggacctggtatgagagaaatgctggttccaacttctgcacttgctggaatgaagttagataaggatgtggctttgattactgatggtcgtttttccggagcatccagaggggcttctatcggacatgtgtcacctgaagctgcagcaggtggagaaatcgggcttctgcgtgatggtgatctgatagaaattgatatggaacattatatgattcatgcaaaagtaacagaggaagagtttgaacgaagaagaaaagaacaaaaaccttatgagtcctgggtgactggtggctggttgaaacgttaccagaaactggtgacatctgcggatgagggtgcaattcttcgggagtgacggaaaggaaaagaaaatgaaaataacaatattgggagcaggtgcaatgggaagcctctatggagcattgctttctcagaaagaagatgtgactctgatggatgtgaatgccgaacttattgaccatatgaatcagaatggattaaaatgtcttgagaaagatggaacagaagttgtttatccggtgaaagccgctatgacaggaaccgatattggtgtacaggatttagtcattgtctttgtaaagggtatttttacgaaagatgtagtggaacagaatatggcactgatagatgaacataccattgtgatgacactgcagaatggtgccggaaataatcgggatatagcacagtttgtagcaaaggataatattctggttggaaccagcagtcataacagtgtcatcaaaggaaaaggaattttttatcattcaggtcagggaccgactaatattggtccggatgtacaaaatgatgaaaatctgaagaaggctgaaaaggtagctgatgtattaaacagttgcggatttgaaacccacgtcattgctgacattcagcgtgttctctggcagaagctttttgtaaactgtggaatcaatggattatctatggtaacagaaaataaaatcggagagatatacagcaattcgcatttatgggagatatgtaaaaaaattgtaaaagaatgcgtaaaagtagcggctgcagatggaactgtttttaaagaagatgaagcattggaaactgtaaaaaaagtatgcatcaatgatgccacaggactggccagtatgtatcaggatcgattgaaccacagaaaaacagaaattgacagaattaatggtgtgatcgtagaactggcacacggatatggaatttcgacaccgtataacgagatgctggttaaactggtgcatggagttgaataaaaagaatatatattaaaaagaaaggtgccgtaaagtcttgaaaaggattgatcgacacctttcttttatagaaataatgtgcatatccggaatcctgcagatttccggaaaaggctatctcttccatggaagcttatggtctgtttgtgacacaggtctgccgagataataatatgaaatattatcacaaacttaaaaagcccggatattatcatcctcttcatcgctggtatctttgatctctcgaatctctacttcgtaactataatctgagctgaccggaatcatcaccttatcgcctacatgatggcgaagcagtgctttaccaaggggggactcgatgctgatgagattcttcatggaattaccgcggatgctggttacgattttataagtctcacattcgtcatcttccggaatatagacagtcacagtcttgttcaatccaatctcatcggaagtagtatgatcttctacaatcactgcatttttcagaactctttccagatagcggatccggctgttgttagctccgttttcccttttggctgcataatattcaaagttctcacttaaatcgccctgggctctggcttcgcgtactgcgtccagaatttgtggacgaagcaccagcttccggtggtcgatctcagcctgtattttttcaatgtcttttggcgtaagcttttctttcataatagatcatcctccttgcctgaatagcattactatatcacaaaaacgaggaaaggaacatcattctttgatgattccggtataactccttcccatactggaaataatttccatatcatataataaagagtctgacaaggaggacttatgatgcagaaagtgaacattcagtttcgggatattgattctgtccgtacatttgtcaatattatcaatcggtttgacggggaatttgatcttggcagaggtaatcggcttgtagatgccaaatctattataggaatctgcagctgtgatttatccagaccggtggagttactgatccattccgatgacaggcagatattggatgcattgcaagggtacattgtgtaggaaaaacctggatatttagtagaagacatatgatgaataaaacttccgccacttgacgcatacgctgatcataacgtataattagaaaattgaattgcataaataacgcataatgacatatgagataaaggagcaaagacaaatggcaagtttgtggggcggaagatttgagaaagacatggatgagcttgtaaaaaaatacaatgcatccatcttttttgatcagagaatgtacaatgaggatattgacggcagtattgcccatgtgaccatgctgggcagacagggcatcgtatccgaggaagaaaaagagcagatcattgcaggtctgaaagagatcaaacaggagatcgcagatggcaagatcgtatttaatgtggatgatgaagatattcatatgggtgtggagagccgtctgatcaagaagatcggtgatgtgggcaagaagttgcatacatcccgaagccgtaacgatcagtgccaggtagacacccgtctgtatctgagaaaagagatctatgagatcctgaacagtctgtgctatctggagagcgtgatccttaagaaggcagagaaatatgcagatcagatcacggttggttttactcatctgcagcatgcacagccgatcaccatcggattcatctttatggcatatttccagatgttcaagcgtgatatcgagcgtctgaatgacgcactggaaagaatgaattacaatccgctgggagcctgtgcgctggcaggaactaccatgcccattgaccgtcatctgaccagtgagctgctgggcttcaaagcaccgacagagaatgctatggatacagtcagtgatcgcgattacagcctggaatttttaagcgatgcatcaatttccatgatgcatctgtcccgctgggcagaggagttcgcatggtggaattcttctgagttttcttatatttccattgatgacagcttctgtacgggaagcagcattatgccgcagaagaagaacccggatatggcagagctgatccgtggaaaagtgggtcgtgtatacggagatctgatgcagcttctgactgttatgaaaggaactgcgctggcttacaataaggatttccaggaggacaaagagagtctgttcgatgcggttgatacgtggaaagcaaccattgatatttttgcaaagatgttagataagacggaattccgtatggatcagattgagaagcagttaggcaaaggtttcttgaatgcaacagatatcgcagaacattttgcaaaacaggggattccgttccgtgaggcacattctattgttggacatatggtaaaaatgtgtgagaataagaattgtgattttgaagatctgacagatgaagatctgcagtcgatcgacagtcgtgtgaccaaagagcttctgggcgatatcagcatcaagaactgtgtggatgcacgggtatccttcggcggaactgctccgtctgaggtgcgtcgtcagatcaaagtcggcagagaatggctgaacagtctggagaaataattcaattatgaagattgctttgggacagatgcatatccgttgggaagataaggcggcaaatcttgccagagtagagagttgggcggaacttctgaaagagaagaacatagatctcttcgtactgccggagatgagccttacagggttttccatgcatacggaactgacaaaagagacagataacatcacagtggcagaagcagaaagacttgcccgtaagtatcagatggccgtgggaatcggctgggtgaaagatgtgggaaagttctgcgagaaccgatattccattgtgacaccggaaggtgagattctggaatacacgaagctccacccgtttagttacagtggggaagatcggtattttcagggagggactgcattgccggtgtgcgaatatagaggatatcatctgggagtgcagatctgttatgatctgcgttttccggaagcctttcaggctttgtcccgtcaggcagatctgatccttgtcccggcaaactggccgggaagaagacgtgagcactggatcagtcttttacaggcgagagccatcgaaaaccagtgttacattgcaggagtaaattgtgtgggagatatggatggtcagacatacacgggggattcaagactgtatggaccagatggagcgctgtgcagcggggagacattgatgcctgccgatgcacagccgggcgagtgtgcgtttatttatgagattgacgatcaggtaaagaaagtcagaacacagtttccggtaaagaaggaccggagagacgcactgtaccgtcagttttatgaaatataagaattcccatagacttacagagaatatacaaaacaacagatggggaaggtaaaaacatatgtatgaaagtggagatcaggcaaaaaagggaaccaaccaggaactggaatttctggcgtccatgacatcagaggagagagatcttcttctgggaagagttcagccttttatgaagctgatgatgcagtatcgttgtgcgattcgtgagatggagaccaagctgcaggtgttaaatgatgagttttccctgcagcatgagcgaaatccatttgagtccattgagagtcgtgtcaaagaacctatgagtatcattgaaaaaatgcgtcgccggggctgggatctgactgtagataatattgaagacaagttaaatgatgtggcaggtgtccgcgtgatctgttcctttgtggaggatatctattatctggcagatatgctggcagcgcaggatgatctgaacgtgattcaggtgaaggattatatcaagcatcccaaggataatggatatcgtagtctccatctgatcatcggtattccgatcttcttatccagtgagaagaaatatgtgcgggtagaagtgcagtttcgtacgattgccatggacttctgggcgagtctggaccacaagctgaaatacaagaaaaatgtaaaaaatccggaactgatcgcagcagagctgaagaaatgtgcggataccatcagtagtgtggatctgcgcatgcaggagatccgtaatatgatggaagaaggagaaatgtaagatatttcagataatctttcggaaatcttaataatttcattgcttgaatttaaaaaacatggattatactactctcatcaagatagaaagagggtggcagtgatgctcataggaaaagttagaatgatttatttgctgacagctatgctggcagtaggtgcaggggcaggatttgcatctcatgaagataccatgctgcaggtgcaggctgcagaagaagctgccctggaggaaaacacgcagacaaagggatacagcaccggttctatggaaaaagagtataacagacagtgtcagactgagaaagaactgacagagacactggaggaaaaagaaacttccggtgcagatacggaagaactggataatctgaaaggacagatccgaaatgtacagcttcagaagcagattctgaaggccagaatggaagcacagggctagacaagtaacatttggtacagtataatatcatacatgtaagaaaagagggaatgcttacagcattcccgttttcgtgtctgaaaaagagggttaacaaaggatgaaagattatctgaagagcagtctgttccgccagatcaccagggaggaagcagagagaatgctggaatgttccaaatcacaggtaagagaatatacggcgggaagtgtgatcttcggagaagaagacagatcccggtatctgtatttattattggatggaaaagtacagattgccaagcatcttccctccggtaagcgcaatttgttgtttcagatccatgaattggaagtgtttggtgaatgcttttctgtggcaggagatgaatattgctggtatgaggcggtggcagtgaagacttcaaaagtgctggtgctacccagtcagttcgtctatggattctgcggaaatgcctgtgagcatcatcggatgctggtacggaatctgttggatattgaggcgagaaacaacctgcagatgacaaagaaacttcatattattaccaataccactctgcgtcagaagattgctctgtggctgatggacaacagcctcgatcagaagcaggtcattatggatatgaaccgggaagaactggcagattatctgggagtgaccagaccatctctgtcccgaaccatgatggagcttcagaagatgggactgatcaaagtagatggatgtaaagtatggatcatggatatggaagaacttggaaagataatggaagatgaatgatgaagaaaaatgaaatcttggtgacctatggaacggactatgtaaatatgaccgaagaactgcttcgtgaggcagggcttgcggagctgatcggtgaccggaacagacggatcggcatcaagcccaatctggtggcaccggtgctggcagccgaaggcggaaccacccacccggaagtggtggagggactgatccggtatctgcaggcaaatggatttcaggatctgacgatcatggagggctcctgggtgggagataagacagaggaatcctttgaagtctgtggctataacgaactggcagagaaatatcaggtaaagctgatcgatgctcagaaggaacctgcagtaaccatggattgtggaggattggaacttcatatttgtcgttgtgccacggaagtggactatatgatcaacgtgccggtgatgaaaggacactgtcagacaagaatcacctgtgcattgaaaaacatgaaaggcatgctgcctaattctgagaaacgcagatttcatgccatgggtcttcatgatcccattggtcatctggctcttggaatttctcagaattttattctggtggacagtatctgtggagatctgtgttttgaagatggaggtaatccatcgaagatggatcggatatttgcgtgtctggatccggtactatgtgattcctatgtgtgtcagcttctggagtatgacactaaggaagtgccttatatagggattgcggagcagatgggagctggatccacagatcttacccaagccaggatcctggaactgcatgcacctcttcataagagggaagaggcaagaccggataaggagcgcatggtacgactggcggaactggcagaagatgtggattcctgcagcgcctgctatggctatctgatccctgcactgaatatgctggaacaggatggattgctcaaagattttaaggaaaagatctgtatcggacaaggatatcgtggaaagagtggtaacctgggagttggcaactgtacaaaagcatttacgtacagcctgaaaggatgtccgccaacggagatcgagatgtacaaatttttgaaagcatatatcaaagaaacggggagacgggaagaatgagagaagaacaaaaggagcgtgccctacttcttggtgtaaaattaaatgacggggaagatttcaaaaaatctatggaagaactggcagctctgtctgaggcctgcggtatggaagtggtggggaccattacccaaaatatggatcggcagccacatgcgtccctgtatatgggcagaggaaagctgggagaagtgcaggactatatgctggaacatccggtggacgtgctgatctttgacagatcattgacaccatctcagatgcggaacctgcagaatattctggactgcccgatccttgataggacaactttgattcttgagatattcgcatcgagagcaagaatcagggaggccaagctgcaagtggaatctgcaaggcttcagtatgtattgccaagactgactggtatgcataaagctctgagccgtcagggcggtgggagcggcgtggcgaataagggagccggagagaaaaagttggaacttgatcgccggagaattgaaaagagaatatcggaacttcgaaaagaactggatagaattgcaaaagagagggagacccagcgacagaagcgtcagggaagcggagtcccaagagtggcactggttggttataccaatgcaggaaaatccacgctgatgaataaacttctggataaatatacgcgagatgcatctaaaaaggtgcttgaaaaaaatatgctctttgccacattggataccactgttcggaggatcagtatgggaggcggcagagattttctgctgtctgatacggttggatttatccatcagcttccgacagcactgatcaaagcatttcgttccacgttggaagaggcaagggaagcggatcttctgctccatgtactggactattctgatgagtcctgccggatgcagcgggaagtgacagatatgactttgaaagaactgggagccggagatatcccggtaatctatgtatataataaagcggatctggtagagacagtggatggagggaagcttccaagggtgattgatcataagatctatatgtctgctaagactggagaaggcatcccggaactggtggaactgatctggaatatgtgtggaaagtaattccgattctggagcaaatgcagggttaatattgaaaataagaaagaaggatcatcatgagagggaaaaaaagagttatcaaagtaggaaatgtaccggtaaaaagccgtgagcaaattgagggtatccgtgaaagcggtaagatcaacacgatggtgcttgattttgtggaagaacatatcaaagcaggtatttccacccaggagattgatgactgggtacggaaagtgaccgcggataacggagccatctgtgcaccctatcattatgaaggatttccaaagagtgtgtgcacctctgtcaacagtgtgatctgtcatggaattccgagtaaagatgagattttaaaggaaggggacatcatcaatgtggatgtgtctaccatttataaaggatatttttctgatgcatcccgtatgttctgtattggcaatgtaagtgcggacaagaagcggctggttaagacggcgaaggaggctatccaggtgggattgatggaagtgaagccttttgcacctcttggaaatatggggcatgcgatccatatgtatgcaaagagccagggatatacagttgtcgaggagatcggaggccatggcgttggactggaatttcacgaggatccttttgtcagctatgtatctccaaaaggaagcggacctgtcatggtgcctggtatggtatttaccattgaaccaatgatcaatatgggaagtcctgagttttatgtagatgcaaagaatggctggactgtttacactgaggatggtatgccatctgcccagtgggaagtgaccgtagcagtcatggatgatggttacgaggtattgacttattaaagcgggaaggagacttttatgagtcagactgtcagaaataattttataagagaattacccaagctggagctgcattgtcatctggatggctccctgacacagaaaagtattgaggagatcatggaaagaccggtggtattgtcagaacttcaggtggagccggactgccgcaatctggcagagtatctgcagaaatttgatctgccgatccaatgcctgcagaccagggaaggaatcaagaaagccagcaaggagtttttgctggatgtggcaaaggaaaatgtccactatatggaagttcggtttgcgcccacctgttccattaatgaccatatgacttaccgggatgttatggaagcgactctggatggcctggaagaggcgagaaaagaatgcggaacttattataatgtgatcgtgtgttgtatgcgtcattttgatctggagaccaaccttgccatgctgaaaggctgcagggaatttttaggagcaggtgtctgcgcggcagatctggcaggtgatgagacttcctggcccatgaaccagttcagggaattgttccgcgaggcgaagaagctggattatccgtataccattcatgcaggagaatgtggaaacgttcagaatatcatcgatgcagtggatgcaggagcagcccgtgtgggacatggaattgccatgaaaggattccaggaagtacagaagctttgccgggatcatcatattggcgtggagatctgccctaccagcaatcttcagactcgcgcagtctcgactttgaaggagtatcctatcagagagtttctgaataacggtgtgatggtgacggtcaacacagataaccgtactgtaagcggaacgaatctgatacaggagctgtcatctcttgaaaatgccggtgtgatcgcagaaccagagatgatccttctgatggaacatgcgctggaagcagcatttgcagatgatgcagtgaagcaggagctttataaaatgttgaaatcatattccttgtgatctgagcgaatttttgtaatgtggaacaaaaaggaaagatgaataaatttcatctttcctttttctgaaaaagatgttatagtattgactactattgtttacaaatagaaaaggagagaaacttatgaaaaagaaaatgctggctgtattattagcagcatccatggttgcatccatgaccgcatgcggaagcagcaattccgcagacacaactactactgaggaaggaaccaatgagagcactgatggtgctgaggcagctgctgacgtatctgacctgaagatcggtctgatcactgacgtaggtggagttaacgacggttccttcaaccagtcttcctgggaaggtcttgagagagcaggcgaggagcttggtgtaaccgttaactatctggagtccgctactgacgctgactacaaaccgaacatggagaccttcattgatgaggattacgatctgatcatcagcgttggttacatgctggcagatgctaccagagaggcagcagaggctaacccggatactaaattcgcaattattgatgatgctactatcgatcttccgaatgttaccagtctgatgttcaaagcagagcaggcttcctacctggtaggatatgtagcaggtcttacaacgaagagcaacaatatcggattcgtagttggtatgaccaacgagaccatgaaccagttcggatacggctactgtgcaggtgctatcgatgcaaatccggatgttactgttcagcagatgaatgcaaactctttcgcagattccgctactggtaaatccatggctaatgcagagatcaccaatggcgctgatatcgtattccaggcagcaggtgctaccggacttggtgttatcgaggcttgccaggaggctggtgtatatgcaatcggtgttgactctgaccagtccagcatcgctccgaacaccgttcttacctctgctatgaagagagtagacaatgctgtatatgaggcagttcaggaactgatcgacggaactcttgagggaggcgtgaagacctttgacctggcagcaggtggtgttgatatcgctccgtctcaggatctgatctctgaggatgttatcgcagcagttgacgaagtaaaagagaagatcatcagcggcgacgttgttgttccggatgacaaagcttccttcgaggagaaatacggcgatgtatacgttcttgactaatgcatcctgaagcataaataaaatatgtgtagtccgatacggggcctgcgtatgcagagccccgtcggtgcatatagagaacaaagtctgaacattcctgtctttaatggagaagataatctgtgattttcctgtccactggagacagaagcggaagtgcattgcgattctgtacagatatatgaatgaaatacaaaggaggcagtatacgtgggaagaacgagccatatggatgcgagtaaagtagtcattcagatgaaggacatcgtgaagaaattcggcgactttacagccaacgaccacatcaatctgaccgtgcacaaaggagaggtacatgcgatccttggagagaacggagccggaaagagtaccatgatgaatgtgctctgcggactctataagccgaccagcggtcagatctttatcaatgagaaagaggttcatttcaacagtcccaaggatgccattgatatcgggatcggtatggtacaccagcatttcatgctgatccagccattcacggtaacagagaacattatccttggcatggagccgaccaaagggctgaccgttgacaaggagactgcaaagaagaaggtactggaactgtccgaacgctatggcatgaaggtagatccggatgcgaaggtggaggatatctctgttggtatgcagcagcgtgtggagatcctgaaggttctgtaccgtggtgcagagacactgatcctggacgagccgacagcttccctgaccccgcaggagatcgaaggcctcatggagatcattgagaacctgactgctgacggtaagagcgtgatcctgatcacccataagctgaaggagattacagcatcctctgacaactgtaccattatccgccagggtaaatatatccagacagtgaaagtggcagatgtgaatgaaaacgagctggcagctatgatggtgggccgcgatgtcaacttcaaagttgataagaaagagatggagccgggtgaggtagttcttgaagtgaaagaccttcatgccaaagactaccgtggtgttgagatcctgaaaggctttaacctgaatgtaagaaaaggcgagatcgtaggtttggccggtgtagatggtaacggtcagaccgaactggtagaagtactgaccggccttcggaaagcagaatccggtacagtcaccatgcttggaaaagatgtattcaataagagtccgaaggagacctttgagaatggcatctccagtatcccggcagaccgccagaagcatggactgatccttgatttttccaacgaggataacatgatcctgcagcactttgaggaagagccgttctcctcccgtggatttctgaaccggaaagccattcgtgagcatgcagaagaactgatcgagaagtttgatgtacgtccgagaggatgtgcagaagcacctgcagggacactgtccggtggtaaccagcagaaagtcatcattgcccgcgaggtgaccaatgacaaagacctgctgattgccgtgaacccgacccgtggacttgacgtaggcgcgatcgagtttgtccataaatatctggtggaacagagaaataagaaccgtgcggttctgttagtatcctttgagcttgacgagatcatgagcctgtctgaccggatcgaggttatcttcgatggtcagatcaccggcagtgttcctggaaaggatgcagatgagaaagaactcggatttatgatggcaggaggaaagacagatgaataagaagaaaagtattcttgagagcaatgtgctttatacgatcattgcgatcattgccggcttcctgattggtgccatcttcctgatgatcgccggtatcagcccggcagttgcttatggaaagctgttcagcagcattttcagcaaaccaaaatatctggtgtggacgttggtatatgcaagtccgctgatctttaccggattgagtgttgccttttccttccgcacaggtgtatttaatatcggtgcagagggacagtttgtgatcggtggactggtagcctgtgtgcttggtattgtgcttgaccttccaccggtcatccatgccattgtatgtctgggggcagcagccctggcaggagggatctggtccctgatcgtaggtgttttgaaagttaagagaggtattcacgaagtattatctttcattatgtttaactggatcgcattctatctctccaactacgtggtaaaccttccggagatccacagagagagcagtgaggcaacccgggatattgcaacctctgcaaggatcctgctgccatccggtcttcagaaagcactggattgtaatgccgcacactggggcatcgtttttgcgatcattgcagccatcttgatctggatcattattgagaagaccacacttggatacaaattaaaagcagttggtttcaatagcaatggcgcacagtatggcggcatcaatgcagaccgttccatcctgacggcacttggaatctcaggacttctctccggactcggcggagctgttcaggtgctcggtatggctggccgtctgagccagtttgccggacaggagggcttcggattcgagggaatcaccgtggcactgatcggtggatccaatccgatcggctgtatcttctcaggcctgttctacggtgccatgaagtacggtggatccaagctgagtatcgtaaaggcaccgtctgaggtagttgatattatcatgggttgtgtagttcttctgatcgcgatcgcccatgtatttaagatttttgtattaaacgcagcaaagaagaaggaggggaaataagatgaatgaattaataaaagacctgggtcttctgatcaatgcgaccctgatcgcaaccccgccgcttcttctggcagcactgggctcctgcttctctgagcggagcggagtggtcaacatcggtatcgagggtatgatgactatcggagccttcacaggagcggttatgggactgaccaccggcaatggctggatcgcattcctgtgtgcaggactggcaggtgccctgttcggactgatccatgcatttgcatgtatttcctgccatgcagaccagactattgccggtacagccatcaacttcttaggaccgggtcttgctctgttcctctgtaaagcaatgtacagcaattcttctgatacaccggccatggatcccagctgtaagctgccgaagctgttcgagggtgtgttcccgaccggatccttctggaacaacgtactgaatgtatatgcggttgcgtatctggtatttgtgcttgcctttgtctgctggtttgttttctataagaccagatttggtgctcacttaagagcagtgggcgagcatccggaagcatgtgagtctctgggaatcgatgtatataaagttcgttacacctgcgtgatcctgtctggattcctggcaggacttggcggagcgttcgtgaccctggcaaccatcaaccagttccgtcccagcgttatcgtgggacagggtttcattgccattgcggcagtaatctttggcaagttctctccggagggcgcgaccaaggcatgtctgctgttcggactttgcagtggtatccgttccctggcagcccagagcaatgtggtatccccgaacctgatttccatgatcccgtatgtggtgaccatcatcgcactggtactgttcgttggaaaagcccatacaccggcagccaacggtaagattttcgtgaaatccaagtaatgagctggattgatctgcagatagaatcagtgaagaaaatggagtgaagacagtgatgtctttgctccattttttgcgtctgtcagataattgcacatttttctattcgtgattcttaccaaatttacatgttgattcttggcgatagtcacgaaaaaattttaaaactgccaaatggcaagaaaaaggacttaaaactgacatttgtcctttcttagctgtgagaaatgtggtataaataaagtagaaaatgaaaagaaaatggataaattaaccaaaatgagtgaagcagatgaaatcattcgaaaactgaatacggaacagcgggattacctgaaccgttactttgctcatgcaccggaaagtgtgactggaagtatgcaggtggtacggatgccggaaggaacaacatttattcaggaaggaatgccagtggacaaagtgtatgttcttctgaagggatgcgtttccgcagtcgactaccgggtacgggaaacggtctatggtttttgtcattttaatcctattgagacatttggtgctatggaaatcttaggacatatggatcagtaccggactacgctggcaacaaccagagacagcttatttctgaagataccgagagattcctttgaaaaatggattcttaaagatgtggatgccctgcagatggagacagagcggattatcgggtatctgttggatcagtccagaaaagagcgactttatgtactgcttcccggaaatgaacgggtttatctcatccttacaaatttgtatgagacctatgggaagttcgatacttacagtgtgtatatgagccggaaggatttctcggaggttacaggattatcggagcggacgattaccagagctttgaaggaactggaggaaaaaaagcttatcaccagaaatggctggaacatcgtaatgacatggaatcaatataacaagatcaaaaaactgatgaaagatcaaatcaacgaaatgggggaatgacagatgaaatattcagaaaatccagataaacagtatcacatccaggtaggagagggtgacgttggaaaatacgtgatcctgccgggtgatccgaagcgctgtgccaagatcgctgcatattttgatgatgcgaagctggtggctgacagccgtgagtatgtgacctacaccggatatcttgacggcgtaaaggtaagtgttacatcaactggtattggaggtccgtccgcatctatcgccatggaagaactggtaaaatgtggtgcagacacttttatccgtgtaggaacctgcggtggtatgcagctcgatgtgaagagctctgatgttgtgatcgccagcggagctatccgtatggaaggaaccagtaaggaatatgcgcccatcgaatttccggcagtggcggacattgacattgtcaatgcattgagagcttctgcgaaggaactggggcagaaatcacacgtgggagttgtgcagtgtaaggacgcattttatggacagcattcaccggagactatgccggtcagctatgaactgctgaacaaatgggaagcgtggaaacgccttggatgtctggcatccgagatggaatctgcggcattgtttatcgtggcaagcacactgcatgtacgctgcggatctgtatttctggtaatggccaatcaggagagagaaaaacaggggcttgataacccggtagcacatgacacagacatggccattcgtgtggcgattgaagcaatccgtaaactgatcaaagaagatgccgagtagtaatcacgcagagtcacattcgcaaaattgcctatgcatggctctacaatttgaaatttatatcacatgaggaggaatcaataacaatgcgtgacatttctatggaaagagtcaatgaaacaagaaagaacattctggaaattatcgagagtgcaaccctgacacatgagcagaaactgacctgcctggcgaatcaggcagattctctgatggaggtgcttgatcttccagaagggctggatgagcttctgaacgtgcccatcgaccgtaaatgtatctgcgatctgtccgagggacatgcgcctatgcgtccccgttacattatcccggattatgcgaaattcctgaaggagggaagtaagtttctgcagctggatccaccgacggatctttatgaggcactgaacagcctgatgatcttctacaaacatgtgccaagcgttaccaactatccggtatatgtaggtcagctggatgaactgctggagccgtatatcgatacggtagatgaggcacaggcaaagaaaatgctgaagctgttcctgacgcagatggatcgcaccattctggattccttttcacatgcaaatatcggaccgagagagaccaaggctggacgtcttcttctggaagcagagaaagagctggaaaatgcagttccgaacttaagttttaaatacgatgaggatatcacaccggatgattttgcactgaaagccatcgactgtgccatgcacagtgcaaagccaagctttgcaaatcataagatgttcaagagcgagctgggtgagaattatgtgatcgcaagctgttacaacggactgttgctgggcggtggtgcttacactctttgccgtctggttcttggaaatattgccaagagagcaaaaaatatcaaggatttcaaagagcgtgagcttccttatgtgctggatatcatggctcgttacatggatgcaaggatcaaatttgaggtagaagagagcggattctttgagaacaacttcctggcaaaagagggatttatccacagagaccgattttctggtatgtatggactggttggtctggcagactgtgtaaatatcctgtttgaaaaagaaggtatcaaaggacgctttggtcatgacgaggcagccaatgatctgggtgttgagatcatggagatcatcaaagagtttaatctgaatcataaaaataaatactgtgagggaaccaatggacattttctgcttcacgcgcaggttggcctggcagaggatgagaatgtgacaccgggaacccgtattcccatcggcgaggaaccggaggagctgattgaccagctcaacgtgctgaagaaatttcataaatatttcacctccggaacgggagatattttcccgattgatatgactgttcatcggaatccagaatatgtactggacattatcaaaggatctttcaagatggatctgcgttatctgtccttctactccagcgacagcgatgtgatccgtgtgaccggttaccttgtaaaacgttccgagcttgaaaagctggctggcggcgaggctgttctgcaggatactacagctctgggcctgggtgcagccagaaatggccatattctggagagaaaggtacgttgatcaatgaaagcagtaataaaccggatcattccgttcagcagtgtggatggtccgggcaaccggacagcgatttttttacagggatgcaacatcaactgtaaatactgtcacaatccggagaccagaaaaatgtgtgtacagtgcggaacctgcgtgaagaactgtccggcaggtgcactgtcctttgatgcagacgggaaagtggcatttgatccggcaaaatgtgtgcagtgtgatacttgcatccatgtctgtcccaatgacagttctccgagaacctgtgagatgaccccggaagaagtctatgcgaaggtgaaaaaacagattccgtttatccgtggtatcagcgtatccggtggagaatgtatgctccacccggattttctgactgaactgttccgcctggcaaagcaggatgggctgggaacgctgatcgacagcaacggaaccatttcctttgaagattacccggaactgatggaagtgtctgatggcgtgatgctggatatcaaggcatttgaaccggaagaacataaagaagtgacagatgtcacaaatgaaatggtgctgaagaatgcagtatatctggcgaaaacttccaaactatatgaggtgagagctgttattgtaccggatctttatgatacagaaaacagcgttcgtaagatcggtgattttctggcgccatatctgaagatccatgatatctgcgtgaagatcatagcttaccgacccatgggcgtgagagaagagtatgcgcattaccagattccagatcaggactatctgacacatctggcagatatcatgaaagaaaaaggatttgaacacgtaaccgtgatctaacagggcgcaagagaaaaagtaagcggctgcagagcaggcatttactttttctgcgcccgttaacgagcaaacaacctgcgaagcaggcaggagatcgcgatagcgcgggtttgcagcctagaaaagtaaacaggagggaacaagccttggcaagaacaagccatatggatgcgagtaaagtggtcattcagatgaaggacatcgtgaagaaattcggcgactttacagccaacgaccacatcaatctgaccgtgcacaaaggagaggtacatgcgatccttggagagaacggagccggaaagagtaccatgatgaatgtgctctgcggactctataagccgaccagcggtcagatctttatcaatgagaaagaggttcatttcaacagtcccaaggatgccattgatatcgggatcggtatggtacaccagcatttcatgctgatccagccattcacggtaacagagaacattatccttggcatggagccgaccaaagggctgaccgttgacaaggagactgcaaagaagaaggtactggaactgtccgaacgctatggcatgaaggtagatccggatgcgaaggtggaggatatctctgttggtatgcagcagcgtgtggagatcctgaaggttctgtaccgtggtgcagagacactgatcctggacgagccgacagcttccctgaccccgcaggagatcgaaggcctcatggagatcattgagaacctgactgctgacggtaagagcgtgatcctgatcacccataagctgaaggagattacagcatcctctgacaactgtaccattatccgccagggtaaatatatccagacagtgaaagtggcagatgtgaatgaaaacgagctggcagctatgatggtgggccgcgatgtcaacttcaaagttgataagaaagagatggagccgggtgaggtagttcttgaagtgaaagaccttcatgccaaagactaccgtggtgttgagatcctgaaaggctttaacctgaatgtaagaaaaggcgagatcgtaggtttggccggtgtagatggtaacggtcagaccgaactggtagaagtactgaccggccttcggaaagcagaatccggtacagtcaccatgcttggaaaagatgtattcaataagagtccgaaggagacctttgagaatggcatctccagtatcccggcagaccgccagaagcatggactgatccttgatttttccaacgaggataacatgatcctgcagcactttgaggaagagccgttctcctcccgtggatttctgaaccggaaagccattcgtgagcatgcagaagaactgatcgagaagtttgatgtacgtccgagaggatgtgcagaagcacctgcagggacactgtccggtggtaaccagcagaaagtcatcattgcccgcgaggtgaccaatgacaaagacctgctgattgccgtgaacccgacccgtggacttgacgtaggcgcgatcgagtttgtccataaatatctggtggaacagagaaataagaaccgtgcggttctgttagtatcctttgagcttgacgagatcatgagcctgtctgaccggatcgaggttatcttcgatggtcagatcaccggcagtgttcctggaaaggatgcagatgagaaagaactcggatttatgatggcaggaggaaagacagatgaataagaagaaaagtattcttgagagcaatgtgctttatacgatcattgcgatcattgccggcttcctgattggtgccatcttcctgatgatcgccggtatcagcccggcagttgcttatggaaagctgttcagcagcattttcagcaaaccaaaatatctggtgtggacgttggtatatgcaagtccgctgatctttaccggattgagtgttgccttttccttccgcacaggtgtatttaatatcggtgcagagggacagtttgtgatcggtggactggtagcctgtgtgcttggtattgtgcttgaccttccaccggtcatccatgccattgtatgtctgggggcagcagccctggcaggagggatctggtccctgatcgtaggtgttttgaaagttaagagaggtattcacgaagtattatctttcattatgtttaactggatcgcattctatctctccaactacgtggtaaaccttccggagatccacagagagagcagtgaggcaacccgggatattgcaacctctgcaaggatcctgctgccatccggtcttcagaaagcactggattgtaatgccgcacactggggcatcgtttttgcgatcattgcagccatcttgatctggatcattattgagaagaccacacttggatacaaattaaaagcagttggtttcaatagcaatggcgcacagtatggcggcatcaatgcagaccgttccatcctgacggcacttggaatctcaggacttctctccggactcggcggagctgttcaggtgctcggtatggctggccgtctgagccagtttgccggacaggagggcttcggattcgagggaatcaccgtggcactgatcggtggatccaatccgatcggctgtatcttctcaggcctgttctacggtgccatgaagtacggtggatccaagctgagtatcgtaaaggcaccgtctgaggtagttgatattatcatgggttgtgtagttcttctgatcgcgatcgcccatgtatttaagatttttgtattaaacgcagcaaagaagaaggaggggaaataagatgaatgaattaataaaagacctgggtcttctgatcaatgcgaccctgatcgcaaccccgccgcttcttctggcagcactgggctcctgcttctctgagcggagcggagtggtcaacatcggtatcgagggtatgatgactatcggagccttcacaggagcggttatgggactgaccaccggcaatggctggatcgcattcctgtgtgcaggactggcaggtgccctgttcggactgatccatgcatttgcatgtatttcctgccatgcagaccagactattgccggtacagccatcaacttcttaggaccgggtcttgctctgttcctctgtaaagcaatgtacagcaattcttctgatacaccggccatggatcccagctgtaagctgccgaagctgttcgagggtgtgttcccgaccggatccttctggaacaacgtactgaatgtatatgcggttgcgtatctggtatttgtgcttgcctttgtctgctggtttgttttctataagaccagatttggtgctcacttaagagcagtgggcgagcatccggaagcatgtgagtctctgggaatcgatgtatataaagttcgttacacctgcgtgatcctgtctggattcctggcaggacttggcggagcgttcgtgaccctggcaaccatcaaccagttccgtcccagcgttatcgtgggacagggtttcattgccattgcggcagtaatctttggcaagttctctccggagggcgcgaccaaggcatgtctgctgttcggactttgcagtggtatccgttccctggcagcccagagcaatgtggtatccccgaacctgatttccatgatcccgtatgtggtgaccatcatcgcactggtactgttcgttggaaaagcccatacaccggcagccaacgg

SEQ ID NO: 2306 - DNA, 32759 bp, Unknown
  16S sequences of unknown bacteria
accggtatatttttttcggcaaatctgtttactgctgtctgttgagttccttgatggattttgtaacggtgtgcgcgatgggcgaccagccgacctttttgaagatggcaacgaccgcgatgggaacgtaagtaaacataaatatggggaacgtgaaagtgtaaagaatcttgcccgcggctgagcagtcgatcttttcccattcggatatagtcgtaataagtcccactatgtaaagcgttgcgtaaaaactcagtatcgtgtgcataacgctgacaagagtgcttgcaacaagcgtcggatttgcggtaacaagtccgataagcaggaacacagtgttcaaaacaaggcagaacagcgaaagaataagtgcgggcataatgttcatcagcatatcgtagcacgcaaagccgaatttcttggagaaaatgcccttgcagagtttaccgccgtagttgccgagaacctgataaaagccttttgaccaacgcatacgctgtttccatgactgcgcgaatgtttcgggctgttcgtcgaaaaattcggcatcgtgaacataacctatgaggatatgtttcagagccgcatccacggagaactcaatatcttcggtcagaagattgtatttccaaccgccgttcatatcaacgatacgtttgcttatcataaagcccgtgccggaaacagcgcagttcgtgccgcagataaagcggggattgttcaggaacttcgcttcacggacgaaccaaagcgaatagcctgcgcttatccagtttgtgccgtagtttttgctgtttctgtaagatgtacaagcctcataacccgcgtcaaatgccttgttcatttcaagaacatagttgtcctttataacattgtcggcgtcaaaaataaagaatgcttcgattcctttatccgagtgttcggtgtttattctgttaaaaatgaaatcaagcgcataaccttttccgacatgagtctttgactcacgctcgtaaactatcgcacccgcgttgcgtgcgatttccgcggtgttgtccgtgcagttatcggcaacgacaaaaatatctataagttctttcggatatttttgaagtttgatgctttcgataagaccgccgataacgttgctttcgtttcttgcggcgatgacgaatgcaaaatgatgcagttttgatgcgtctttaagtttccttttgtttttgaatatgcctattccgatataaacaagttggtaagaataaagcaaaaggaaaaagaaaaatacaaagaaattgaatattccgataaaggtttccaaaatattgccctcccgaaagtatctgcaaaatgggatttttttcgttctataaccgtttagacgaaatcgggaagaaaaagttccgctttttcgtaattttttttaataatcaaaaaaagagcggctccgcaatgtgccgaaaacacatgcgaagccgttccgctttattcggttttgtacgtttcttatttctcttttacgagtttgcaaccgctttcaacgagttctttatagttgtcgtttaccgtgccggaaacggagtcaaaagtgatctcgccgtcttttacggtaacttttactgaaccgtcaccgagtttgagcgtttcgccgtcgaattcatatttctgaccgtcatcggaaacaataaagccgtcttcgccgacttttcctccgagcatatcggcaataccgtcggcagtcatgctcgatttaagcgaagccgtcgtgagttgaccgagttgaacacaataatctttccatgtggagccgttgagagacgcttcaagttcatctgcggaaacaccgctcatagccgcggcatcttcaatgctcatttcgcccatggcttcaaaaacgctgttgataagcgcttcataaccgtctgcgaaatcttcgggagaaaccagcatcgcataagttccgtcctcgtagaaacgaagagccatggaattgaaaagttttcctacggtgtctcttttaacaacttttgccataagatcattcagcgcatcgctgccgtcagtcatcgagcctgccatatcaacacacattgcggcgaatttttcatcgtcaagttcggatgcgtcaaagcgccacgtgcccacaaggtcggaggcagttatttttgcttctgtcgtggtcggagtttccgttgtggtgggtgttgtttcttcgtcttttttgcaagcggaaaggctcacaagagcaacaagcgcaagcatcaaggcaatcagtttcaatgattttttcattttttaagtttcctttctctgaaaaaacatagatgtagagtgcggaataaaaacattttccgcaaagttcggaacaaagtatagcacaaaatgccgtgtttgtcaatgataaacgaaaaaaatgcggcaatgcttgacgaaagacacggcagatggtataattaaaatatggaagcgtgcaagggggcatggggtttccgagtcttcggttgcgcgcaaaaagccaaataccgcggctcggaagaggcgcgaccgaaaggaattgacctcaaatgacaaaagaacgcagagtcggaaccgtttcccgtggcatacgttgcccgattataagagaaggcgacgacttggcaaaaatcattgccgacagcgtacttctcgcggcggaggacgagggtttttcgctgaatgacagagacgttatcgcggcaacggaatccatcgttgcacgttcacaaggcaattacgcaacagtagacgatatcgcggaagacgtcaaaacaaaactcggcggaggcaccgtcggcgttattttccccatactttcccgcaaccgttttgcaatatgcctgaaaggtatcgcaaaaggtgcgaaaaagatagttctgatgctcagttatccgtcggacgaagtcggcaacgaacttgtttcgatagacagacttgatgaagcgggcgtcaacccttacagcgatgtgctgacgcttgaaaaatacagagaactgttcggctacggcgttcacccgtttacgggagtggattatgtggcgtattacggcgaccttatcaaagaatgcggcgcagaagtcgaaataatctttgcaaaccgcgcacaggcaatacttgactacacggatacggtgattacctgtgatatacacacaagacaaagaactaaacgcatattgaaagccgcaggcgcaaaaaccgttctcgggcttgacgagattctgaatgcacccgtcaacggcagcggctgcaatgaaaaatacggtcttctcggttcaaacaaatcaaccgaagacaaaattaaactgttcccccgcgaatgcaaggcgcttgttctcgatattcagaaaagaattttcgacgcaacaggcaagcacgttgaagttatggtttacggcgacggcgcattcaaagacccgcagggcaaaatctgggaactcgccgaccccgttgtttcccccgcttacacggacggacttgaaggcacgcccaacgaactcaaactcaaatatcttgcggacaacgatttcaaagacctttccggcgacgcactcaaagacgcaatttccgcctcgataaaagcgaaaaaatccgaccttgtcggcaatatggcttcgcagggcactaccccgcgccgactgaccgaccttatcggctcgctctgcgatctgacaagcggttccggcgacaaaggcacgcccgtggttctcgttcagggatatttcgacaactatacaaataattgaggtaaagataaatggaagacaaaagaccggaatcaatgaaaagaataaacaccaaagaacttgccgatgcgttcatagaagaacaagtggcgcttctccgcaaacaaataggagacaaaaaagtgctgctcgcgctttcaggcggcgttgactcttccgtcgttgccgcgcttcttatcaaagccgtcggcaaacaactcgtttgcgttcacgtcaaccacggactgctccgcaagggcgaacccgaacaggttatccgcgttttcaaagaagaaatggacgccaacctcgtttatgtggacgccgttgaccgttttcttgacaagctcgcgggcgttgacgaccccgaaacaaagagaaagatcatcggcgcggagttcatcagagttttcgaagaagaagccagaaaactcgagggcatcgaatttcttgcacagggcacgatttatcccgacatcgttgaaagcgcaggcgtaaaagcgcaccacaatgcgggcggacttcccgacgacctcaaattcgaacttgtcgagccgcttcgctacctttataaagatgaagtcagagttgtcggcaaagagctcgggcttcccgacggtatgattttccgccagcccttccccggccccggtctcggtgtacgttgcctcggcgcaatcacccgcgaccgtcttgaagccgttcgcgaatccgacgcgattttgcgcgaagaatttgcaaaagcggggcttgaaggcaaagtttggcagtatttcacggcaattccggacttccgctccaccggcgtcaaggacggcaaacgctgctttgaatggcccgtcatcgtccgcgcagtcaacaccgtggacgcgatgaccgcgaccgtcgagccgctcgacttcgccgtactctccaaaatcaccgaccgcatactcgccgaggtcaagggcgtcaaccgcgtcgtctacgacatgaccccgaagccctgcggcacgatcgagtgggaataatctctatattcttgcattaaactttatgtttgtgcggcggaaatccgccgcacattttttatttgaaagtggagtttaagactaagtctcgcaaagcgagattgttgagagaagcgcattgaaaactgatgaaaaatatgctataatttttgtaacgtttcggagattttgttatctaataaatgaaagagcaaagggaatgcaggcgcggggctggaacaaaggatatatggacacataaataaagggatacaaaaacacagaaaatagcgattctgcaaaaaatgagcgcacatgaaagatatacgaagattcaggaaagcagtagaacacaaaacgcgggtatgaggaaacatgagcagaaaaaagaggaaaggacggtggcagagtgtcggagtttgaacgggtattccgagaaaacagggattatgtttttaagttcctgatgaaactttcgaggaatgcggcggtggcggaagagttgacgcaggagacgttttttagggcttatatgaactattccgcgctgcgggacaagacaaaagtttcgatatggctctgtcagattgcgaaaaacgcgtactacgcgcagtacaatgagaaaaagcgaaccgttccgattgaggagcccgagacgctcgggacaagcgaaagcgcggaagaacggtatatgcaaaaagaactgtcgcaaagggcgattgagtgcctgaacgagttggaagagccctacaaagaggtgtttatgctttcggtgttcggcgggctttcgttccgagaaataagcgaagcgttcggcaagagcgaaagttgggcaagagtcactttttacagggcaaaacagaaattgtcggaaaggttgatgtaaaaatgaattgcaatataattaaagatcttcttcctctttatgttgacggatgttgctgtgaagaaagtgcaaaagtgattgaagagcatattaaaaactgtgaagaatgcggaaaatatctggaaagtatcaaaaagccgattgaaatgaaagcaactgtttcgacgccgatgaaagctgtcagaatcagcgaatggaaagcgtctgttttgcagtctgttctgctgtttttggcatttgcggggataacagccggtgtcactctcgaagcggcgacaccgtcgggaggcggcaacggtttttgggcggtaacgctcattgttcccttgacgggttttctcctttcgttggcaaactggtattttgtgcgattttataaaagcaaaaaacttttttccgtgtgctcaatgtttgcgacgctcggggtttccgtcggcggatatatttggagcgcacttcactattgcgcggatttttccgaaagattgacagatgttcaaagttttgcttccctgttcgggttcggggtattgataacggttttgctttgcgtattgtcaaaggtcttatcaagcagatatgcgacgatgataggaaaggagtaaaagaaattgaaaaaagcggcgaaagtgataatatgggcaacggtgatttggcttttgttcttgtccgttacacggatcgcgggcataatcgcgaagtatgaaatctatataaaaaccgattgggcggtcgccgttgtcggcgcggcgcttgcgttgggaacggtaatagcgacagaaatcgcaagaaaagaaccatttcccgtattttacagagttctgcttattctgacggttcctgtctcaatcgtgagcacatttccgttgatatcgcaaagaggaaatatagcggcaacatttggtgcggtggcaacggtcatatgctgcctgttcgcggcaatacgggtaggtttgccaccgaaattcggtatccccgcttcgctgatttcgttgctgattgtggttccgctgtgtatttatgcgttttttaccgttatgctgaagaattttggtgagacaacggttgtagatacgtttgaatcgaccgatgggacatactatgcggaattgataagcgccgacgaaggctctctcggaggaagtacgagagttaaagtatataaaaacaacgatattgacttcttaatacttgaaatccgcaaaccgaagaaagacatttacgtcgggaattggggcgctttgtcaagagtcgaaatgcattggcagactgacgatgtgcttataataaacgacgttgaatatgacatgaatgcagaatagaagaaagaccgtccgtttcgggaaaaccgatacggacggtcctgttttataaaaaaacgcaatatacctttcttttcaaatgtattgcaaatattgccgagcattaccatgttattcaatgctttgcaacgctttctatgttctgcaattcaaaacggtattcctggctgcaatcgggatattttgtcttgtccaccttgctcaaaaacatatcaagcggacgaatccataaactgccgtcaccgtaaagtttgcggtaaacgacatattcgtcgcccgtttccgaatgacgggcaatgtcttcgacaagataataatcgcctttgaagtggcgatacacgcgctttaactctattttttgcatatttactccccctgctgtttctttttcgaacgacgtccgagataacggaaaacggtttttttataaccggcatattcgtcgccgaatgttttgagcatatatttctcttcctgcaatatctgcaaatgaagcattacaacggcaaaagcggagaatacaagagaaacggggttgaaaaagagcaacaaaacgccgatatacatcaaatcaaatccgcagaatgcggggtttctggaatatcggtaaatgccgtttgtaacaagtcttgtcttgtctttttcgggaatgcccgcacgccagctgtctttcatgaaaagcacggatatgaggaacagaacgtctccgcacaaaccgagacagaagcccgtaaaacgtgctcccgacggcatatagttccaatcaagcgcaacggagacgagttccgcaacaacgacggaaagcgttgccgccgccatcagaagttcgaccgtgcgcagtcctttttcttttcggcgacctatctgacgggtctgtattccgcgttttttctgcgcgatttgttttgcaaaatatattccgtagaaaaacgcaagaactacaagcgcaagcgcacggaaaagccatggagaatctataatctgctgtattgcctgtcccaaaacaacgtctcctatcttcttttgtaaataattatttcgggttcgctgccgttcacgctgtaagagcagacaagaatgaaatctttatcagcaacgacgccgtagcaaacgccgaggtcggcaaactctatctgcgagccgagataaacgtttttatcgttcagaaattttactttttctccgctcgggagcgaatattcaagattgacgaatgcgccgcaaagttcataaagcgcgtccgctttcggaagttcctcacgggcaagcaatgcgtttatttcgtcaagcaagccgcgtttgaacgtttcataggcggtctttcctccgaatcttatgtactcggctgcaatacattttcctccgaacgggctgccgcaggtctctgcgcacccccgacattcgtctttcattttacaggcggaacaatccgcaccgcatatactgctcatttctttttttccttttatatcagttgttgtccgtcgctttctgcgtcacaaattttaaagcgtaacggcgtgacgggtgcgcgataagaagcgctatgaatatcaaaaccgctgtcagcgaaaggctgacgggatatgcggtcattatggtttcgaacgttctgcttttcggaaaaacggcggcgatccaaacgatacgcaccccgcaaacaccgagagttgtcagtatcgcgggcgtcagagagatgccgaatccgcgcagataccccgacattacctcataaagcatactgaaaatatacgcaaagaagattgttacaaggcgaacataaccgaggtctataaccgcagggtcattgttgaatatcgagagcaggaacctgcccgacagaaggactatgcctattgccgcggcggttgcgacagcgtcctcgataaggcataaaaacaatgttttacgacagcgtttgagttgccccgcaccataattctgaccgacaaatgttgtgcacgcctgactgaaagagttcattacgtcgtatgcaaatatttcgatattgaacgctgcgctcgaagccgccattacaacttttccgaggctgtttatggcagactgaatgacaatgttggaaacggaaaataccgcgctttgcacgcccgcaggcagtcctatgcgcagaatttttccgagcgtcggaagatctattctaagttttttaggttcaaggcggatatatttttccgacttcatcagttttatgaaaagaattaccgcgctgaccgcgtttgaaataacggtcgctatcgcaacgccgttgacgttcatgtgaagaactataacaaaaaacagattcagcagcacattcagaacgcccgaaacggcaagcgttataagcggcgtttttgtgtcccccacgctgcgaaaaacggcggcctcaaaattataaagcagaataacgggcattccgagaagatatatacgaagataaagaagagccaaatcaaaaacatcggaggggacgttcagcgacgacagcagcggcgcggctgcaagttcgccaatcaacgcaacggcaagtccgcctatgacggaaacgattattgaagtatgcacggcgcgggacgcgccgttttcgtcgtttctgcctatcgcgttggcgataacaacattcgcgcccaaagctattccgataaaaagattaacgataagtcctattatcgggctgtttgctccgactgcggcaacagcaacagtcttttcgccgcccgtaaagtttccgacaaccgcaatgtcggaagcgttgaaaagttgttcgaggatcgcggtcgcggcaacaggcagcgcaaaaagaggcaacttgttccaaatcgaaccgtgaagcatatctattccctgttttttctttgcctgtttcacgggaacagtcctttcaaaatcaaaatgcagatagattatagcgttgttcttttacaaaactgtttcgggattattaaggtatggcaaataattttaaacacacgttttcaattgtttaaaaatcaatcagaaaaagataaatctgtaaaaaacgactgtgccattccgctatggaataattatagcatatcgcacagtaaaaatcaatatcttgaaaaaatcggaaagatatgatataatacggcaaaagccacgaaaagagaacgaaaaatgagtgcggttatcagaaaagcggaattgaaagactgcggcgcgtgcgtcgaaatttacaattattatattgaaaatacaacagtgacttttgaagaaacaccgctgacggtcgaagaatttgaagcgcgttttttgcgcataaccgaaaaatacccgttttttgttgcgaaagaacacggaaaaacggtcggctacgcatatcttgacacgttcaatccgcgttccgcatacagaaaaacgacagacctttcgatatatctcgacaaaaacaccgtatcaagggggctcggctcgttgcttcttgacaaaatcgaaaaagaagcggcagcacgcggtttcgaaaacataatttcattggtgacggaagaaaacgccgccagcgttctttttcataaaaaacacggattcacacactcagggcggcttgaaaaggtcggcgtaaaattcggaaaagaactcgatgtgctgtttttgcagaaactgttgaaaggaactttatagtatgttaagaatacctacggcaaacgaatttgaagaatattccgaacgggcttatgtgcttgcgcttgacccgtcgagatcttcgttcccgtcttatgcggacggaataaagacaaaagaggattttcttgcaatcgcaaaacgaggatttgagagcgaaaacgaagagatatacatttttgagcacggcggcgagatgcgcggttggatacatttttatgtaatgaaagaagataaatacataagtctcgaagcgtttgaaacggacggatttgaaaaagagcagtttgcggacttcgttgcattgctgaaagaaaaatacacgggatacgaagtcaccgcgggatttccgtcacaaaacgaaagagccgtttcggcggcaatcgaaaacggctttgaaataatagaagaaagtgcggtaaatatactgtttttctcggattatgaaccacagtccgaaagcggaagagttgaaccgctgacgaaaaagaatcttgcggtttttgcaaaattgcatgataaagttgagatgtattggaacacaaaacggttgaccgaggcgtatttcggaggtgacaagtggcgaatatatctgacggaaaaggacgggaaagcagcggcgatatactttgtttatgcggaaaatatagcagagatattcggacttgatttttcggacggttttgacggcactgcggcggaagagttgctgactgcggcattgaacgaggcaaagaaaaacgtgagcgcaaaggcaatgtattggtttacggaagacgagagggagaccgaactcgcaaaacgcttcggcgcagaaaaattcacggattacaaggcattttgcctgcatatataaggagacgatatggcgacaacagaaagttacattaaatttgtatgtgaacaaatagagggcgtcggtgttatccgatacaaaaagatgttcggagaatatatggtttatgcagacgataaacccgtattgcttgtgtgcgacgatacggtttttgttaaaattctgcccgaactcgaaacgcttatgcagaatgcggaaaagggtcttccgtatgacggagcgaaagagcactatattctcgacatagaaaaccgtgatctggcaagagaagtaaccgaactgcttgccaagataactcccctgccgaaaaagagagtaaaaaaatgagaactgaaaaaatgaacaaaccgcattatcaaaacacgatgtacgcctgctttgtgggctatatcgttcaggcgatagtcaacaattttgtgccgctgctgttcgtcacgtttcagacatcgtattcgatacctctttcacggataacgcttttgataacgataaattttgccatacaactgcttattgacctgttgtcggcgaaattcgttgacaaaataggatacagaacatccgtcattatcgctcacgcttgttcggcggcggggcttattctgctgacgatacttcccgaagtctttccgagcgcatttgcgggcatagtggtctccgttgcgatatatgcggtcggcggcgggcttatagaagtgttgataagcccgatagtcgaagcgtgtccgacagacaacaaggcaacgacaatggggttgctccattcgttttactgttggggacacatgggcgtggttctgctttcgactgcgttttttgctctgttcggaatagaaaattggaagatacttgcgctgatatgggcggctgttcccgttataaacggactgtttttcacaaaagttccgatgttctcccttattgaagagggcgaaacggggctgtctattaagcagttatgcaaaacaaagatattttggctgtttatgttgatgatggtctgtgcgggagcgtcagagcaggccgtcagccaatgggcttcgacatttgcggaaaaggggctcggcgtcagcaaaaccgtaggagaccttgcgggtcccacggcttttgcggcacttatgggaacgtcacgtctgattttcggcaaattcgggaaaaaacttgacctcgataagtgcatgattttcagcacctcgctctgcattgtctcgtatctgtgcatttcgcttgttccgtctcccattgtcggatttatcggctgtgcggcgtgcggtttttccgtgggactgctttggacgggaacattcagcaaagcgtctgcggcaatcaaaaacggaggaacggcgatgtttgcgctgttggcgttgggcggagacctcggctgtgcgggaggaccgacacttgcgggattcgtttcgcgggcgctgaacgacgacctgcacgcaggtattctggcggctattgttttccctatcacactcttcaccgggctttttctgtcaaaaaacacagcaaaaaacgaattgaagaaatgaataactgacaatcagacagaaaaattttgcccgacacattcaagccccttgcggcagcgcatgacgaggcgttaaaacttctgcgcggcagaaatgacttcagatggacttatatcagccccgcggcggactatcaggctgacggagcgcgcacgggagaatatatcctcggcggagaagagttgacgctgaacgcaaagggcgaaagcgttatcagttatgcggactatgcgctggcgcttacggacgaactcgaaaaaggaaaccacataggacagcgtatcagcgttatcggcaaataaaagcggggacaaagacctgcattttcgaaggaagagaagtcatgacacaaagcgaaagacggctgtttttgataaaatatctgttcgaagagagggaagcgtgtcgggcttcccttccgccgatgaacgaagaggagcaaaaaagagttttgcgctcgcttttgaatatacgcgaaccgaaagaaccgaacgcggattttttgcgggtgcaggacgcttatctgcaagaagaaatacgggaaaaaggaataacggacgcgaacactctcgaacctgtcgaagacggaatatatctttggcatggcgatataacgacgctgaaatgcggcgcgatagtcaatgcggcaaactcgcgtctgttaggctgttttgcgccgtgccatctctgcatagacaacgctatccacacctttgcgggcgtgcaactgcggcttgaatgcaacagaatcatgaccgtacagggataccccgaaccgacaggcaaagcaaaactgacaaaagcatataacctgccgagtgaatacgttctgcacacggtcggaccgataatcggcggcaaactcacggaaaaagacgaaaaagaacttgcatcgtgctatacaaactgtcttgttcttgctgcaaaaaaagggataaaaagcgttgctttttgctgtatttcaacaggagaatttcatttcccgaacgaaacagcggcgcacatagcaatcaaaacagtccgcaattttctcaaagcaaacaaagatataaaggtgatattcaatgttttcctgcaaaaagacctcgacatttacagacgaattttcggcattgacggctgaacttgcaaaagatcttcatgaagcggacgcggtcgttgtaggtgcgggtacgggactctccgcagcggcgggttttgattacgggggaaagcgctttgaaaaatacttttcggattttcgcgaaaaatacggaataacggatatgtactcgggcggtttttatccgttcgaaacacaggaagaatattgggcgtggtggtcgcgacaaatactctgcaaccgttatgaagtcgatgtcggaaagccgtacaaggacttgcttgcgctgcttgacggaaaagattattttgtgctgacaacgaatgtggatcatcagttccaacttgcggggtttgacaaaaagagactgttctacacacagggcgactacggactttttcaatgttcacacccgtgcagacaggtaacatacgacaacgaacaagccgttcggcaaatggtcaaagaacagaaaaacatgaaaattccgaccgaactgttgccaagatgtcccgtttgcggcgcgccgatggcgatgaatctacgcacagacgaaacatttgtgcaggacgcgggctgggatgcggcagcggaacggtatgcggcgtttctgcgtgcaaggcgaggacaaaagctgctgtttctggaactcggagtcggattcaatacgccctcaataatcaaatatccgtttttgcgaatgaccgccgaaaacgaaaacgcggtttacgcctgtttgaacctcgggcaggcggttacggcgcgggaactcgaaaagcgaagcatctgcataaacgcagacatagccaaaacgcttgaagcattacttgacaacagataagaaaaagagagtccttgaaagggctctcttaattatttaaaaacagttcgaccattcggaaaacatattcgctcgcaacgcatataaagacgcaccatacggcgacggaagcggcgcgttttcgcaaaatcggaagtataacggcgtctatcaaaggccgcgaaacataaaccacaaaaaggctcataatgccccaaatgatgctgacgggcagacatatataaccgttcaggttcagcggccatgtttcataggaccaaaggcgggtgtgaaacaagaaatcaagcccaaacgcagtcaacagttcaaatgcggttattataacagcacagacaagtgcaaacgccgcgggattcaactttttcagtttgcggtaaagcagaagtataaagtttgcgccgaaaccgtatatcaggcaaaacggaagaatcaaaaatccgcgcttgacataatgccccgccattgcggagagagtgacggtctcccatatccaacctatcagggcatatatgagaagcacacagatatgataaagcgcgcgctttttgccgggcagtgcggagatgtcgaaaggtgtcatcgactttcctccctcggagcattttcggtaatctgttttatccatttacgcgagcggaaatgacggacacaaagtatgcccttgctcacgtcttccgcaacaaacataacgattattataacgacaaaatgcgtcggttttatcaaaagtcccgttatcagaactgcgggaattccgacaccgtaaagacctatcatttcgtaaatacaaccggtttttgtatcgccgcccgcgcggaatacaccgcagacaagcgtgtactgtatcattcttatcgctatccaacaaccataaaacaaaagacaatcggaagcaacggaacgggcggtctcggtctctatcgggaacagcgaaagaatgggattgcgaagcacaataagaacggcaccgagaacaacgcccacacacggcgtcataacggcaaaacgtcgagcaaccttgtatgcctcttcatggtcgccttttcccacctgcataccgaccataacggcggcagcgccgcagattccgacgaagaatacaaagaatatctgctgaatattttcatacagggtatatcccgcatgattttccacgccctgacgcgcaattaccataacatatatatttgtgcctatcgcccacatagtttcgttcaacaacacgggcgcggcgatgccgaaatactttttgacaaacggacgcgagaacgaaaaatagtctcggaaaccgcctttgaacggagtttttgcaacaaagacggaaataaggataacaaccgtttgtacggcacagccgagaaccgaaccgattgccgcaccgcgaagcccgagagagggaaacccgagatttccgccgatgaagcaataattgaaaaagatgttgactccgaccgacacgaaagaggaaacaagcggtatcataacgcattcgacggagcggagcgcaatgcacattatctgcgaaaaaacaagaaacggaacggcgaatgcaaaagtcgaaagatattctcccgcaagggttataatcgtttcgttgtccgtgaaaatgcttgccaaagcgttgggaaagaccaacagcgcggcggtatatataattccgaaactcatcgcaacggttattgcaaaacccgttgaacggcgaatgttgacacgatctcccgcgccccaatattgagaaagcaacgccgaacagcccgaagcgaatccgaaacagataacgttcagcaaaaaactgaaacgtgacgcaacgcccattgccgacgtcgcgtcgttcccgagacctacgaccattgcggtatcgacaagcgtggcgcatgaagtcagaagattctgaaatgcgataggcacagccaaccgtaaagcggttcttatgaaatttccgttattttttaatttattcatttttttcaacctatttatatataagacttttcacatctgcgggtctgatgattatatcacaaatacaaacaaaaagcactcgaaaaagcgaattgttcaataaatgttcacatagcaaagcacagcgctccgaaaaaactgatgaaaagtatacaatatataatgacggacggattttttgtcaaaaagggcttgaagtttatgcggacttttgttataatataaaaagcagacagtcggcaaaatccgacttatgatttttaaggagaaacattatggacgtagtcgtagggttactttgcggcgtcgcgttgttccttttcggaatgcttttaatgggaagcggtctgaaaaacgtcgcgggaaacaaacttgaaatgattcttttcaagttaacaaataccccgctgaaaggcgttttgcttggaaccggagttacggcgattattcagtcctcgtcggcgacttctatcatggcggtcggatttgtcaattcgggcatgatgaagatgcgtcaggcgataggcatcattctcggagcgatactcggaacaagcgtcacgggctgggttgtctgtctttcgggcatggacggcgacggaggctcggtctgggtcaaactgctttcgacatcgactttgacgtgtgttgttgccgttataggaataatcctgcgaatgttctgcaaaagcccgacgcaaaaccatatcggagatattcttctcggctttgcggttctgatgaccggaatgtcgatgatgagcgacgttatcaaggacggcacgggcgtttcagagatgtttgcgaaacttgcccccacgttctccaaccccattgtgggtataattgcgggtatgcttataacgtgcgtcttgcagagcgcatctgcgaccgtcggaatcttgcaggtactttccgtcacgggagctatctcatttgagattgcgctcccgatagttatgggtatagcgataggcgcggctgttcccgttcttctttcagctctcggagcgagcgttgcgggcaaaagaaccgcgtttgtatatctgcttattgacattctcggcgtcgttatatgggcatcggtattctatgccgcgaatgcgattttcggtggtttccccttcatggagatggaaatgaacatggtctccattgcactgatgaacacgcttttcagacttgccactgtcgttgtgcttatgccgttcacaaaagtgcttgaaaagatagttactttcatattcaaggacaagccggacgacgaagaagactcggacgatatagacaaactcgaagaacgattcctcacccaccccgcaatagcgcttgaacagagcaacgaagcggtttgtgcgatggcgcgaaaagcgagaaagaacctttccagagcgatgaacctgctttacgggtacaccgaagagggttaccgcaaagttcaggcaaaagaagaggttctcgaccgctacgaagacaaactcggaacataccttgtcaaactgacacgacgcgagttgacgcaggaacagagcagcgaagcatcgaaatttctgcatacgataggcgattttgagcgcatcggagaccacgcggtaaatattgcaaacgcggcaaaagagatgaacgcaaagaaacttgtgttctcccccgccgcacaaaaagacctcggggttatcagttcagcgctctctaaaatagtgatcctgacggttgattctttcacggacaacgacattgccatggcgaaaaaggtcgagccgctcgaacaggtcatcgacgacctttgtgatgaaataaagataagacatataaagcgtctgcgcgacggtgactgcacccttgacctcggttttgtctacaatgacctattgacaaacctcgaacgcatagcggaccattgctctaatatcgcggtcgcaatgattgagttgaaagccgcggaatttgatacgcacgaatatctcaaccgcgtcaaaacggaaagttcgacagatttccagaacacatttgaagagttcagaaacgaattttcgcttaattaaaaaacaaagataagtgcaaaaggcgggcttcattcgagcccgtcttttacattaaaaaccgccctatcgggcggtttttaacatatttattttctttatttatctttcttatccttacttttggttaaaagataacgtgtttcaccaaagaatctttttgagttggtaaacatgcccctgaatacacgataagcgggaagaaaaggacgcaaccccttatgtttaaaaaaggcgggaaaaaacatttttaattcagattccgaaacagaaaacaatctttttttaatatagaaagactttgcctttctgctgttttcttccgcaccaagtcgattcaggttctggcgcatcatttcgttaaagttcccgtaagtaccgcaattcaagaaaaacagcagcatatcttcatcaacagaagaaagttcggttttctcaaagagatcaaaagcaaagttccgaagccttttttcaatatcggcaataccgagttttacaagttctccgtctatatatgccctgtcaaaactgcaacctgcattttttaaaaaaacataaagatcaacaatgctgcgcaaccccgttccggaggttttcaggtgcttgtctatatgaacaacggtatagatgtattcatcttcctgtgaatatgcaaagagattcgggtcatgagcattttgaacagcgcgttgccatgagtttttataatataaataatacgagcgattctcgggtacaagactgcgatgcatctcaaaaagcaaatcgccctttgtaaatcgctcatcatgtccgacaagacttcccacagcaaagccgagagaagtcataacatctataagtttattttgggcatccttcagacactcttttttttcttcttccgtttcgcccttaacatgaaatatcccgtcagttccttgcattatctccccataaagaatatcgttgtcgcacattgaacgcataccctctttgggataaaaacgaagcagatttatgcctttaaggggcatatacgacagtcctttttcactcatctttgcgaatattgcctgccgttcaaaatcaaaacgcatctcacggtaaacaatctgcaaatatatattcttccaatgggagtatattttttcctccggcttattctgaagtttatcaacggctaaaaaacttattccttcaagggaactctttcttgcagccgaaaagaccttgggccagtctgttttatcgggaatatcgaatggaacaacatcatcgagcgcacattttacaagatgtattagatattttcctgtctcaatatccgaaagagttcgattcgacattgtattcctctcgtttcaatttatttttactgtaaagtataagatacacgaatttactgactcacctttttatacaattcatcaatcattttttgtatattcttgagttctgtttcaagagttttcagttctgtctgatatttatcatcaacggaatcttctccgttatacacggacaaaacataatttcgtgcatcatcaagcgttaaaaagtcaattttttctctatccctaccgatacatatcgttaatagatttttaatgccgtaatccgtacaatatgatgtaagttgagatgtatcaaaagtaatttcgaaaataagattaccgcctgaatcttcaatagaagataaaaccgtattctttccggaaaaagaatattcccttgagtaaacgtaccaaagggacgattctgtaggaagagtaggattcaacccatcatccaacgaatccatcccttcgccgtgaaaagcaatatttttaatacctaaagccattaaatcattatcatatagcgaagaatacttgttgcgggcaaaatatacagtcgatacagtatcaactccaagctcttttattctttcaagaagttcttttaatgcctcgatagggtcttccgcagtagcagaaaagcctgcggcaacttcccaacctgcatttctgagttctgaaaactgctctgcggtgatacaatcaggattaccgacaaaaaactcttctgtcaaaacaagaactcccgggtattcacgtttttttaattccgggaacactacgttatatactttcttatgtgctccgacacaaacaaaagaaaccgttccttttccgattttttccctttcggcagataatttcaaagcctttaattttctgttgatttgatctttttttgcttcaagttgattcaattcttgaatttcagaagccgagccggattccggatatgcctgagattgacttttttttaaggatatcacaccaaatataagcgtaccgcaaagcatcaggcatattaaaataataattacggattttttactcatgtagaactatccttttttaataacttgtgcttaacagaggaaagtaaacaaagggtctttttgtaagcaactcgcaaagggtaaaaaaaacggcacatgcgaacatatattttgtacggcaaaccatccatatttatctttttattattgcgataaacctctgtcaaaactccgagaatattttcatccttgatgttgtactctttgtttatgcagttgtctccgcaaatgacatagccgtcgggaagaacttttatgatacggtgaagaacatattcattgcctcgtttataaagcggcacatcatattttttcaaccgtcccgaacaagggcgaacaactatattgtcacgtctgtcacgaagaagcggatacatactgtatccggaagtcgtagaagcatgatacccgttcttcttcaagccctcttcaatgctcattactcaaaaagccctgcctcttttattttcgaaataaacgcaataacgccctctgatatctcttcgggctttgcatcatgtctttttgccatttctgcaataacttcatcttcggaaagatctccggaagaaagaatttcccatatttcttttcccgtggaattgagtcttatcattccatgaaatgttttacttatctctcctgtggcaataacaacggtatcacctgcgatgtcacgcagaacaaatccgtcttttattttcataatcacttaacctcattttcaataaaataactgttgaaacaatttcctgtcattgcttcaaaactgactctgacagcctcaaaaccgatattgcagaaaagagaccaaaacggagcgctttgcaaaaacttgtccgcaagttccagttgaacctgtgccgaatgctctgctttcgggagatatacctgatgcataatcggcaacagcgcctcggaggcggaaagttttttgattgaatttttctctgcgcgatgcaaaacgcagacaccgccgagagggaaacacacatttttttcccaacgctctttccctgcccacggcgtgccgtaaacaaggcttgtcccgtcatctttgatttctattacaggcttatcgccgttaataattccgacaggatttccgaatgctttgcgccaaagtctgatatgcgttgatttgcccgttccgcttgcggcagtaaaaatatacgctttatcctcaaacgaaatcgccgccccgtgcataacaaatctgttgtaaagcggaagtttttccgctatcgctctgtatatacacaatatttccgcttcacattcggtctgcgagccgcactccatctcttctgcaatttgctcatcggtcacaaagacctcaaaatcaacaatatcgcagtcaggcattatatattttgagcaaaactctctgaattgagaatagcgaaaacgaacaagaatcgaaagccccgccaaacctaaaacaagtttatcattcaaaaccatggattccaatccgaatcctccgtgttttcttcaacattcaagcctgcggaacttcctgacggctccgcatcatcgggttttttctcggttgtcttctcctgtgccgattggcttcccttttgtgtagaagccgaagcatcacttccgaaaagcgaactgaaatctcccgattcctcatgacttgggtcatatgttttttccgtaagcccgccgctatacgaagaagaagccgttgtgggctgagacgtaggttcggatgtcggatcgtcctttctcgacgcggtgcaagcgcagagcgaaagcaacaaaacaaccgcaacacaaaccaaaatgcaaacaaaattactcttcatatttattgacctccttgcgatatgaagcttgtgtgcaaaaagagcagaaataaaaacttgttttttatttctcttcttaatgtacaaataaatgttcccctgttaagggtttcccgccgaataaacggtcgcccgaatattcggcgggaaaatttctcctgtgtcagtagattaaagatcgacttctacatcaggaaggatgatttctctctcagtagttttagttgtagtacttgtagtaactacatctacaacttcaaagatttcaatttcaggcctaatcattgtttctaccacctttcataagattagttagttgcaggctaacaacgaaaattactttttatatcagccgaatgcaacagcacaagaatcaccgtatttcagcattgcatcaagaactttaccgagagaggtggttgtatcaacaccaacctgtgccgcataagactgaatgctgtactgtgcagtattgcttactgctacgccgtctctgtatgcggtaaacgtgaaggtcgttctcatttcgttcggaagagtctttccgaagtatgcataatactgattctcggttccctcaacaggtgtaaactctgttacgttatagtctgttccgttgatggtaaatctgatcgaaagaccggttatatcatctgtcttaaacttaactcttgtattgataacgtctttgattgaaagaccaagtcccttccatgctaccgtgggattgtcaatcgtcgctacgcggccgttgagctgatttacgggagcagtaagagttgcgcttgcataagactggtcaaagcctacatttgcaaggtcatcaactttataattggtgtattcctgcaatgctgccgcatagttaaggaagtcaactatgaaagtcttaactttatcgtttgtattctggttattgtaaaggctctggcaatacttgtatatggagtaagatacggtcttggtgtattcctgaccgtttccggttccgtaaagagtcatttctacgggtactttcgccatgttcggagtaaggttcctgtacgagaaccagtatctgccgtcagaaccaagtacgccttctactctcttaacgtcgccgtcgcaagaaatcattgcgtatacgttctcatatgcttcgtatacagaagcttcaaccttaaagtggattgctacgctgtcgctgagcgaaagtgatacggtttttaccttgaaggggggaagtgccggtttttcaacaaggaatgcctgatagtattcgatgtcttcctgagctcccgcgtcggtgttgttggagccgcggttgccggaaaggttagctgcttcaaagttgtcaattcttgcctttacatctgcaagagaagcctcggtatatttaccggattttacccatgcagtgtaagtattgttaagcaatgtgtcgtaaccgttgttgtcaagaccgaatgcctgacggaacggataccaatcgttttcaagagaaccacccatagcttcgggcataatgagtgcatgcatctcttcaacggaaggataggactcggaagtaccgttctcccagtcgagggcaaggtatccctcagccttaactacaagagccacatagtttttataaatatcggttgctttgttggaatcaagaacgactctttcaactcttccgcggtaaatgggaacataaactttaagaacgctgtaagcatctttctgttcctgagtgaatttatagcttgcgacttcaagagcctggatctttgctttcaggctttcacaagcagcgataacttcggaagttttaattgtagtactggatctgtactcgtctctgatctgtacccaaaggttataaacttcattgtactgagccgttttgtaagtggtctgattcaaatctgtaattacagcgccgagaggccacagcgaagcgttgttcataacttcatctgccgcggttcttgtaccggcattcagtttaacggtatagcgaatcgttgtttcccaaagagaaacaacattggtagaaccaacattgatagactcgctaccgagaccggcttcaatgccttctttgattgcttttgcccagttctgaacatcagcatcagccttaatggactcaacgtctacgttgttatacatagtgatgaggtaagtaagagtagcatcaggggtggtaacacctgtgaagtctacaagtgtctgaactgcggttgcagcacaagcgtcaacagcagctacaagagcattgtactttgttctctgatcgaagaatctgccgccgccgttttcaacatcgaagcagctggcgtcaccggtatttgccatgtaatcgttaagagcgtctaccgctgcctgatatgcggttgcatcataagcagtctgcgtgccggcattggtataagtataactattgttgccgagagtaagggcaacgctgagtttgctgttccagtagtcagcagccttctgtctgccgccgcgaagaacataagcataagcgccgtaagtgtcctgaacgtaatctttaagaagagttccgtcggacattgcataggaattcatgtacgcggcatcggaagcagcgccgttgccgttcataattgcaagcatttcggtaaggaatactttgtacggagttcctgccgcacgaagaccttcggtctcggtgtcgggaattacgttaacaacgttaagatagccgtaccaagtatagtttgctccggaaggaagcgtaacagttgattcagcttcctgcgagggagttgtctgtgcgcaagcgtcgatagcggagcaaagagtttcaaacttagctttctgttcaagatatctcctgccgccgttttcaacgttgaagcaatagttatcattagcggtcgtcatgtaggactgaagagcagaaaggcatgcctgatatgcatctttgtcgtatgcagtctgagtagccgctgtggtataagtgtaaccgttgtcgttcatggaaagagcaacgctcagtttgctgttccaataatcaacggctttctgcttaccgccgcgaagaacgtacgcataagctccgaacgtatcctgaacataatcgtaaaggagagttccgtcttccattttgtacgagttcatgtaggtgccgtcgacaccagctccggctgcagggtctttcattatcgcgagcaacgcgttaaggaagaccttgtacggagttccatccgcgcggagatccgcaagatcgggatttccgtcgtcgataacattaacaacgttcaaatagttcgaccaagcataattagcagacttgtcaaagtagaacgtgttttctgccgcggacgaagcgaaagcaaacatcgtgcaaaccattgcgatcgctatgactgcagcaaaaattctcttagtcatagaaatgacctcctgtaaaaatttttttagcgaatagttatcctattctctcataggcattataacacagcgtacataatttgtcaagagaaaatcaaatttgttttctgttccggtgtaaaaataagtcacattaaattgttcatcataaccaataaaaagtgtttggtgtagtatcttttaacaaacagtacaccaaacacggtgttctgccgcaaacttttgtttcaatttgaccgcgaaatgattataacatatatgatgacaaaaatttgtcataggctgtcaatcagggttagtaaatgaaaaaacataaatatctttgcaacaaagacggtccgacgaaccaaaagggacttccccgatttatgcggtaaagcacaaatcacggaagtcccatcagtctctattgatgtctgaatgacagttttttgataaagaaatcagccgaatgcaacagcacaagaatcaccgtatttcagcattgcatcaagaactttaccgagagaggtggttgtatcaacaccaacctgtgccgcataagactgaatgctgtactgtgcagtattgcttactgctacgccgtctctgtatgcggtaaacgtgaaggtcgttctcatttcgttcggaagagtctttccgaagtatgcataatactgattctcggttccctcaacaggtgtaaactctgttacgttatagtctgttccgttgatggtaaatctgatcgaaagaccggttatatcatctgtcttaaacttaactcttgtattgataacgtctttgattgaaagaccaagtcccttccatgctaccgtgggattgtcaatcgtcgctacgcggccgttgagctgatttacgggagcagtaagagttgcgcttgcataagactggtcaaagcctacatttgcaaggtcatcaactttataattggtgtattcctgcaatgctgccgcatagttaaggaagtcaactatgaaagtcttaactttatcgtttgtattctggttattgtaaaggctctggcaatacttgtatatggagtacgatacggtcttggtgtattcctgaccgtttccggttccgtaaagagtcatttcaacgggtactttcgccatgttcggagtaaggtttctgtaagagaaccagtatctgccgtcagaaccaagtacgccttctactctctgaacgtcgccgtcgcaagaaatcattgcgtatacattctcatatgcttcatatacagaaacatcaaccttgaagtgaatcgctatactgtcgctgagcgaaagtgatacggtttttaccttgaaagggggaagcgttatcgaggctttcagcgcttttatttttgtttcgagctgcgctttttcggcaacgaactcggcgacggaaaggaagccgtccttgtggtcgtcgcgcagatgtttccaaaggttgtaaacttccgtatacgacgcggaatcataaacagtttgagaaatgtcctttacgggagttccgagcggccaaagcgaagaatcgttcataacggcatccgccgcttttcttgcgcccgaacccataggaataacgggaaaaacgatttcgtcgcagaactcttcaagaccgtattccgagccgttccacgaaatcgaaatatcggaaacggacgtaccgttgacagccgcagacttcaaggcattcgcataagcgacaacttcatcaagcgcacggtattcagcaacatctatcctggaatatatctctttaatatgaaaatcgaccgtgctgtccgaggcggtataatcggaaagatcgacggcggcagccgcagatgctccgacggcaacgacggaaatcatcaatataatcgccaacagcgaggatattatcctccttttcatataaaagccccctaaaaagcaaaaaaataatcgagtcatatttatttaagtataacatatcaagcatcatatgtcaatactttttcacatttttcattcaatcttatttcacaattcaatatattattttaataggtagacaactgtaaatatttgcgccgaaagtatacatcggtatcaaacagaaacatagttatgtcgagcatccccaatataaacaaaaagtgtcggcttacgccgacacacaacttcaataaaaaattataaccgataatatacggaagaatcagccgaaaagatcgccgaaatctttccaatccccgtcgccggtagactcaacggtaagacccgacgatgtgacaatgtccgcatcttcgaatccgattatttcaatataaggggtttcgtatttcatttttcaatctccccaaacaagaaattcagcagtgaaacatttacttacaggcgaactaccgcctacatacataggaagtatatcacattacctccgaaatgtcaatacaaaaaacggcaccgaataaaaagttcaaattttcttaaccgcttttgccaaaaacaatatctttctaccttcttcttccgaacaattccgccagccgttttgcggcgacaaggataaacgccagccctgcgggaggcaaacaatatgccagaactatgcttgcaggatgtgttccgccgagataatgacttattattccctgcgcggcaaagacaagaagcaacgcgccgagaattttgtcgtacttgtttttgtcaaacacgagcgccgcgaccgcaagccccgcaagtatgaaattgacaacgagccttacggtcatacaacgctccacctataaatatgctgattatttaccgaaaaatctgcgagtgaactcccaagaagaacggcacatttcttctatgcctagttcggctttccaaccgagttcgttcaatgcttttgtcgggtctgcatagcattccgctatatcgccgtctcttctcggctttatttcataaggaatgggaataccgttcaccttttcaaaggcatgaacgatttcaagcacgctgtaaccgttgcccgtaccgaggttgtatatgttcacgccgtcgctcttcatcgccttttcaatcgctttgatatgaccttttgcaagatccacaacgtgaatgtaatcgcggacgccagtgccgtcttttgtcggataatcgttgccgaaaacgttcagatgatcaagttttcccgcaccgacctgcgcaatgtaaggcataaggttgttgggaatgccgttgggcatttcgccgataagtccgctttcatgcgcaccgatgggattgaagtaacgaagcaggataacgctccattcgggatctgctttcgcaacgtcggaaagaatcatttccatcatcagtttggtactgccgtacgggtttgtggtatgaagcggaaaatcttctcttatgggaacgctcttcggcgcgccgtaaacggttgcggaagaggagaaaacaatgcgcttgcagccgaattcgttcattatctcgcagagagaaacagttcccgaaatattgtttctgtaatatttaagcgggaattttacggattcacctactgccttgaatgcggcaaaatggataacggcgtcgattttgttttcggtgaaaacttttctcatcgcgtcagcgtcttgaacacccgcctgataaaacttgggacgtttgccggtgatggtctcaattttgtcaacgacatctgctttcgagttactcaaatcgtcaacgataacaggctcatagcccgctttgataagttcaacacaggtgtggctgccgatataaccggtgcctcccgtaacaagaattgccataacagacctccaaaaactatcatatatgataaattgaatgttatttgcgttttttgcgcttattcatcagcataaacgcattataaatcatttctttgatttcctcatcgggaatctttccgtcaaggaatacagagttccaatgccgcttgttgcagcggtaaccgggtttgacggattcgggatatttctcacgaagtctcacggcttcgtccgggtcgcatttcataacaagatgaatgggattcgttccctcatatacgtcgcagaactcatgcacatcggaggtcgaaagaacaagcggagtgtcaccgtaaggataccgcacgcaagcgcccggcatcgaaagcgcgtattctataacatcgtcttccgtcagcatacgtttctcctatcaaaaaaagttcaatattgcgatgtttgatattttatctgaaattcttcttagctccgggacatttctccgaaatcaatttcttgaaatcgtcggcagtcccctgctcaaagccgtcttttgcaacaatatccatgccagacttatttataatataaaatgccgtttttgtttcgataacacggtcaacatatgtataagtcacgtcgcggctctcatattcgccgacacatgaatatccctcgtcgttaaatgtaagagtctttgactcaaaagcgcgggtacgggaatccataaacttttttcttattccgcgtttgaacgtaaatatttttacggtcgaatacgcaaacacggcaagcaatattgccataggaaccgcggaactgcgaacagccgcctgaatttcatcaatgctcaacccgactttgcccatgacaaagaccgcgattatgagcgccgcaagcgaaataacaatatatatgcttcttacggcaataaaaataccgcgtttggaaacggtcacgccgttccagaaagtctcttcgttatattcggatttgtttacaataacaggcataccgacctctaatttctgacaacggttatatttgcggagatgagttcctgctcctgctcggatgtaatgtttgagcaagtaacaacattgagactgccgcaatttttcagagcgccgagatcttctatgtaagcatttcccgatacgtttatcgtttcgagagacgaaagcgacgtcaaagcggatacgctcgaaattgagttgctcttcaaatcaagagtttcgaggtttttcagcgaagagataaatccgacatcggaaattcccgcgtagttcaaagaaagcgttttcagcgaaccgagaacggatatcggcgaataatcggtgatatcgttgccgcccgcagtcaaagaagtaagagaggtaagcgacgagcaccatttcacagtcgatatcttatttgcggcgatgttgagcgaagtaaggcttgtcaactcgcctatcggcgcggcgtcctcaatggcattgcccgaaatatcgagcgtggaaatgctcctcaacgcaactatcgaagaaatatcgctcaaattatttccgcttatgtcaagatacgtcaggttcggacacgcggagaagagttttgatgcgtcgccgttattgagattgcagtttgtaagcgtcacacggcgcagagacggaagcgaaccgaaaacgtcgaagtcggcaacttttgtttcgccgttcagaactatctcggttatgcccgtcatcattttcaggtcttcaaatgtcgttataagaccgtcgcctccgacggagttatcgaactttttgacccttgcaaggtctttgtaataaaccgttcccgaactcttgcctatcgtggagcgcacaatctgttcaacctttgcatcggcaaattggtacgggttaaggtcgccctttatcgtatatgtgccctcaaacagttcgctgacaagattgtttgcggggtttacggcaaccgctttgagtgttatatttccaacaggaagcaatatgggctcttcaccgtaaacagaacttgaagaactcggcgtcgagccgtctatcgtataataaacggtgcagccctccgcatattttatcgtagcatttacggaactttcgtattcaccgcccgcgggagtaactttcagatctgcgggtctgacttttgaaagtcttgtcttgatataagacgaaagaccgtttgaaaagtctattgcggcggaaatgtcgccttttgaaacgtaaagttggataatgcgcttataaagctggtcgtttcgagcgtttttttcggactcgtcaatgcagtcgaggatcatatttattgcgtcgtcctgtcttgactgcccgtcatacaaatcggcaagcaacagcactgcgtccgtattggtcgcatttttcttgatacattttttcagggatttttctgcgttgtcgtaatctccgacaagtatatactgacgcgcttcctcgtacaactgacgggaagaaaagtcaaaaatattatgatcctgcgttccgaggaatatcgcaatggcgattattccgacaacgacaaaagcgccgcaaaaagtataaaagaacgct

SEQ ID NO: 2307 - DNA, 2677 bp, Unknown
  16S sequences of unknown bacteria
aaagcggtacgcgagctgggttcagaacgtcgtgagacagttcggtccctatccatcgcaggcgcaggagatttgaagggagctgaccctagtacgagaggaccgggttggacataccgctggtgaaccagttgtcgtgccaacggcacagctgggtagctatgtatggaactgataagcgctgaaagcatctaagcgcgaaacgaaccctaagatgagatctcccattccgcaaggaagtaagactccagagagattaactggtagataggtcaggtgtgtaagtggagtgatccattgagctaactgatactaataagtcgagggcttaaccaagttagagagaaagatagaaaattgattggactgcggctttaaaacccgatagtacttcactgtatagttttgagagaaatctcaatttaatttaatagcattagatagatgaataatttatctaagcaggttaaacaaagagaaatgatgattttgcaaggaaaactagtgaacgaaagttgagctaacctataggttgcgaaacttgagtgagagaagtttgacacagcaaaagcgcatttatctaagtttaagtgttagcgaagaagaatggatacagagcaaggaaagcgagagagggagagctgaactaacctaaaggttgtgaagcttgagcgaaagaagcttgacgaagttatgtgccattattcaaagctaaaatcccggtgattatagcgaaggagtcacacctgttcccatctcgaacacagtagttaagcccttctgcgccgatggtacttagtattcttttcttgggagagtaggtcgttgccgggatagttaacccccttagtcgttatgactaagggggttctttcgtatgcaagagattgtttgcgttcaagggaaaatatttaatttatgcttattggcgttcggataatttttcgtatctgttcttgacaatgcgggttagcatatgctaatataaaaggcaataaagatgaatcggaggtgtgtttgatgagcgttatttccacgttgatgtatcatggcttaaaagtctccggcttcaaaaaggttttttccttgccggagggaaaatttttgcaaaaagtggctaagatcaatcagtcacgccagttttttctgcccacggacaataaagcgcattaccatgaacagaaaatatttgataaatacagctgtttggtgattcaaagcaatgaaactccaagcgagcgcgcgatattatttttctttggcggaggtatgatgatagggcctgacaaaggcgatattgcagttgcgcgtaaattagcgaaaaataccgactgtgatgtgtggtttccatattatcctttgtgcaccgattgctgtattaccgaaagctacaggatgtctttcgagtgttaccgccggatgcttgaaatttacggcgctggtaatgtcagcacctgcggtttctcctcgggtggtgctttggcgatcggtatggcttcccataataatgccatagacgctggtttagcacagcccagacatatcgtcgccgtatctcccggtgaagtgccgtggaatgaggcagagtgcgcgcggatgcaggcgttaaatgcacgggatgtaatgattgattatgtgtatatgaaaacggcggagggttatatgcgccatggagaggctgatgtgcaggaatatatgatccatttgtcgaaaggaaatttggcaggtgtcgataatattcactttttctacagcgaggacgaggtgctttacggagcatggccggagtttcgtgcaacttgtgtaaagtatggcgttaaatatacgattacttcacgtccgaaaatgctccactgctatgcggtgcaaccgctttatcgcgagggcaaagaagatttccaaaaaatttgtgcaatattagcgcaataatgctttccaaccgctgtcaggacagcggttttttaatatttttgtaaaagtaacaaaataactacattttttgcgctattttttaaaataatgcttgtcctcggcctcgatatataatacaatcatagtagcgatgttttgaggtgaggcttttgtataataaatataatatagatcgtattttagtttttgcggcagcattttttgccgcaggtattttcttggcaaattataatatgctttgggcaataggaatgactgctgttttggcagttgtaagtatattgcttaggcaaaagaggttttttatttgtacaggagtatttgccgctgcggtgcttttgatctattggacgatgctgcctgtaaatctgatcgataaatataaaggcgatgtgacgatttacggcgaagttgtctcggaaagctccagcggttactatacgacgatcgagcttgcggcgatagatgataatatcatgccgatcaacgccaagatcgcagtgagcaaggcttatgctgatgataatgagtatccgttgggagcgatggtatgtttccgcggcaatttttatacgccgtcggagcggactaatccgggcggcttttcctcgaaaggatattggcgctcgcagggagtgtttcggttgtttgatgctgacgatgccgggctggttttggaaagcccggggctcgggcgcaaaacggtcgggacgcttaggcttaaaatggatgagattttaaagga

SEQ ID NO: 2308 - DNA, 32759 bp, Unknown
  16S sequences of unknown bacteria
ggtgaggacagcggcgaagccgctccgcagccccgaagctcgcgacgcgaagcggggcgagccgaaataagggtgcgaagcaccgaggccagccctgaaaggactgccgcatccccgaagctcgcgaacctgcagagggcgctggctgcatccgccgatggttcccgctttcactgaaaggaaaaaatatgggtacagtactggacattttgattttggcgtgtatccttgtattggccgttctggctgtccgcagcctgaaaaagagcggcaggcgctgcggctgcggctgttccggctgcaccatggccggagaatgcgccaaaggcacaagggaggaagaaaaacatggctgaaaccccttccgtcatccgcctgttcgggctggtgacggattccattgtagacggccccggtttccgggtgtccatttttacgcagggctgtccccatcactgcgagggctgccacaaccccggcagtcacgacccggcggcgggcaaggaatggacgctggacgaggtggaaaagaaattcaccggcaacccgctgctggacggcatcaccctgaccggcggcgaaccctttcagcagcccgcagcctgtgccgagttggcccggcgggcccatcagaaggggctgaacgtgtggtcgtacagcggctatacctatgaaaagctgcgggagctggcccagcgggacgagggagtcaacgcccttttgtcggagattgacgtgctggtggacgggcccttcctgctgaaggagcggtcgctggagctgctgtactgcggcagcaaaaaccagcggatcatcgacatgaaaaaaacccgggagacgggcgaagcggtgctttggacgcccccggaatggtaaatggaataagaaaaaagcggctctgtttttgggagagccgcttttgtttccataaaaacgcccccaaggcctttctgtgtgggaaagtggcttcgggggcgctgtgcgttattcttcgtccgagaatttcagcggataggattccaccgcgtattccagctttctgccgttttccttcagcacccggagcaccgcctcgatgtgggtgtccttggtgtagggagtgggggtgaaatcgttgtagtcggtgcggctggaaatgcggcagggaatgatcttgaattcttcgctgctggccacgccgtcccggacgcgcacccggagctggaaaatataggaggacatatcgtccggcttattattgcccgcaaagctgaaattacccagcgaatagcagatgtacttgccgttgtagtattcgatggggttgatgcggtggctatggtggcccaccaccagatcggcgcctgcgtcgatggtggcccggcccagccgaacctgattgtcgttgggggaatagtccttttccgcgccccaatggtagctgaccacgatgaactcgcagccctgcgcccgcagcgcggcaatatcggccgggactttctctatcagctcgtcgtgacggccgttgaaggtctgataggccagagagccgatcttcacgcccttcacagtcatgatggcgggttcgtcctcgctggcgtaggggatcccggcggccagcagggtatccttggtctccttcaggccttcttcgcccatgtcgtcggcgtggttgttttcgaaggaaacggtgtcgatgccgcctgcgggcagcatggcgacgtagctggggtcggcccggaaaaggaaggaataatcccgttttttcgggtttttcccggcagtggtcagcgtaccttcgaagttgaccatggtcatatcgtccgccagaaagatgtcccggacgttacggaaggggaaggtaatatcgcccttctgctttttcagttccttctcaaagatggaggagctggcctgcacgttggtgccgatggtcacgtcgccggtaaaggacagggtcagcagaatggaaccgtcctgttcgtagacgggcagggagggatcccgggtgggctcgggcgtttccacgggagcatccgcttcgctttcgccgtcctccgatggaacgggcgtgccatcgcccgccaccacgttgccctgattgtcgtagatggtgatggaaacgtcctcctcagccagcgcaaacgcgccggccagcagggcgaaaatcagaagaagagataagacacggaagaatcgccggtgatccatcggacatcgctcctttcgggtcggaggaatttcggtcacagccggtcaaggaagcgcttcatgcgctccagcgcctcgttgagctgagaaagcgccgtggcgtagcagcagcggatgtgcccttcgccgctctggccgaaggccgtgccgggcacgcagaccaccttttcctctttcagaaggcgggtgcagaactcctcgctggtcaggccggtcttctgaatgccggggaacacgtagaacgcgcccagcggctcgaagcagctcagccccatatcccggaaggcctgcaccatcaggcggcggcggcggtcgtagctctggcgcatttcgatcacatcccggcagccgtcctcccgggcccggcgcagggcctccagcgcggccacctgtccctgacggggcgcgcacatgatggcgtactggtgaattttgcacatcacgtccgtgaaaccggcgggggcgcagagatagcccatgcgccagccggtcatggcgaaggccttggagaagccgttgaggtagatcgttcgctccttcatgtccggcagagacgcaatgctgacgtgtccctgaccgttgtaggtcagctccgcataaatttcgtcggaaatgacgatcaggtcatgccgcaggatgacttcccgcagcttttccagctccgggcggcccagaatgccgccggtggggttgttggggtagggcaggatcagcgccttcgtcttgggggtgatcgccttttccagcgccccgggggtcagcacgaagttgttggcttcgctggtgggcacggccaccgggctgccgcctgcgaagatcacgcagggggcgtagctgacatagctgggttctggcaccagcacctcttcgccggggttgagcagagcccgcagcgccagatcaatgccctcgctggcccctaccgtgaccagaatttcattcttggggtcgtaggaaatatggaaacggttgtccacataggcggcgatctcctgccgcagctccagaaggccccagttgctggtgtactgggtctcgccgtccagaatgctgttgatggccgcgttgcggatgtggtagggcgtgacgaagtccggctcgccaacgcccagcgagatcgcgccggggatggtggccgccacatcgaagaatttgcggatgccggatttgggcaccgccgccacgctctggttcaggtaacggttcggatcgaaactcacgccgtcaccaccagcctcttatcctgattgttgccctcgaagatcacgccgtcgctcttgtagcgcttgaggacaaagtgggtggccgtgccggtgacggtctccagcgtgctcagcttggtggagacgaagaaggccagctccttgagggtgtgggcctccaccagcagcagcaggtcgtaggcgccgctcatcaggtacacggacttgacctcgtcaaagcggtagatgcgctccgctatcgcgtcgaagccctgatcccgctggggcgtgacccgcacctcgatcatggcctccacccgttcacggtcggtgcggtcccagttgataatgggcgcgtagcgcaggatcacgccgcttttttccatctggtcgatggtctgagctacttcttccagcggcgcaccggtcatggtggccagctgttccagcggcacacggcagtcttccttcaggatttgcaaaagctccatttgcagactttgcatttgggttcctccttgcttaaaataggccaacgatctggccgttgtcgtctacgtcgatattcaaggctgcgggagccttgggcaggccgggcatggcaatgatgctgcccgcgaaagcgaccacgaagcccgccccggcgctgagccggacggagcgaatggtgagctcgtagccctccggcgctcccagtttggcggggtcgtcgctcatggaatactgggtcttggcgatgcataccgggcaagagccgtacccctctttttccagcgctgcaagtcctttcagcgcctcggcggagaaattcaccgaaccggcgtgatagatgcgccgggccacggcttcgatcttctcccgcaggggaagctcgtccgggtaggtgaaggaaggcttggggcagggattttcgtccgccgtgcggcagaccagctccgccagttccatggttccgctgccgccgtgcgcccagccgtcgcagggggcacagggcacgttctgttcgaccagccgttcccgaaccagctgaagctcctcctccgaatcaccggagaagcggttcagcgccaccaccaccggcgtttgccatacgtggcggatgttggaaatatggctttccagattggcaagcccctgccgcagggcttcggcgttcggttcgctgtagtgtcctttttccacgccgccgtggtgcttcagcgcccgcagcgtggccaccagcacgatcacgttgggccacaggccgttcatgcggcacttgatgtccagaaatttttccgcccccagatcggctccgaaacccgcttcggtgacggtgtagtcgctcagcgccatagcggttttcgtggcgacgacgctgttgcagccgtgggcgatattggcgaaggggccgccgtgcatcaggcagggcgtgtgctccatggtctgcaccagattggggcagaacgcatcccgcagaagggccgtcatggcccctgccgcgcccacctgcgcggcggtcacaggctcgccgccgaagggatgggccactacgatgcgggccagccgttttttcagatccttcagatccgccgccaggcagaagaccgccatgatctcgctggccgcggtgatgtcgaagccgtcctcccggggggtgccgttgatcggcccgcccagaccctgcacgatctggcgcagctggcggtcgttcacgtccagacagtgccggaaacaaattttccgcgggtcgatgcccagggcattgccctgctgcacgtgattatccaccatggcgcacagcaggttattggctgcggtgatggcgtgcaggtcgccggtaaagtgcaggttgatattctccatgggcacgacctgcgcatagccgccgccggtagcgccgcctttcaggccgaacaccggccccagcgagggttcccgcagggccagcatggcgtttttgcccagcttgcgcattccgtccgccagcgccacggacaccgtggtttttccttccccggcgggggtggggttgatggccgtcaccagcaccagccgggcgcgggcgtcccgctggggcagcgccgccgggtccaccttggcgatataccttccatagggggagagggcctcggttgcgatgcctgctgcctgtgcgatctcctcaataggtttcatttctgcggtgcgggcgatttccaaatctgtcgccactgtgtcccctcctttcgcccatagggcgtataaagatacaggattcagtataacccaaacaggggattgatgcaagcgccattgacgaggcccgccccatccgttataatgaaaggtacgctccgcgcaacgctatttcggaaaggagagaagcaggacgaaagccatcgtacttcatccgtccaaaggaaagattcagggcatgatcctcggcgcatggctgacttctctgctttgtctgctccttccgccgttcagcgtggcggcggtgttcataatgcccctgtttctgtgcccactggcaggctccaaaaaagaggcgtgggcctacccggtggggttggcggcgatcctgctgggcgcgtcgctgtggacgcggcaggtcttcttcccggtgtggctgctgctggctatcgcgcctccgctggtgctggcgtaccgttttccccacatgaagctggaatttcggccgtttctgttctggtttgtgggggcctatgcgttgagcgccgtcatggtgctggcgtggccggtgatggccggccttggctccccggcggaatggatcagcgcccggctggtggagctgctcaagcaatccaacagcggcaacgcgctgctgtaccggctgacggcggcggggtatctttccctgccggaggaaagcagcgcgccgtcactgctcagttccctgctggatcagcggcccatgagccgccagctgtacctctcgctggagcttcgtctccgccagagcctgaccgcgctgctgccctccctgtggatgcaggtgatcctgctgagcgggctgatgaccggccttcgggtgtggaagacccgctgcaccgttcttctggtggatgaggaaaagaagaccatccccacggtgacggtttctcccggcttttccgggctgtccattggccggaacctctgtctgacgctgctgggcgcgggcgcgctgggtctgatgatctccatcagcaccgtaaacgacgcggcgctgcagctggcccgggtgctggtcagcttttgctccatcggcttccgtctcagcggcgcaatgacgctctgcggcctcatcatgcggcaggacgaggatcggcggctgtgggcgggtctgctgaccggcgcggtatgggggctggccccggcgatcctgtttctgttaggtattacggatcccatgctccattatcggagccggggatcctttcaaaagcaaaaggaggatgaatagatcatgaaggttattctgttgtgcgatgtaaagggaaccgggaaaaaggacgatattctcaccgtgtccgacggctttgcccgcaactatctcttcccccgcaagtgggcggcggaggccacccccggcgcggtgaaggagatcgagcgcaagcgcgccaacgaggcccgtctggaggcggagcgccgggccgaagcccagaagaccgccgatttcctcaagggcaagaccatcaatctgcaggtgaagtgcggcgataagggccgtctgtacggcagcatcaccaatcaggagatcgtggacgccctcaaggcccagcacggcaaggagatcgacaagcgcaagctggaatgcgacgcggtgcgccagaccggcgactatgacgtaaccgtcaccgtgtacaacggcatcaaggccgctatgaagctccacgtggagccaatggcgaagtaaaggaacacgcggcgcaccgttcgcggacgcctcataccggcaaaaaaatcatgcaccagcaggaaaggagcgaacgccccgatggaaagtcaggattatattccggcgctgccgcccagcagcgtagacgcggagcgttccgtgctgggcgcggtgctgcaggacagcggtgcggccacgcttgcctttgagaccctgtcgccggaggatttttacaccgccgagcaccgggaaattttctccgccatgcagacgctgcatatcgcgggcaatcccatcgatctgatgacggtggggaacgagctttcccgccggggcacgctggacagcgtgggcgggcccgcctatctgctggaagcggtgcgcttcgtgcccaccacggccaacacccgcacttacatcgaaatcgtgcaggaaaaggccacgctgcgcaagctgatcgccgcgtcccagaccatcagccgccagtgctatgcccagaccgaccctgtgcccgacgtgcttcgggacgcggaacggctgatcttcgacatcgttatgcgccggggcggcgcggaaacgctggagcctatccagaaggtgctgctttccaccttcgaccgcattgaggaattgagcctgctgaaaggcaagctggcgggcgtgcctaccgggttgtacgatctggatcggatgctcaccggccttcacggcggcgagctggtgctggtgggcgcgcgccctgccatgggtaaaacctccatggcgctgggcgtgacgctgttcgccgcccagaaagcacacaaatgcgtggcttttttcagcctggaaatgcctgcggagcagatcggcctgcgccttctctgctccgcggccaacatcaacatgcagcgcgtccgcagtgggatgctgtccgacgaagaatgggtcaagctgggcgacagcatcaacgccctgagcaactgccgcatctacattgacgatacctccggcctgacgccctcccagctgcgttcccgctgccgccgtctgatgatggagcaggggctcgatctggtagtactggactatctgggcctgatgggcaccgacaagcgggtggagaaccgtcagctggaagtcagcgagatcagtcgccagctcaagtccattgcgctggaactgaagattcccgtgctggcctgcgcccagttgagccgtgccaacgcggcccgcgaaaacaagcgccccatgctcagcgacctgcgtgattcgggcagcatcgagcaggacgcggacgtggtcatgttcctgcaccgggaaggctactacgccgccgcgggcgggccggaggacggccccaagcccgacgacaaccagggcgaagtcatcgtcgccaaacagagaaacggccctatcggcaccgtcaacgtggagtggcaggcggaatttgcccgctacaccaatctgcccggcactcgcgtagccgtatacgcggactaaatctgtcagaaatcagggagagaacatggcacagctacccattgccgagcttggcaaggatcaaaagttcgaaggctttctgctggttcgttcggcggatcagcgcaccggcggcaacggcgcaaaatatctggatatgaacctgaccgaccgcaccggcgaggtcaacgccaaggtctgggatggcaacaccccctgtcccgcgcccggctccgtcatcaaggtacggggcacgacgctggaatacaacggtcgcctgcagctgcgggtggagcgtatccgcaccatggcggagggcgatcccgtcgatctgtccctgctggctccctgcgccccggaagccccggaggccatgctgcaggagctttatgacacggcggacacttttaccagcgagcctttgcggctcatcacccgggaaatgctggatcgtttccgggaaaagctgctgtattatcccgccgcccagcggatccatcacgcggagcggggcggacttctgcatcacaccacggggatgctgcggctggccaaggccatcctgacccagtacacgtggctgaacgccgacctgctgctggcgggcgtgatcctgcatgacctgtgcaagaccgaggagatggactccaacgacatgggcgtggtgcgggactacagccgggagggtctgctgctgggccatctggtgctgggcgtgaaccgcattcaggaggcggccaacgagctgggcatttccggcgaaccggtgctgctgctgcagcatatgatgctcagccaccacggcgaagccgagttcggcagcccccgcaagcccatgttccccgaggcggaagccctgcactgggtggacctgctggacgcgcgcatgaacgaaatgcagactgccattcaaaagctgaagcccggcgttttcagcgaaaagatctggtcgctggatcgccgcctgtaccgggcggactatgacgcgctggaacaggacggcacgaatgcggagccggagaccgaaggttgacgtttcatcacaaaagtgttacaataacgtgacaaacttgacttttcgcttcacctttgcatcaaggaggcttgcagcatgaaacgtttatggaaaatcgcgctttgtctggcgctggcgctggtcgccctgacggcctgcagcagcgaatcgtccaacgacggttcgcagatctacgcggaagccacacaatatctgggcccggtcactgccaccgaagcgcctaccgaagcgcctcaggagacggaagctccgtctgacagcggcaatagcagcggcggtgtgagcatcttcgacaatccctatctgaacgaagaagacatttcgaccgacgaggctctgggcgaggaaaactacatcgacccctacgacaccggcgcggacacgggctcgctgctgagcgccagcggtgcttccggcggtgtggagaccgtttacccctacgcgggcgcgacgccgatccccctcgacccggtggatctgccgacccctacgccccacccccagctgacctttaattacgccacctacaccgctggttctctgggcctgtcctttgactgccccagcggctggctggtggacgaatctcagacggacgtttttgtcctgactgagccggaaacgcagatgcatgacggacagcagtgcatcatcaccatttccgccgagcctgttaccgccaactacagcgagaaggatctgaaaaagcaggtcacccagcgcctgaaggagatcggctcggtgaacttcaccgtgtggaatcccagtctgacggctacgcgcacgctgttggattccaagggtgtttatgccaactacacgggcactctggccaacggggtggaactggcaggccgaatcctgtacgccagcacgaacaacaagctctacggcgtagagatggtctatccccgggactaccgggacgactacctgaatattttcgccaagatccgcgagaccatctctgctcaataaggcaggcaggcagggctgaagccctgcaccccggactgcgcggcttagccgcgcaggggcgtagagggatatgcagctgggctgcggagttaccgccgctcggcgacaggcctcgcggctcgctggtttggtagggtaaaagttctgcgccttggattatgcgcgatgtgcgcaggggcgtaggggaacgcgcaggttgtctgcgggaatgcactacatgaaaaaagagacgggagctgctgacggcggctcctgttttttgatggggagatgaagaaaggcaaatcggaaaagtctcatgggagggacaaaagtgcaaggaatgctcgattgtactgtttctgacacggatggatattgacgcgtctggaaaagcagggtattctttggatacaatctgttctttccgccagcggggcggaagacgcggaaaagcacatgcagcatcaaggaggaatccctttcatgaagcgatccagcctgtggcaggacatgacggtactgcatcagaaccgtcttcccggaagaaccacgtcgtttccttttcccgatgaagccgccgccctgcggggggaacggagcctgtcggacgggtatctgtgtctgaacggcgtctggcagttttactatgccgccgacggcgtgctgcccaagggaatctgtcagggcggggaagaagaaaacgtgctgtgggacgagttggacgtgccctcctgctggcagatgcacggctacgggcggccccagtatgtgaatgtcagctaccccattccctttgacccgccctatgtgccggacgaagatcccacgggcgtataccgccgggttttccgtctgccggaaagctggcggggccgccgggtgacgctgaacttcgacggcgtgaacgcctgcttcttcgtatgggtcaatggccgggaagtcggcatgtccaagggcagccgtctgcctgcggagtttgacatcactgattatttgaaggacggcgacaacaccctgaccgtgcaggtgctgcaatgggccgacagcacctatctggaggatcaggactgctggcgcatgagcggcattttccgggacgtatacctgctgggcgttggcgaaaatcatatccgagacgtggtctgccgggtgaatctggaaaaccattaccgggacggcgtgctggacgtggaagcggatgtgcccgccggatgcgaagccgtcgccgcgctgtatcagggggaaaggaagctcgccgaagcggcgctggttcagggccgtgcccgcttctccgtgaaggactgtctgcgctggacggcggaaacgcctcatctgtataccctgttggtgtccgtgcccggcgaagtacagcggacgaacgtgggcttccgcaagatcgagatccgagatcagcagctgtgggtcaacggcgtgtccatcaagctcaagggcgtgaaccgtcacgacacagacgatcatctggggcacgtctccaccatggagaccctgctgcgggacgtgcggctgatgaagcagatgaacatcaacaccgtgcgtacctcccactatcctaacgatccccgctggctggaactgtgcgatcgctacggcctgtacgtcatcgacgagacggactacgagaaccacggcgcggaaatgcaggagcagcttcaggccgagccaaaatcctacaacgatgagacccacagccgcaactactttgcccgcagcccggagtggcgggccgcgctggtagaccgggccgagcggatggtgcgccgggatcggaaccacccgtcggtcatcttctggtcgctgggcaacgaatccggctacggccccaatacgctggccatgcgggagaaaattctggaactggacaaaagccgggtcattcattacgaaaacgagccgggctgcatcagctcggatgtggaatccatcatgtacccctcggtggaagccttgatcgaaaaaggaaaatccgacgattcccatcccttcttcctgtgcgagtacgcccatgccatgggcttgggccccggctcgctgctggactactggaaggccttttacggcagcaagcgtctgatcggcggctgcgtgtgggagtgggtggatcacagcgtatggacgaaaaacgaagccggggaaagctattgggcctacggcggcgacttcggcgatacgcccaacgacggcaacttctgcgtggacgcgctgaactaccccgaccgcatgccccacaccggcctgtgggcgctgaaacaggcgttggagccggtgcgggcggaagtggagaacggcaagctctatttgcaaaacctgtacgccttccagacgttggatcatctggacgcgcggtggaatctactctgcgacggtgaaagcgtacagggcggacggttggacgtgaccggcgtggagccctacggcgagaagtggctggaactgccctgcacgctgcccgaagaaggccagtgcttcctgaacctgcgctttacggaggccgccgaccggctatgggccaaggccgggcacgaggtggcttccatccagctgccgctgggaggcaagctgcggaaacggacggtcaaaattcccgccggagaattgcaggtgcgggagctggaacaggggatcgccgtggcgggaacgaacttcgcggctcgattttccagccgcaccggcgaaatggcttctttggagatcaacggccgggaaacgctgctcagcggccctcgagtgaatctgtggcgcgcgcccacggacaacgacgtacatttgagcgtccattggcgcaagttcgggctggattgcctgcagcgccgtctgaccgaatggagttggcggcaggaaaacggcgcggtctgcgttcacgcggtctgggtctgcgcgccggtgtccttcgggccggtgctgcaggcggaaacggactacaccctgtccgccgacggcacgctgcggctggcaaatcggttcatccccctgcgggacaatctgcccccgctgccccggctggggctgcagctggagctgccggaggaatttgaccgcgtggcatggtatggccggggtccccgggaaaactatcccgacctgctggcgggcgcggaagtgggcctgtacgaagcgaaggtcgcagagctgcacgaaccctatatccgtccgcaggaaaacggcgcccggggcggcgtgaaggccctgaccgtgaccaacgcgctgggagacgggctgctcatcgcctgtgaaaagggctgggagaaccggctcagcttcaatgcgcacgattattccgacgagctcctgacccgggccaagcatacctatgacctgaaatccgagggtaagaccgtgctgtcgctggattaccggcagggcggcatcggttccaacagctgcggccccaaggcgatggagaaggatctgctgtatttccgggagccggtggagtttgtgctggtgtggaagccttaccgggccatggacgcgtctctcatgacggcgctggaaagccttgggctggaatgaaaaggcggaaccgctggccgatcttgcgtgggtatgctataatgctcaggtgaaaagcatagcctgagaagcgccctgccggtgatcgttcccggaaggggaagcgaaaaccggcttgcaaggaggtctttccagatggctctaagctttacggagattttgaaagtcatttttctgggcatcgtggagggcgtgacggaatggctgcccatcagcagcacgggccacatgctgttggtggacgaatttctgaccctgaacgtgagcgacgcattcaaggatatgttcttcgtggtgatccagctgggcgcgatcctggcggtggtgatcctgttctggcagaagatgttccccttccagttcaaggataaaacaaagcctgcggtcaaaatggacaccctctccatctggctcaaggtagtagtggcctgcattccgggggccgtcgtgaccctgctgttcgacgactatatcgaggcccacctgcatacgccgctggtgatcgccctgatgctgatcctctatggtatcgcctttatcctgatcgaaaagtggaaccggaaccgccagccgaaggtggcccgtctggaggacatgacctaccgcacggcgctgatggtcggcctgtttcaggtgctttccatcattcccggcacctcccgttccggcgcgaccattatcggcgcgctgctgatcggcgtttcccgggtggcggcggcggagttcaccttctttctggctgtgcccgtcatgatcggcctgagctttatcaaaattctgaaattcggctttgccttcaccagcagtgaactgatcgtactgctgctgggctcggcggtggcgttcgtggtctccctgctggtggtgcgcttcctgatgaactacatccgcaagcacgacttcacggcctttggctggtatcgaatcgcgctgggcattgtggtgattcttgcgctggtggtgctgaaataaggacgctggaatacgcccgccttcctcttggggaaggcgggctttgtgctgccctgctcgaaaccgctttcattcgccgggcttgacagggtgaaggtttctgagtaagataattttcatcatacaaacgtttgcgcgaagaggcgcagccgagatgcggaaaggatgcggtgcgcggtgaaatgtaccattaaagacgtagccaaggctgcgggggtgtctccctccacagtcagccgggctttgcataataatccgcgtatcagcgaacaggcccgggaacggatccgcgcgctggccaaggagatgggctttcatcccaaccagatggcccgcagtctggtcaaccgcaggacgcgggtgatcgggatcgttttcccggccaatctggccgaaagtctggggcacccgttttacccgcaggtgctgcaggggctgggacagaccgcggcggaacgccgccactatgtgctgctgggcacggggcagggtggcgagaccacgccggaagccattcgtcagctggtggacagcggctatgtcagcgggctggtgctgctgggcgccgaggaggggattcagcccccggaggacgtgcccacggtggtcatcggccatccctgcggcgggggcctccattacgtggattccaacaatctccgggccgggcagaccgccgcagagtatctcatccgccggggacaccggcgcattgccctgctgggctatgacaagcagtatatggtgaccacagaccgccgggcggggtacgagcaggcgctgcgcttcaatggtctgcccctgcgggaggattatatcgtcccaagccgctacatggataacgccaccgatcaggcggcattgctgcggctgttccgccagccagatcatcccaccgccgtggtctgcatggacgacgcgcaggccatcagcctgacccacaccttaagcgccatcggcctgaaggtgccggaggacgtgagcctgatcagcttcaacaacaccgaggccgggcgcttccatcatccgccgctgacctcctttgacgtgaacccctatcaactgggggtggaggccatgaacatgattctcgacctggtgaaggaaaagcccgtctccgccagccgggaagtgccctttaccctggtggagcgggaaagcgtccgagtgctgaaggactgacaaaaagcaaacagagaggaaaagatcggaaatgcgcaacattcattttggctccgtttatcatatgccgtggctggaataccgctacgccctgccggacggcagcgtatgtctgcggcttcagaccggccgggatgagtttaccaaggtggaggcccgcgttaccagcaattacgacatgcccgagtttttcctcaaggcccacgtatacccgatgcagccggtagcgcaggacgaatggcacacgtggtatcaggtcacgttcatgccccatgaccggcggctgaaatacctttttgtgctgcagagcgacgagcaggtgttcaagctggacgcctccggcctgcactgcggcgcggattatcccgaggacgtgagcgaggcgttcgcctttgcttacgcttatcccaccgagcctacgccccagtgggcccgcggctgcgtgggctacgaaattttcccggaccgcttccgccggggcgaaggctctcagacggacgaaacgctggagccgtggaccagcgaccgggtgcagaacgaataccgcttcggcggcaacctgcggggcattatcgaggccgtgccctatctgcacgacctgggcgtggaaatggtctacacaacgcccctgtttttgagcgacacctcccaccgctacaacaccttcgactattatcaggtagacccgctgctgggcacggaggaagacctgcgggagctggccgacgtgctgcacatgaacggaatgcgcctgatgctggacggtgtgttcaatcactgcgggctgcagttcgcccccttccgggacgcggtggaaaacggcgaaaattcccgctaccgggactggttcttctttgacaataccgaagaatgcggctatcagaccttcggccactggccctatatgcccaagctgaatctggccaacccggactgcgccgcctattttctggacgtgggccgctactggctgcgctcctgccacatcgacggctggcggatggatgttagtcccgagatctggccggacttctggcgcaagttccgcaacatgctccgggaggaaaatcccgacgggttgatggtggcagaatgctgggacgacagccgccagtggctctccaccggcgacatgttccattccaccatgagctacgtctggagccgcaatgtgtggaaccgcttctgctaccgcaagatcagcctgcgggagttcgacgcggtgaacaaccgctctctgatgctctatcccgaacccgtgacgcaggttttgtggaactttctggacacccacgatacggcccgcgtccgtacccgggcgggcggcagcgtggaaatgcagcgggcggcggctttcttccagttcaccttccccggcagttccattctttactacggcgacgaactggccatggagggcgcggacgatcccttttgccgttttcccatgccgtgggaacgggtgaaatatagcgatatgcaccgctattaccggtgccttgcggaaattcgccgggagcaccccgtgctgcgctacggctccttccgcacgtggcaggtgcaggaggatgggctgtacgcctatctgcgcgtggcgggcggggaaatcgtcctttgcgtgctgaacacatccgataagccggtacacgggctgctgcccctgccggagagcatggcggagcagagtgctctgaacgaattgatgcattcttcatccgtcgccgtgcgcgccggatgcctgcaggttgccctgcgtccgggcgagggcttgattttctgctgaatccaaagtacaatacctctatcagaccgcaaggaggattttttccatgaaagagctggtagaggccgtccgcacttatggcaagggcattggaacggatattgtcaaggtggatatgtttctcaaccaccggctggatacaaatttactggtcaaaatgggtcaggctttcgccgatgtttttgcgtgcgaaaagcctgaccttgttttgaccatcgaggccagcggcatcgccgcggcgctgactacggccatggcctgcgggaacattcccgtggtcttcgccaaaaagagcagcacccgcaatgtgaccggcgacgtatacgaatcgacggtcttcagctttacccacggggtggaaaaccacgtccgcgtggcgaaggaatatctacccgccggggcgcgggtcttgatcatcgacgattttctggccaacggcgaagccgccgaggggctgtgcgatctctgccgtcaggcaggtgcgaccgtcgtcggcatcggcatttgtgtggaaaaggcgttccagcccggccatcagaagctggagaaggacgggtacaaggtacacgcgctggcgaaggttttgggcattgaggacggaaaattgctggtagaggactgaaataagcgcagcggcggtgagtggaaacactgctaaggggaaatgccccgttggagaaggaagcgcagcttcggcgcaggagtgggacttgccggtttatgggtttctcgccaactttggtgctcgaaggtttccaaaggggaacgaagggaagacgcaaggcgggttgcccttgggcaacccggtctgcctttggcagactgaacttttcaaattaaatttgaaaagttcaccgtcatccagtggatacaaccgccgaaggcggttagcgaccggtcgttcaggcaaacaacaagcggagcgcacggcagtgcgaaccgcgccgattgtttgccccgaggaaagttctctggtgcgcccgtgggcatacacctcccgctgctggggcttgacgcgccgactccggcgcggacggtggggctgccgccccgagggggcagtactttctttcgaagcgaaagaaagtaccaaagaaagcacgcggcacggcgactccgggaaaaaggcttctattgcccattttgacggcggggctcgcaatgtcgcgcgcaatggagctggatagcttacacacaggggcggagcgcgctcgtgctcgcctttttccgccgacaaaatgggcgggcctttttccctccgctgcctatcgccgctctgcttcgccgccgcatgggtggggatggagcgcagcccttgcgggttgggctgtgacggcgcggcatggccgattcagcaggggcgccggccagcgggtttgggaaaccgcgtcggctggtggcgcgagccgcgaggcccgttgccgagcggcggccttggggacgaaagcgccggaaacgcgaggccctctgccgagcgtttccaaagcgccatacttatctatacagcccccgcgccaaaggcgcggagtggggtgcaggggcactgcccctgcctgccaggaggttttttctgtggatgggaatttgattcagggaatcattatggtcgttctgctggtgatgtctgcgtttttctcggcgacggaaacgtcgttttccgcgctgaatcggacgcggctgaaaaatatggccgaaaagggcaataagcgggccgaggccgcgctgaagctggctgaaaattacgatagtctgctgtcctccattctggtgggcaataatatcgtcaatatttcgatggcctctatcggcacggtgctgttcgtaaacctgctgggttcgtcttcgggcccgactgtttcaacgatcgtgtgcacggtggtggtgctgatcttcggcgagatcacgcccaagagcgtcgccaaggaaatgccggaaaatttcgccatggccgtaacgccggtcatgcgggtgctgctggtggtgctcaagcccatcaacgcggtgttttccgggtggaaaaagctgctgtgccgcgtgttccatttcgaaaaagaccgtaccttctctcaggacgagctgctgacgctggtggacgaggtgcagcaggagggcggcatgaacgaggacgagggcgacctgctgaaaaacagtatcgagctgtttgacgaccgcagcctgacggatatcctcacgccccgggtcagggtggagggcgtgccgctggacgccacgcaggaggaagtggtggcgattttgcaggaaagcaagcactcccgtctgccggtgtatgacgaatcgctggatcatatcgtgggcgttctgcaccagaaggatttcttccaccggctgcagaagggcccctgcaccctgcaggagctgatgaagaagcccctgttcgtgccggaaacggcgcaggtcagcacgacgctgaagctgatgcagcgcacccgcagccagatggccgtggtggcggacgagtacggcggcaccgctggtatcgtcaccatggaggatattctggaggaactggtgggcgaaatttgggacgagcacgatcaggtgcaggtcaatatccgacacggcaaggacggctctctgctgatccttggcgatacgccgctggacgagctggaggacgcgctggatcaggagatcggagacgcggacgccagcaccgtgggcggctgggtgatggagcagaccgagaatatccccaaaccgggggattccttccagtgggaaaagtggcggtttgacgtgctgaagaccgacggccgccacgtgatggaggttcaggccaccgcgctgcctgtggccgaggcctgacgcgatcctgaaaggaggttcgactttggagcggagaatcctgattctgagctgctttacgggcgaggggcacaacagcgctgccaaagccatgcatagcgccttcgatgcgctggaggtgccgtcccggatcatggacccggtttcctttcagggaaaacacgcccagcattttatttcttccttctataacggtatgatccgccgcacgcccaaggctttcggcgcgctgtataaagcgggagcgctgtacgacgctacgggctgggtgtcgccggtgtatctggctaacgcggcctatgccgagcggctgaatcgttttttggaggcgcagcaatatacggatgtagtctgcacccacctgtacggcatggaggccatgaccgctctgaaaaagcggggcaaaaacagcgttcccgcctatgggattatgaccgactatacctgcattccctttctggcggagacggagctggacgggtatttcacccctcacgccagcctgtcggatgatttgatccgacggggcctgcccgctgacaagctgcatcccttcggcattcccgtttcgccgtccttcgattccctcctgtcccggcaggaggcgcgggccagactgggaatccccgaagaaaagaagctgttcctcatcatgaccggcggcgtgggctgcgaaagcctgctggggctgtgcgacgcctttctggcggcggcagacgagaccatgctggcgcagattctggtgggtcataacgaaagcctgggtgagacgattcgggagcgctacggcgcggaggggcagattcggcccgttccctttaccgatcaggtgccggtatacatgcgggccgccgacgtgatgctttccaagcccggcgggctgaccagcacggaggccgccgcggccaacgtgccctttgtggcggtgaaggccattcccggctgcgagacctgcaacgcggcgtttttccagcagcacggcatggcgctgagcgcccgggacgacgcggaggccgtggcctttgccatacagctcgccatcgatccggagcgggcggaaaggatgcgcagggcgcagcgggagacgctcccggctcacgcggcccgccacattgcgcagtttgtgctgaaccaatgatgatccgctacctgcagacgcaggaccccatggtcgtatggacgctgcatatcgtcgctgggtatctgctgggcagcatcatgttctgccggtggattcccaaactggtgctgcacaaggacgtgtgcgccctcagcgacgaccataaccccggtgcggccaacgtgtttcagcactgcggcgtgcccgcggggctgctgtgcctgtttttcgatctgtccaagggctttctgcccgtgtatctggcggcgcataccgtggggatagaacctatgcagtttgccgccgttatgatggccccggtgctgggccacgccaccgcgccctttgaccatttcagcggcggcaaatgcatcgccaccgcctttggagtactgctggcgctggtgcccatgcccacggtgctgtttctggccgtgccctatatctttttttctgtggtctgggtcattaagcccaaccgcgttcgcagcattgtggcctttgcggtctttgctgcggtggcctgtacgtattataccgtgacagggctgcggagcgtgggcatgggctgcggcctgatcgccggcgttgccatcgtccgccatctggatcgagaaaaattccgccgggtgaaggaaagcgcggcagaataaaacaggggaaagcggggaaaaacgcttttgaaaaagtcaccaaagacccttcggacgggcgctgccgcgttggcagcgcttttgatgaccctcgctgccgggctggagatgacggttgcccggaagctgaacccggacgcggtggacgcgggaggctttctgtatcagctgatcgggcgcacgtcccgttcgttcactctggagccgctggccgcgacctgcgtactgctgctggcgttctggctggcccggcggtatctgcttcgccgggcggagggcgcaaaggcgggcgagtacctgctgagcgcttttctgggcggcatagcgctgctgtgcgccgctatgcgggccggggagaccgttcgtctgatctggcagaacagcttccagctgttcaaaagcctgctgatctttgcgggcatgtccctgtggtttctgtatgccgttcgggtgctggcggaggggctgagccgtccccggaaagaaggccgcttctgcgctttctgggacaggcatcccttcgggttcccctttctggtgctgctggcggcttacggctggcagatcgcgatcaaatatccgggcgtgattcatctggatgtggtcatgcccattcggatggttctcggcctttcgccgaagaacaacacctttccgcccacggggacgcttctgtacggcggcgcgttcctgctgggcgaaaagctgggcaatgtgaactggacttactttgcgatcatgctgttccagtctggaagcctgatgctgacattgagctatgctctgtggctgatgcacacccgaaaagcgccgcgatgggtgcagcttctggcgctgacactgtttgcggtcaatcccatctatatcggctggattaccacgctgggcaaggatgcgcagtacatggtgtggatgctgctgttgggcgtgctgatgatggagtttctggcggagccggaggctttctgccggaagaaatctcgctgggtgctgctgacagcggacagcctgctggcggtgctgacccgctacaacggcgtgtccgtggcggttccctgccttgcggcgatactgatcgtcctttgccgccgcccggcgctgcggcgaaacatcccctgtctgctggtgtgcagcgcgctggccttcggcctgagcgcgggagccaacgctgccgcaacgcgatttttggggctggaagaggtcaggttctatgactatctgtccatcccgttccagcagacggcccgagtggccaagttttacggcggcgagggcgtaacggatgaggaaaaagccgccgtcgatacgatgatcgcttacgatcagctggcggagcggtacgacccggcccacgcggacggggtcaagaccaccgtggatgtgctggagcgcgggaaaaattccccggcggcctatctgtgcttctggtggaagcagcttcgtcagtacccggtggattatctggacgcgatgctgaacatgaactactggatgttcgacctgcagcagaacgtgcccacctatcacagctacgcggatattcagcagtacacctatccctacgccttccacgagacgcagttcttcaatctggaagagattcgccccctgatgagctggcagcgggcgctgacggaatggtacttccagttcgaccggctgcccctgatcgggaatttcgccagcatgggcttctgcgtcaacggcatgatcctgctggcctatgtttcatggatcctgcggcggaggaaaacgctgcttacgatgattccctcggccgttacggcggtggccgtcatgttctgcccggaggtctacatccgctatctgctgcccgccatggcgtccctgccgctgtggctggccgccttcttcctgctgccggaaaaccgcgctgccccttgccaaagcccggcttccgtgctataatagcaccgcgttccggcttcgggacgcatggcaatgacgaagacaaacgcccgatgcacagcgattctcagagaggacggcaggaactccgcgttccttgctgcaagccgtccgaattggctgcgggaaattcccttccgagcttttcccctgaacctttttcagtaaggggaaacggtcaggccccgttacaggcgaagagcgcatcggccctgcggcccgtgcggaatttgggtggtaacacgcggcgttcaggcctcgtcccatgaggggacggggcttttttgatggccgaaaacggcgatgcaggaaaggagaacggcatgaaaacgctgctgatcagcgcctgtctgctgggggtgaggtgccgctacgacggcggaagcaagcctcagcccggcgtggaagaactggccgggcgataccggctgatccctgtctgcccggaacagctgggcggtctgccgacgccccggtctcccagcgagcggcagggagaccgggtggtcagccgtcagggccgggacgtgacggcggaataccgtcggggcgcggaggaggccctgcggctgctggactttttccacgcggagggcgcggtgctcaaggagcgcagcccgtcctgcgggaagggcgtgatctacgacggcagcttttccggcgctttgacggagggcgacggcgtgttcgcccagctgcttcgggagcgcggcgtccccgtatacggggaatccgacatccccgacctgctgggaaaagcatgaacttcaccattcccattccattttgatgaaacgatagaaggaggaacctcatcatggcagtgacagatactctgcgggaactgcgggagcaggtggaacagaacctctccgaaatgaaggacaccgccgcgctggacgcgctgcgcgtcaaggtactgggcaagaagggcaccctgaccgagctgctcaagggcatgggcaagctggccccggaggaacggcccaaggtgggcgcgcagatcaacgaggcgcgccagtggctgaccgaacgcatgaacgagcggcaggacgtgctgcagaagctggagcgggaagccgctttgaaggcggagaccatcgacgtgaccgaaccccgccgccctgtgaaggtgggcagcgcccatcccatcacgctggtgatggacgagctgatcgactgcttcaccggccttggcttcgaggtgatggaaggtcccgaggtggagctggatcactataattttgagctgatgaacctgcccaagaaccatccggcccgggacgcgcaggataccttctatatggacgacaacattgtgctgcgcacccataccagccccatgcaggcccgcgctatgctgacccgcaagccgcccatccgcatcatctgccccggccgcgtgtaccgcgccgacgaggtggacgcgacccacagccccgtgttccatcagatggaggggctggtggtggatgaaaacgtcagcatgtccgacctgcgcggcacgctggaagcctttgccaagaagctttacggcaacgatgtttccacccgcttccgccccagcttcttccccttcaccgagcccagcgccgaggtggacctgacctgctccgcctgccatggcaagggctgccgcatctgcaaggacaccggctgggtggaagtgcttggctgcggcatggtgaaccccaaggtgctggaaatgtgcggtatcgacagccacaagtattccggcttcgcctttggcatcggtctggagcgcatcgccatgaagcgctacggcatcaccgatatgcgtctgctctacgagggcgacgcccgtctgttgggacagcttcgctaaggagggaatgaacgatgaaactgggtatgaatatgattcgggaatacgcggacattcccgtcagtcccaaggactatgaaagcaaaatgatcatgtccggcacggccgtggagggcgtggaggacgtggccgacggcatggacaaggtggccgtgggccgtgtgctgacctgcgaggacgtggagggcacccatctgcaccagtgcaccgtggatgtgggcggcgaggaacccctgcacatcgtgtgcggcgcgcccaatgtgaaggtgggcgtgctggtgcccgtggcgctggacggcgctcacttgcccggcggtgtgaagatcaagaagggcaagctgcggggcatggtctccgagggaatgctatgctccgctacggaactgaaggtgccgcaggagctgtaccccagcgtaggggatgcgggcctgctgatcttcaacgaagaatacgccgtgggcagcgacgtgcgccccattctgggcattgacgactacgccgtggatttcgaaattctggccaaccgtcccgactgtctgtgcgcgctgggcattgcccgggagactgccgcggcgctggacactacgttcaaagcgcccaagaccgacgtgaccgaagcgggcggcgacattcacgacgaagtaaaagttcgcgtggaagcgcccgatctgtgcccccgctacgcggctcgggtcatcaagaacgtgcgcattgcgccctctcccctgtggctgcgcaagtacctgcacgcggcgggtctgcgctccatcaacaacatcgtggacattaccaacttcgtcatgatcgagtacggccatcccatgcacgcctttaacctgagcaaggtggcgggccgggagatcatcgtccgccgggcgcacgagggcgaagtgctgaccacgctggacggcgtggagcggaagctgcgcccggacgatctgtgcatctgcgacgcgaacaacgccaccggtctggccggtatcatgggcggcgaggaaagcgagatcatcgaaggaaccaccgacgtgatgttcgaatgcgccgctttcgaccgcaccgccatccgtctcaccagccgcgcgctgggaatgcgcaccgaggccagcggccggttcgagcgcggcgtctgcgccgccactgtgatggacgcgctggatcgcgcctgccatctggtgaacgtgctgaacgcgggcgacgtggtcagcggcgtaatcgacctctatcccgaacccaagcctcagcaggtgatcaccgccagtgtgaagcgcatccagaaccgggcgggcgtggaaattcccgccgacgaaatggtgcgcatcctcaacaagctgagcttcgaggccacccgcgacggcgataccctcaccgtgaaggtgccttccttccgggaggatctggacggcgaggcggacgtctgcgaggaatgcctgcggatgtacggctacgaccacatcggcgcgacgcccctcaagggcagcaccacgcagggcggcgtcagccccatgaagcacctgaagaacaagctgggccgtctccttcagggcatgggctatctggagattatgaattactccttcaccggccggaaggagatcgccaagctgggtctgccggaaagcgacctgcggatgcagcccatggccattcgaaatcctctgggcgaggacaccgccgtcatgcggcccacgctggtctgcgatatgctcaagacgttgtccttcaacatgaatcacgccacggaaagcgcctccctgtacgagatggcggcggtctttgatccccatcatcccacggcggagggtctgcccaccgagactcagaccctgtgcatgggcatttatggcgaggatgtggacttcttcaccctgcgcggcgcggtagaggcgctgctgaatgcctgcggcatctcctgcgaggtggaagcgggcggcgactgctactatcatcccggccgctgcgcccgtctggtgcgcggccagcaggtcttcgcggcgctgggcgaggttcatcccgcggttcgggaggccttcgccatgccccgccgggccattgtggcggagatcaatctggcgcagctgcttgagtacggcaagcccatgggcgaaatgaagcccctgccccgtttcccctccatgagccgcgatctggcgctggtcatggacgaggaagtgaacgtaggcccgctgatggcctccatgcgcaaggctgcgggcgcgctgctggagtccatcgagatgttcgacgtataccgtggcattcaggtgggtcttggcaaaaagagcgtggccttctccctgaccttccgcgccgccgaccgcaccctgaccgacgacgaagtccagaaagccatggacaaggtacaggcgacctgtgccgaaaaatacaacgccatccgcaggtgagcaggggcagtgcccctgcaccccggactggcccggcagggctaaagccctgcaccccggactgcccgcctcttcgggcgggcaggggttgagtgagaaaagaagggcgctttggaaacgctcggcaacaggcctcgcgtttccgccgctttcatccccaaggccgccgctcggcgacgggcctcgtggctcgcaggtctggtaggtttccctgcggaggaaaatgattgtgaaaatagctcgccgttcaggcgggctattttcgttgtaggggttgagccccagtacctcggcttgtgcggcagaccttcccggcagcatggcttgaagcgggaaagttgcccgtatcgctatagcgcgagtcgattttccactcaaaaaatgtgaaaaacccgctttcttctgtctgttgaagaaagcgggctttttatgcgtttgagaggggtcaatgcttggaaagcagggcggtgacggtcataaatccggtggcggccccttctaccagaatgacctgaccattcagggtaaagagggaaagcagcagcgcggaatgaacgacgccggtcgtttccagatattgatagcacagggtcacggccagtagagccgcgcccgcgtagagccacggctgcaagcccttggagtggcagcgcagacctgccagcggaatgatcagcgccagcataacgcccagcagcagacccttgagcaggaaggaccagaacagccctgcgcccagaacgccgtccagccagcggtacaaaaggcacagcacgatgcacagaagcagcgggcaaagggccgccaccagcttacggagcagcatggctctcctcctccctttggagaaaaagcagggtttcctgccgttccttgtcggtcatgggggccgtttcgaacagatcggggcgcattttagccgtcgccagcagagcctgccgccgccgccatgcgcgaatcttggcatggtcgccgttgagcagaacctccggggcctccacgccctcaaactcccggggccgggtatactgagggtactccagcagcccgccggtgaagctctcctcgtcggtgctgtcgctgctgcccagcacgccgggcacataccgggccactgcgtcgcacacggccatggcggccagctcgccgccggtcagcacaaagtcgcccagcgaaagctcctcgtccaccactgcgtcaatggcccgctggtctacgccctcgtaatggccgcagagcaggatgaggttttcctccccggccagctccaccaccttctgctgggtgagggtcttgccccgggggctcatatagatgcatttgcccgtatacccctgcgcgcgcaggtggcgcaccgcgtcgcagatgggctgggccagcatcaccatgcccgcgccgccgccgaaggggtaatcgtcggtatttttatgcttgcggtcgctgaaaggacggatgtccaccggctcgatctccaccagcttttccctgcgggcccggcccaggatgctggaatggagcacgctttcaaacatttcgggaaagatggtcagaatggcgatcctcatataccgctacctcgttcagggtttcttcgttgagtacgatgcggccagcctccacatccagcgagaccaccaccttctcaatgatgggcaccatgacctcgcctgccggagtgtcgaaaacaaaaatgtcagtgccgccgggggtcagcacatccttcagaacgccgatctcgccgcctttggtatccacggcttccgcgcccagcaggtcggcgatgaagaactggttctccgccagctccgccgcgtgggcccggtctacgtagagcatggccccccgcagggcttcggcggcgttgcggtcgtcaaagccctccagcttcaggtacacgtcgtcgccctgcacccggcaggcctcgatggccagcggctcaaagccctctccggtttggcgcagcaccgcgtccagctcctcgaagcggtaagggtcgtcggtgaaatggcggagcttgacctcgccccggatgccctggggccggacgatctcgcccaccagcagatgcgtttgcttcataaaaacgttctccttagaaagcgcgcaccggcagcctttcgggagaccggtgcgcgatgggttattgaatttccacaaagacgggcttggcgtccttggcggtagcggcgcgaaccacagaccgaatggccttggcgatgcggccctgcttgccgatgaccttgcccatatcctcgggcgctacgtgaagctccaaaatcgtcgcttccggcccgacggtctcctcaacggtcacggcgtccttgttatccaccagcgaccgcgcgacgtattcgacgagctctttcatgaggcttagccctcgatgacgccgctcttcttgagcagaacgcggacggtgtcggtgggctgagcgccggacttcagccacttctgggccttctcggcgtcaatcttgatggtggcggcgggctcggtcatgggatcgtagtagccgatctcctcgatgaagcggccgtcccgggggctgcgctcgtcagccacaaccacacggtagaaaggctttttcttcatgcccattctcttcaaacgcatcttaaccataattctgttcctcctagtgttctgattggtgagggatttgtatctgaatcgccggtgggattcgccgggcggtgttcagcgtggaaaaggggattttagaaggagaagcgtcgctttcccctgcgcatcagcttgttgcccatcattttcttcatcatgtccttggcctgctcgaactgacgaatgagggcgttcacgtcctgcacggtggtgccgctgcccgccgcgatacgcttgcggcggctggcgttgagaatgccggggttccggcgctcccggggggtcatgctgcggatgatggcctccggctttttcatggcgttttcgtcgatctccacatcttgcagcttgttggcaccgggcagcatactcagcatggactgcagaccgcccatcttcttcatttgctgcatctggctgagaaaatcctccagcgtcagctcctgcgggccgcgcttgaccagcttctcggcttccttttcatcgaaggcctcctgcgccttttcgatgagggtcatcatgtcgcccatgcccagaatgcggctggccatgcggtcgggatagaagggctcgatgtcggagagcttttcgcccgtgccggagaacttgatgggcttgccggtgacggccttgatggacagggctgcgccgccccgggtatcgccgtccagcttggtcagaatcacgccgtcgatgcccagatcactgtcgaaggtcttggccacgttcacggcttcctgaccggtcatggcgtccaccacaaacaggatttcctggggcttgatctccgccttgatgcggcgaagctcctccatcagcgcggtatcgatctgcagccggccggcggtgtcgatgatcagcacgtcccggccgtagtggcggcactgctcgatggcctcctgcgccgtcttgaccgggtcctgcgtgccgtgctcgtacacgggcacgttcacctgagagccgaccacctgcagctgcttgatggcggcgggacggtagatgtcgcaggcggccagcaggggctttttgccctgcttctgcaggtagttggccagcttgcccgccatggtggtcttaccggcgccctgcaggccgcacagcatataaatggtgggcacggaggacgaccaggtcagccgggcgtgctcggagcccatcagggccgtcatttcctcgctg

SEQ ID NO: 2309 - DNA, 4030 bp, Unknown
  16S sequences of unknown bacteria
tatccggctgtggaaaggagaactatgacaaaacaaccggataaaatcacagccctatactgccgcctgtcccgtgacgatgagcaggacggcctgtcagggtccatcaagaatcagcaggtcatcctcgaaaagtacgcacaggaaaacggctttcaaaacacccgtgtgttcattgacgacggttggtcgggtacaaattttgcaagaccggcgttcacggaaattatggagctggcggaaaaaggacgcatcgacaccctgattgtcaaggatcattcccgcttggggcgtaatcgcttgattgttggtcaactattggaagaaggttttgacagtctcggtgttcgctatattgccattatggacaacatcgatactgccaagggaatcagcgaccttgttccgatgcaggacttattcaacgagtggcacgccaagaacaccagccagaaggtgcgcaatgtgttcaagagcaagggaatgtccggcgcaccgctgaccaccaatccgccctttgggtatctgaaagacccggagagcaagaacgggtggatcattgatgaagctgcggcaaagaccgtgcggcagattttcgcttggtgtgtggacggccttggaccgacgcagattgccaaacgcctgaaagcggcaaaagtgtccacacctacggagcattggagcaatatcggcagaaattgcagtaagctgcctgctgttccgtataactggtgctctgccaccgtggcggatatactcggcaagcaggagtactgcggcgatacggtgaatttccgcagcaccaccaaatccttcaagaacaagaagaaaattgaccgaccgccggaggaatggcagattttcaaggacacgcattccgccatcatcgaccgggaaaccttcgccttggtgcaggagcttcgcaagcaccgccgcagacccacgaaaagcggcatcgtcagccccttttcgggcctactctactgcgccgattgcggagagaagctgtattacagtgtcaccaacaactacaaacgagagcaggcgtacttcttctgctcctcctaccgcaagaactccgaggtctgttccgcccactatatccgtgagaaagtggtggagcaaatcgttctggagagtatgcagcgtattctcttgaatgtgcaggcctttgagaaggagtttgcccgcaagcagatggactgctacacagaggacaagaagaagcagcttgccgccaagcgccgggatctgagcaaggcaaagaaacgcattgcggaaatcgacgctctgattcagaaaatctatgaggacaacgccagcggaaagctatctgacgagcgctacgccactctatcccggtcctatgaggaggaacagaaaacgctgaaggtcgccgttccggagatgcaggcatatctggaaaccgaaacggataagaccgagagcttgcagcgcttcgttcagaaggtcacgcagatcacggagctgaaagtgttgacgccggagctgattcacgagttcgtggataaaatcgtggtgtatgcgcccagatacctcgacggcaagcgagtacagcttttagatatctattacagcggcgtgggcattctccacgaactgacaccggaggagatggaagaagccttccagcagcacctcactgagcgtaacaaagagaaaacggcgtaaccgcaaagggctacaccgtttcggaaaactgattaaactgagatacaagagccgccttggggcaccttccttacggagggcgccccaaaggatggctttttcgtttgcaacccgctagcagcaggaactttttacacggaaagactcacagtctgtgcactcgactacagtcggatgtgcctcatgggtaccgactttgatgctgtcgagagaacagtagttttcatttccgcagtgatgcacacactgctgtacagtacagccaatggatttgtttgctttacactcagacataatcaaaaacctcctttgcagattgcaatactagtatgggctgtttatcaaattttatgctggcaatttttaatggaatagataaataagaatatccaaaatcttgacaatgtgaaaatcttgcgatatatgtttattttagcaaaaatagcagaacagtttgaattcgatcgagaatatacaggaaaagaagtagacgtaatattaaaagaaattttcgatgattatgtccctttgcgctgcagtttgattgaatacggcttttttaaccgcacagcggatggcagcaagtactggaaacttcgatgatagtaactttattttcaggacgaccgaaaagcatgattcagtattgtagagacggcttaaggatgattgcaaaaaaggccggcatatagtacaataaatttaataactttgtctttatattaaaaaatatcactgtttttcaaagatacggcttttgacggcaaaaaggagcgtgttttcctatgacaaaaaaagaacgtgttattgcggcaattaaggggcagccggtagatcgaatcccttccggtttttggctacattttcctgaatcctgtttttatggagatgcagcggtgcaggcccatctgaagttttttcgtgaaacggaaacggatattcaaaaaatcatgaatgaaaatttggttccctgtgatatcccgatccgaaaagctgtggattggaaaaatctgaagccttttcaccggcagtctccatttattgtaaatcaggtggagattatcaaacgcattctagatcttactggcggagaaggactaacactggcgactgtccatggaatagttgcctctgcctggcatgcgagaggcggttctgctggatacgaaacgggcagcgggctgctggccgagcatttacgggaggatccgcaggcggtatcttatggctgggaaattatttctgacggattggcgattctgacgcaagcttgcctagaagcaggagcagacggaatttattatgcggcattgggcggagagagctatctttttactgacgaagagtttgaaacctatatcaaaccacatgatctgaaagtactaaaggcggcggaagattctccttataatgtgttgcatatttgtaaagatcgtctgaatctggagcggtatcgaaattatccttgcgcggtggtcaactggggtgtttatgagcaaaatccctctcttttggagggggcggccatcttcccggataaggcaattctgggtgggttggatgatcgttctggcgtgttagtagatgggaccaaagagcaaattcaaaatgaggtgaaccagatactgcgtatgatggatggtcggcggtttctgttaggcgctgactgtacgttgcctaccgagatcgcatatgatcgtatccacgctgccgtagaagcggtagaataggaggagagcatatggaaaaaacagttcggtgcaaaacggccacaattattttaggcttgtcgcttttgctgcagattttatatgcaatagctgaattcatcattttgattttacagcgtccactaaaaaatctattgaatgcgggagcgtctgaggcgtttaagcagaatttgttccctatcgcagatattgtgtggattatagttatgttggtgttgcacaccggtttgtttgtgttgttgtggagccaggcggaaaatacttcgtttaaagcagctgaaataatgtccattgttatcggtggcaggattttagcggggagtccggtctctttatcgatattaaccaatatggggtatgcggctcagggtgcgcagatgttggccaattactccctgctaaccaatctgatgagtatggtgcggcccttatctcgcttgggatgggtactgctgatagtaggcgccaccgcttcactgggcaataaacgttcgtgtttactgtctcgatgatggaatcctttgaatgcagatgaatgaaaacaaaaaaatctctccgaactttcggagagatttttttgtttttcccaatcaactagtgaaatgtgc

SEQ ID NO: 2310 - DNA, 26323 bp, Unknown
  16S sequences of unknown bacteria
gccgcccgccgccccgccggacagggataaggcgagcaaaaccctttcgggaatccgccgcgcgccttttttcgccctgctcttatccgccgcataggcgataaaggcgcaaagcgacagcgccgaaagaaaaagcgcataaattttaatccacattttcgccctcctaaaaaaatcaaagcagctcttcccctgtttccgcgccgtaagtccgataggaaattgcctcgtagaggtgttcgggcgcgatctcttcgcagtaaccgaggtcggctatcgtgcgcgccactttgaggatgcgcgagcgggcgcgcgccgacaggtgcagccgtttgaacgcctctttgagaatctcctcgcactcttcggaaagctgacaatattcccgcagttccctttctcccatttcgctgttcgtcacagccctggtgccctcaaatctttccctctgtatctttctcgcggcatctgcccgcgccttgacggcagagctcggctcttcggaaacccgggaaacgagcgcgtcgtaatcgacgccgtccacttccacctgaatgtctatcctgtccagcaggggacccgaaatccgggcgcgatagcggcgtatatcgttgggcaggcaggtgcatcgccgctgcgcgctgccgtaattgccgcagggacagggattcatgctggcgcacagcataaaagaagcgggataggtcactgtgcccgaagagcgggaaacggtgatgacgccgtcttcgagcggctggcgcagcgcctccaaagcggaacgtttatattcgggaagctcgtccaaaaaaagcacgccgccgtgggcgaggctgatttcccccggatggacggtcttgtttcctccgccgcaaagggaaacggtggtcgccgtgtgatgaggggtgcggaacgggcgctgcgtgacgattccctcttcccccaaagttcccgccaccgaatgaatcttggtgatttgcagggcctcgtcgaagctcaaatcgggaagaatggaaggcagcgctcgggcgagcatggtttttccgcttcccggaggcccgacgaacagaatattgtgtccgcccgcggcagccacttcgagggcgcgtttggcgacgggctgtcccttgacgaaagagagatcgtaaatttttttcccgtcccgctcttgggaggaaaactccgccgcaggcacgggcgaaagcggtttcaatccggaaagatgatccaccgtttcccgcaaagaagcgggcgcatatacgcggataccatggatatagcccgcctcccgctcgtttgccttggggacgataaaatcggtatatcccttatcccgagcggaaatgagcgcgggaagcacacccgtgacagggcgcaattctccgttcaaggcgagttcgcccaaaaacacggtctttcccacttccgcgcgcaaagcgccgtaagcgagaagcagactgatcgctatcggcaagtcgaacgccgacccttctttccgcacataggcgggcgcgagattgacggtgattttatgagcgggaaattccaggacgctgtttttaatggcgctcctcacccgttctttggattccttcaccgccgcgtcgggcagtcccaccatttcgtaggaaggcagaccgcgggaaatatccgtttccaccgtaacgggcactccttccagccccgcgagggcataactttgtactttggctatcatttttcttctccctgttcgcttatctcgcctctaagcacgctgctttcgtttccaatatttttcatccgatcgttgccgcctccgataaattctttgccgaaagcgattattacaagcctttcctctgtttccgtccgatcgacccgccgaatccgagagcgaactcatcgaaaaaaacacctgcggaaagcttaaaaaagaatccccgatttttttgtctatatcgtcgggtaaattgcataggcgcgcgggcaacttttctccccccattggcgtaacgattaagccctgtatccgtaaaccgacgccgttataggaagaaggataagccctcaaatattttctcggttttccgatatgccgccgaacggaaaattccctgcgcccgttccgacaaattttttcttctcacctgccgcccctaagacgtttttcccgtccgccgcccgtactttatcgacctatcccttccgcctattcctacccgctttcccctaaggcgccgggcgcttttcttttcctgattttcctttcctattcctccccgcccgttcctcccgagcggcgaaacgttcaattgctcgacattcctctttccctctgtatgtcgttttaaaaaacaaaatccgtaagagtttattctcccacggaaatgttttctgcgattttaagtcacggacggaaatagccgttatcggcgctgctcatccagccgaacatatattttgccactttcgtgggaagctcgaatccgtacatactcggcacggacgccgcgaagaagaggacgaaaaccgcaaggcagacgatgagaatgacgtccgcggcggatattttcggttttccgttctttttgagtcgtatctcgtcgggctgcgcgattttcaccgccaagggaataaatccgatatagaacactccgaagagcaggctttgcaccgccgaggtatttttgacgaacgcggaggaaagcatggagagcgccaacccgcccaagaggacgagatagatgcggcggatgcgcttattgatacgcgcgccgcggttttccgtgaacatctcggacaccacgctgaccgtcgaaaacgcaaacgccaccaaacaggctacggatacggcgaagttcatcgaaacgttccaggcgagatagcgggaggaacccgtttcgaggatgccgtcgtataccgtcgccgccttcaagggcagcagccacgccagcacgttcgccgcgttgtactcggtatattcggtaatgttcgtgattttgaagggcgccgagatccccttccagagaagggacgcatagctcagcgaaggcgccagaggatttttgtcgaacgctttaacgtaagcgttgtaggtgacgacgctggcgagcagcatgaatacgaacgtcgccaggagaaaggagagcgcggcaaacgcccaggaaacttttttcttgtagcggtaatccgcctgtaatttttttgccttcttcccgatcaaagcgaccgaaaccgcgccatgctgctccttttccgcttttgcgggaatcgccgcggcgggttttccttcggacggcgcctctctgctctcggcgtcgggcgcaaaactctctgcggtttccgcagtgtgcggcgcggctttttcggcaggcaggtatttgaggagcgcgttctgataagcgagcttctgccgcctcattccgaatccgaacagagtcaggatccccgcgacggggaagatcgccaggatgttcatcgccagcgcgagcgccgcgaacagccccgaaaagaggacgttcagaccgcccttgacgatatgctgcgaagagatgcccttggagaagaatcgatacatgaaatagaggcttgcgacgaggaagcaggcgacgagcgcatacggcgcgcccatccggcccaccgtagtggcaagcccgccgacggcaaagataaaggcaaagataaagccgtatttctcgtccttaaagagcagactgccgagcagatacacaaacaggagcgtcgcacaggtggcgagaaaaggcgtcagacgaagagcgaaaggactgtccccgaaaatggccaccgacggcagcatcagcaccgtggcgagcgaattgaaatcggtatccatggtatagacgctgtccgaacgtatatttttcccgccgaggacggtatgaatagaggtcatgaaatacgcctcttcctgcgtgaagttatagtaggaggcgctcgaatttttaaacgagttctgcgcgtctatcgcgcgggtcatctgttttttctgcgcggaggtgaagccctggctgtattcggagtttacgctgatgggaatgggcttgccgtcgtccgcgatgcagacgatctcgttcaggtcgaaattccccgtcgcggatacggaaatacacgccgcgctcacgccgtcctccttgtatgccaattgcacccagttgaaattgccgccctcccggctcttttccttcaaggaataaatatttcccagcgtaacgctgtccacttttatggaaggcttgaccgactgctgagtggaacgtttcaccgtaatggtgatatccgaacccgtcgccgtataaatgttgccgacgttgatatatatatacatgagtttggattgcccgctcgccttgtcgagattgaacgaggctaaattgccgtcgcccgacgtataggcgaacgactttcccgtattgcggaaggagccaagcgtagcgaatcccgccgcaaagaacagcgcgaacagtacgataaatcctttcagccagcccgaaagcttttttccgactttaacagcggactgatttgtcacttctgtattttccataagagtgtttaacctcctgctttgcccgacgtgtttttctctccgccgcctgcgcggagcgcatttcgtcaaggagcgtttccgccctctattcattttacatgaaacgcgggaaaatgtaaaacaattttcgcacctttccgaagaaatggcaaaaaaataagtccgcctccgactttgggcgaacttgtttttcgatcggttttttgtatccgattcagattttttctttcactttggcagccttacccgtaagatcgcgcagataataaagtttcgctcttctcaccttgccctttctcacgaccgtgatggacgcgattttcggggagtgaaggggatacgtcttttccacgcctacgccgtaggaaatatgacgaaccgtaaagctttcctggatgccgccgtttcttttcgcaatgacgacgccctcgaaactctgcactctttccttgccgccctcgatgatcttgtagcctactttcaccgtatcgcctacgttgaacgcgggaacttccgctttcaggctctccgcatcgatcgcttcgattaatcctttcatttgactctacctccattaatacgtaatgttcatgacccgctgcacggctctttgccgtacccgaaagatcagcggaacatccgaagtcaatgcctattatatatgatttttccttctttggcaagcgtttttgacggcgttttgtcatttttcgggattttcgggaatttttttgtgctctccctgaaagaaaaccgccacggccgaaaaaaatcctccgaacgagtccgtctttttccctcttctcaacgacaaacgtcggggcaggcgtctgcgcccttttcgttttcccgcgcccgaggaaatccctctaacacgcgcttttcgcaaggcgccgttttttctccgaagcgcggctttgttctctctattttccgaagcgacaatctttcgacaaaggcgcggcgccgatgaccacgatcttcgcatccgcctgaacgtcgggcttccgcttcctatttcccgcccgttttttttctgcgcgttctcccgcggtttttacataggcgacttccaggggaacgttctgccacgcctccacgtcccgcgcgccgaacagaaaccgactgcgcccctcgcgcaacgctcccgttccgtcgaaaaaggtgacgttcatggcgagaaagggtccgaaacactcgaaggaggaggtatttgtcacggcgaacgcatacctgcccgcctccttcatcgttttggcaagttctatcgcaaagagtacaccccaaaacaggagcgcggcaaaaaagaaaaaggacgccacggcgaagacgattccccaagcgcttttccacaaagcggcaaacaggctccccgcaagaaagcacaggagcgccgccgcaagagcaactccgatcagaaaacgcagacggcggacggtggcgctctgtttaatttttattcgtgcgctcttccgttccatttgcttctccccgctcttttttatcgcggctctttccgaacgggcgcgaaaggcgccgcccgttacctgctcagcgatttgctgtaatagacaaattcgttgcccgcgcagtccctctcgtcggaatcggggtcgaatccctctttccgatataaggaaatggcgcgttcgttgctcgtcagcacttccagcgtgacgctgacggcgcggtttttaaatttctcctgcatccagtccataaaccgcttcgcatatcccttatgccgatattcgggacggatatacagttcgtcgagaaggagcacgtttccgccctcttcgttgcaccaataggtggtaagcagggcgtatcccgcggcggaatcggattcttcgctctcgtagatcaggtatccccataaattttcgtgatggtcgatgacgtgacgaaaggtcttttcggccaccgattcgtcataggggcgcaaagtggcgtgagaattataaaactccctgcaaagttccaaaaaaatttccttgtcgctttccgaaaaatatcggacgtgcataaaattgtcttccgccgttttcacggcgttcctttaccgctctcgcggcgaacgattttttccttcccgatccttctcggtcggaccgtcggaaagattgaattcggctatattttagcagagccgcaagggaatgtcaacaaaattccattacccgaaaaattttttgtattttttgttgacatttccccctcctatcctatataatgaatctattaaaatatttcgtccgctttttcggcgggcgcccgctacggggagtagtcggggcgcgcggcttttacggcgcgtccgatgaatatcaatagcacaatccgcttttttcgattttttctaaaagcttattttccgccgcccgcgggcgaagagggaaacgctgaaaacaccgaataaaagagaacgggtttggattcatcagaaacgacaagaccgcagcgcaagcgaattctttgaacttcgtcaaaggagccgtttgcgttgcggtccttttgttttttacatttcctttatttttcggaggtattttatggactttctcatcgaaaccatatccaaggtggaatggcagcacgccttgatgtggtttatcggcgggcttctcatcttcctcgccatcaagaaggatatggagccggctctgctccttcccatgggcttcggggcgattctcgtcaacattcccggctccgcgctcatcgccgaggacgggatcctctcgtccttgttcaaggtgggtatcgaggcgagcgaagccatgcccctgctgctctttatcggcatcggggcgatgatcgatttcggacctctcctcaccaatccgaagttgtttattttgggcggcgcggcacagcttggcattttcgtcacgctcattctttccgccgtcatcggctttcccttaaacgactcggcgtccatcgccatcatcggcgcggcggacggccccacctccattctcgtcgcgctgaaattaggctcgcaattttttgcgcccatcatggtggtcgcatactcttatatggcgcttgtgcccatcgtgcagcctgcggtcgtcaaactgtgcacgaccaaaaaggaacgccgcatcaaaatgcattacagcgccaaacaggtgagccgccttacgcgcatcctcttccccatcgtcgtggcgctggtggcgggactcatcgcgccagcgtccctctccctcgtcggaatgctgatgttcggcaatctcatccgcgaatgcggcattctcaaatccctgtccgaaacggcgcaaaacgctttttccaatatcattacgctgcttttgggcatcaccatcgcctctcagatgaaagcggagcaattcgtgcagtgggaaacgctgatgatcatgggactcggtctgttcgcctttattttcgatacggtaggcggagtgatgtgcgccaaactcatgaatctttttagtagagaaaagatcaatccaatggtgggcgcggcggggatctccgcattccccatggctgcccgcgtcgtggaaaaaatgggcatcaaagaggatccgtccaatcatctgctcatgcacgccgtaggcgccaacgtttcggggcagatagcgtccgccatcgtcggcggtcttatcatcggcctcgtgcaggctttgctataaggaggacagcatcatgtacgattttgtaacaacggatttgtcggacgaaacctttgcggagctttccgcagggttgacctcggaatcggatatttcctcttccgaatcctcctcccgccaggagcttacccctttcgattgggacaacatcaagcccactttcacgattctctggaagggtcttttggcaattttcgtcgtcatcggcattattatcgcggtggtatgggcaatcaatttctgcattgccaaagcggagaaagccaagaaaaacagagtttcaacgcccgaggacagcgagcgtgccgcggggacgacagaggcgcagacggacaaaaaagaggataaaaagaagtaaaatccttgcagtaaaaaatatttttcggactttgtctttaaagagcgcacagcccggtcgaattttccaaacaagaccacctatcttccttctcctcccttcgccgctaagaccaattcctcaagcctcccttccccgccatgaccaattcctctctcccgactttccccgctaaggccacctatctctcccgactttcccagcccgcccccgcttttgctctctcccgcctcccccgcaaaaactactttccactccgcaccgattctctcttcccttaggaaaaactcacctctctcttttcccttttccattgacaaaaccgcgcaacgggcatataatatagatatatccttttaaggttcttcctttgcggtcattgagcgcaaaatccttccgatttacgcatccgcgccgaagaggagtacaaaacgaacgaggaaatattcatgacaaaacttctgataaatctgttcgtcaaagacagggaaaacgtgaccgatccgacagtgcgcaggcgctatgcgatgctggcgagcattacgggcatcgtactcaatcttctcttgtttgcggggaagctgagcgtagggattctcgcggtttccgtggcggtcattgcggacgctttcaacaacgtttccgacgcgggatcctcggtgatcacgctgatcggctttcgattgtcaggcaagcacgaggataaaaggcatccttggggacacggcagactggaatacgtcagcgcttttatcgtcgatatgctcatcattctcgtcggagcggaactgttgaaatcttcggtggataaaatcattcatcccgagcttcccgcggtgagcgccgcgacgatcgtccttcttgtcgttgccattctcgtcaaattatggctgtttcttttttatcggaaaataggcgcgctcattaattcgtccgccatcaaagcggcgtctttcgacagcatttcggatacggtagccactaccctggtactcgtttccgctttgatcggcaaattcgcgggcgtggggatcgacggctgggcgggcattttcgtcgcgggatttattctctttacgggcgtcaaggcggcaaaggaaacgatcgatctgctgctcggctctcctcccgatcccgcctttatcgaagagatccacgaattcgtcaagggatacccggaagtggtggggatacacgacgtcatggtgcacgactacggtccggggcggaagatcgtttcctttcatgcggaagtgccctcggacagcaatatcaattacgcgcacgacattatcgactgtatcgaacgggatatgcaggacaaattcggatgcatcgtcaccatccacctcgatcccatcgaagtcaacgaccaacgcgtaaacgagatgcgccttctcgcgcagacgaccgcggcggaggtggatccctcgtttaccattcacgattttcgcatgacgtacggcggaaagcacgtgaatatgattttcgatctgtgtatcccctcggattcgaaactgtccgacgaagaagcggcgcagagcgtggcaaaacggatctccgaaaaagagccggactgttacgccgtgatcaaggcggaacatcccttcgtataaaaacgcgaacgccgcctatctcctctccgtttgccctttgcggagaattttcctctatttcggcggcttaaaatcggaaaaacgtcgtccagcgacgcggccgcgctgcgccgtttcccgcgcttttctccgtttcagactcctctctacgacaaaccgccgcgtatcctttacgcggcggcaattcttttgcaaagaaacaaacgatttactttctgaaatttttgaacatttccttcaaggcggagccgtcgaggaagggggcgacggcgatcaagtccttgatatctccgcctcctgcgaggtgttccgccgccattttgttcaaagcgtcgggatccataaacggagccagcgcagcgagttcttccagcgcgcatcccttttttctcagctcttccgccgccgcggcgacgtccttttcgttcataaacggagcaatcgccgcaaggtcctttaaattcccttttccgcagagggcgagcgccagttttcccacgtccgcttcttccataaagggcgcgacgacggcgatctccgccggatttccgccgcgttccgccgcgatgaaagccagccgagccacgtcctcttccttcaagaacggcgcgatcgctgcaatctctttcaaactcccgctctcttcaaacgcggcggaagcgaattccatgaggtcgtcctcgtcgaggaaaggcgccagtgcggcgaggtcggaaaaattccatttgttccttttcccgttttccgtgtacgtctttttaaactgttcctgcgtcgcgatgggcgcgatgtctttcagctcctccgtcgttacgtccccgggcgtttttccttcggcaagttcttccacgatcttcgcccttctctcgtcgcagaggatttcttccatgctgaccccgaatatttccgccagctcgggcagtttggaaatgtcgggcatggtgttgccccgctcccagttgctcaccgcctgataggaaatattcatcttgtccgcaagttccatttgcgtcatgcctttttgctttctcagctccgctatttttctgcctattttctgcatatcgaacatttctctttctcctttttttaaacaatcccgcaccggtaccccaaggcgttccttttgcataaatgcgttttcttgaaagtatccgccgccttcgctgcctttttttggtcgatttccaagcctttctctttcaacggtacggccatcgacgcggaatcaacgctttcgaaaacgctttcgttttcgcctgctttgacgcctacatagcccccgccctttggaaggactccgcgcgtttcttcgtcgcctctccctcttccgctttataataaaataccgtgtgaaaaaagcgtcttttatccgaaatcttgcgcttttcgacggaccgcgccgcccttgtaccgcgtccttttcaccttttgctccgcccgcgagctgccggcgaaccgcccctttcccgagccgccgcaaaaaagtttttgcgcaaatcgcccgcgttttgcgcttccaaaggctcggctttataaacgcccgagccgcttttcgccctcgcttccgtcaatcggacgaaagccctttcccgggcgaagccgtcgcacccgtctgccttgaaataagttccgatcataatttctccttttccccgcggtcctttgcggcgggaagatttttatgatcggattatatcatcctttttcctcaaatacaataaagcgttgcttgaatcggaatattttgaaaggttttccactcaatcgtccgttgaaggaaggcttttttcggcagaagagaggatcttttgtaaaatccccccgatttccgtcaaattttccgcacgaaaatcgggttgtcgcccgcatacgcgggaagagttatgcacaagaattgtgcacattcccgcctctgcggcacccgcgatatccgcggcgggattgtcccccaccatgacgcaaagcgcgggattgcccgcctctttcccggcaatttcgaagatctcccgccgcggcttgtcgtaccccgccaaagaagaaatcaccagcgcggaaaagtattcgcggcagccgagcgcctccaaaatacggggcagttcgggcagatgattggatagaaggacatttttccagcccagggaacggcactctcgcaaggcgggaatcgcgtcgggatacagttcgtagcgctccgccttcgtcaattcgtcgcgtaccaatagggaagctctgttcgcagcgtcctcgctcagccccaaacttttatagatccgacaaaaatgtccgcacataaattcccaccatttttcgcctgtggttcgagaaaaatcctcctcgtacctgtcccagggataccagcccgctttcgtatattccttgacgtctgccggcgaaaagggcggggaaagaggggcgcacgcgattctcgctgcggcgaatacgctctctccccaaagatgtttgggatatgccaaagtcccgtgaaaatcccagaatacggctttgctttctatttccttttgccgatcgtccgtctttttttccattttttctttccttttacgctcgccgcttccctgccctgctcgtttgataagcgccctttacgaaacggcacaaaaccgcccgagcctcttgggaggcgcgcccttcgttgtttatcctctcgtttttgaataagccccgaagatacgatgcgaccggtgatttcgtttctatgataatcggcgtcgacaaggcgaaaaaattatttgcctcaacgcccgtttgtttcgaagccgagatagtaatagggagcgaaaatatttgcccaaacgcccgtttttacttttaccatcgactctccgcgtttaaagcgggcgcaaaaatgccgccgacgacttttgtccttcgcgcttccgccttcattataccattctcttcgtcgaatgtccaccccatgcgcttcctttcttccccctcgcaaaacgttttcctcaaaaaagacttttattctccatcttttgaatatgcccgccgtccttccgtcctccctttcaatgctttttcctaaaacgccgcaccgcaacccctcttgcgcaaaagcgctcgttttcagtttccggcgctccctttttccgcggcaaaagcctctcttttgctcctttttgccgccttttgtcgccgcgcgcctctcggcgcattcacgcgccgcttttttcaaaaggattcgccctcctttcgtcggaacgccgttccagcgttcacgcgccctttccctcttatgcggcgaaaatccgtcgcttcgcggaacgtcgccgcagccctgccccttcccaaaagaaaaaggagcgcctccaaagcgttcctttccatgttttatacatcagtcgtgacaatgaatttcctcttctttgaactgttctttgtcgtaaaaaatcccgtttttgtcgtaatagtccttgatcgccgccttgacagcctgctccgcgagcacggaacaatgcagtttatgcgcgggaagtccgtcgagcgcttccgccaccgccttgttcgtaagctccaacgcctcgctcaaaggctttcccttaatcatttcggtcgccatagaactggacgcaatggcgctgccgcacccgaaagtattgaatttgacgtcctcgataattccgtctttgattttaagatagattttcataatatcgccgcagacggtgttgccgacttcgcccacgccgtccgcatcatcgaggacgccgacgttgcggggatttctgaaatgatccattactttttcactgtataacatactgccttttaccctcctgtaaatcccgccatacgggcgacatcgccctgagctttgccaccacttcgggcactttttgcaccatgtattcgacttcttccacggtattgtattcgcagagcgtcagccgcagggaaccgtgcgccacttcgtgcggaacgcctatcgccagcaaaacgtggctgggatcgagcgagccggacgtgcacgcgctgcccgagcttgcggcgatgcccatatcgtcgagaaagaggagcagcgattcgccctctatgccctcgaaacataggttgacgttgcccgccagccgcctcttttcgtccccgttgagcctcgaatgagggatctttttcaatcccgcgatcagtttatcccgcagtccgcagacgtattcccgattcttttcgagatttttcatctcctcttgaagcgcagccgtcattccgacgattcccgcgacgttttccgtgcccgcgcgcctgtttctctcctgcgcgcccccttcgatcaggcttgcgaggggaagcgtctttttgaaatagagcgctcccacgcctttggggccgtgaaacttgtgcgcggagagggaaagcgcgtcgatattttccgcgcgcacgtctatgttgagatgccccgccgcctgcaccgcgtcggtatgaaagggaacgccgcgccttgcacagatctccccgatcgcggaaatcggctgtatcgtgccgatctcgttattcgcgtacatcacggtaacgaacgccgtatccgggcggatcgccgcctccgcttcctcgggacggacaatcccgtcctcgtgtacgggcagcagcgtaacctcgaatccccttgcttggagctttcttaaagtatgaaggacggcgtgatgctcgaacgcggtcgaaacgatatgctttttgcctttcttttcgcctgcggcggccaacgataaaagcgcctggttgtccgcttcgcttccgcccgaggcgaagtaaatttctctcgcctcgcagtttaaaatcttcgctatttctccgcggcagcgttccaatacttccttttgcctttgcgcgaaggcatacagccccgaaggattgccgtattcctccctaagatagggcagcatcgccgaaagcgcggcttcgctcagtttcgtcgtcgcggcattatccgcatatatcatttttctttccaaggtacttctccttttccgcacgcacgtagtatgtgctttttacgtggcgtctgtgctcttttggaaatttattacttcctttcttttgcggaaatagtataccacataattcctactttgtcaataggaattacaagaaaaacacgcaaacgtcaatttttctttttgcgtttttctcttccgttcgtctttttttgtcttttttcggtttttcagcgccgttctccgcttcgtagttttcttccccgtttccgccttttactttttcgtttacttctctttgcctctcgtttgtcgtaaactctccgccttttttcccgccttttatttcgtcgtaaacccccattttattgttccgcttcttttcccgcccttcgcttgtcgtaaactctttgtcttttactttgccgcttcttcccgcacctttcgtttgtcgtaaatttttaaatttttatttttctcgtcctccataaaaatcgctcgctttccctctcttttatttccctttgattctgcggacaaggcgcttgctttttacagcgctccgaattctctattttcgctctcttttccttaaaccacctttctcgtcgatccccatttttttatctttttatgattcttcctaaaactcgcccgcttgtcataaagcttccggctttcgtcttttcccgggaagccggctgcgcggtcaaaagttttcttttcctgcactcttttcgcccacctcgcccttcaatatgtcgcccagggtgacgctttccaaatatccgtctatgcggctgtccaactccttccaaagagggagcgtaagacaatgcgccgcgcggctgcaactctcttcgcaatccaaacaggaaacgggcgcaaggcttccttccgtcgctttgagtataccgccgacggtatagtccgccgcatctttcgccaaacgataaccgcccgtttttccgcggcggctgtccaaaaaccccgctttggaaagcgccgcgacgatcgcttccaaatatttcagggacacttcctgccgcccggaaatctccgcaagcgaaacatactccccgcctttactgtttaccgccaaatccagcatgacgcggagcgcgtaccgtcccttcgtggaaattttcatttctcccttctcctttttcctattcttttactatggattataagtatagcacaaaaaacggagaagcgcaagcgtttctccgcaaagcggccgacaaaaacgtattctcctcccgcattgttttccaagcttttctcccgcgcgatttcttccctatctacatttcgtttttcttctcccgtccctttccgtcgttttctccaaagcttctcgtctgttttttataaaaaagaaacgcttttcaaaaagcgaaagcagaaaaatccttctcttttttctctttttcaaagcgtttccgtcagcggcgtctttcccttgtgccaaaagaatttgcgccgcttttttataaattttaaaaaatcgcagaaaagcgatttttcgatccgttttttcaagcggaaaatttcttatcccctccattccttttgagaaaaggggttgaggggcttttcacaggctaaaagacgagatacccgctcgtttaccgcaatttttcaaatcagcggattccctgatggcgtaaggagtagagcccgattttttcgtttaatatctctatcatgcttcggggcgtagaaacgccgtaaactttatcttcgggaatgttctcataacgcacggcatcgtctaaacgggtgtccgcaagcttggcgctccatccgcccgaatttctgtatgcgatgatcagccgcttcaacgaccaagcgaaggcgaactcgcacatggtgcccgcgccgccgccgattcccaccaccgcgtccgcgttggcgaccagcgcattgcgcatcatatccagccctgtggggatgacgatgtccgcataaacattggcagtttccgcgtcaaaggaaggaacgagggcaatcgtatccccttcccgataattttccgaagcgtgcgcgcccgcgaacaccgcttccatcacgccgcccataccgcccgactgcacgcgatatccgttatccaccagaattttgcccgtttcgtaagcgaggcggcgacggatcccgtcttcttctatttttttgttgccgatgacggcgactattttttttctcatttcctaccctcccgtaaactgttttttcgttactattcaccgagcgaatctctgtttgaatcctgcgcggaaatagttatgcagcgcctattttgtctttattataactcattcgcttttgaaaatcaacgggcagaaggaaaatttcccccgcccgtcacattttttcacaaaatccgtcccgccttgctttctccgcgcaaacttttcctcaaaatccgagggatttcgcgctgcttttgccgaacgcaaaacggggaaggcgagcaactgcttcccgccaaagcggaaaacgccgcgagccaaaactctttcgcgcctgcaaaatcacgcttcgatagcgcgaaatttacgaaaaggaaagaaacgtcaaaacgcctccgcggaaagagtttcagccgttttccttcgcctgcgcataggcgccgtacattcccgcgtcgttgccgagcttcgcccctacgatctttaaaggcacttcgtcggcgcagacgtaaatttgttcctccaccgcctttctcagcggcacgaagagcccttccccctcgcaggcgatgcccccgcccaatacgacggcttcggggcggagaatattgacgaggttagcgatgcccaccgccaaatactcgatatattgattgacgacttcctgcgcgtccttatcccctctgcgcgcgccttcgaacgccgtcctgccgtccacattgtcgaggcttccttgcgcaatctcccacattttgctatcgcaattttcttccatgcgctttttggtctgacggatgagcgccgtcgcggaagcgtaacattcgaaacagccgtgtctgccgcagccgcacagcaatccgtcgccgcggatagacatatgcccgatttccgcgcccgcgctcatatagccttccagcatctttccgtcgacgacgatgccgccgcccacgcccgttcccaaagtgatgaaaatgctgctttgatagagagagccggagccgaatttcgcttccccgaacgccgccgcattggcgtcgttgacgacgcagaccttctttcccgtcagtttcgccaccgtatccccgagcggaacgtccgtccagccgtaattgctccatttgagaatgacgcccgttttgctgttgacgacgccgggggaggcgatgccgattttttcgacgtcctcaaacgccgctcccgcggcttgcgcgactcccttcgccacttccgccagttttgccgccgttccttcaaacccgtccgccgcattggtgacgatgctctttttggcaacgatcctgccctctttatcaaacagagccgcttttgcgctcatgccgccgagatcgattccgatgatatacgcttgcatagaacttgataacctctctataaatttatgttttttatgcgaaaaaggacatcgagggaaaacgcgcgcacttccctttcaacggataaaattggtgtagaccttcttttccctgacgggctctattcccgcgtttttacccgcttcaatgcatttcaaaagccacgccatgttattgccgagcgaacgcatcgtctgcattccctcttcgtcgcgggaggcctcgtccgcgttgttgccgtgtatttcgttccaataggtggaggataccacgggcatggagctgatggtgaaatatttgttcatcatatcgaacgtggcggtgcttcccgcgcggcggcagctgaccaccgcggccgcgggcttataggcaaacagttttcccttgccgtaaaacgccctgtccataaacgccgtgatggcgcccgaggcggaagcgaagtgcacgggcgtgccgaaaacgaaaccgtcggcaagcgccgctttttccaaaaattcgttcaccttgtcgtttaaaaagcattttcccgttttcaggcacccgccgcagccgaggcaccccgaaagcggctgtttgcccagccagaaaatttccgtttccaccccgcccgccaaaagggatttttccacttctttcagcgccgtatacgtgctccccttttcgtgcggactgccgtttaccaaaatcactttcataattttcacgcctcccttttttcactgtccgttgtattatatcacactttttcggatatttcaatactatttcgccggaaattgtgcgattttcgattattttttatttttttgtgtaccgttttttccctgagtgtcaaaaagcaccatttttcgcaaccgttattttctttgtcataaattttttcgtttcctgcgccctttctcccgcagacgttttgaaaacgggaatcggcaagggcaggtaagggacaacttatctttaaagaaagcggcaggattcgtttttcgacgaacgacggagttttcagaggagggcagacaagccgctcggctttaagaaaccagaagattgggatacaaaagacgacttccttaacgccgcttatccgtgaagcgaggaagggaaaaattctcgaagaaagacggcttaaaagcatattctccccgaaacgaagcagggaaaggatacaaatagaaggcggcttataccgcctcccggaaataaaaaaagcgaaatcttccaaacaaacggcgcaccgcgtttctgatcttctcaccggggaataagcgaatcgttttgagaagaaatttccccgagggaacggttttctttgaaaacagatcggatttttacgaggaaggcgagttttccatgcattttgcgcgttaaaaatttctaaaaaacaaagacattccttcttatggtgaggcttgtcctttaagggagatcgggatatttcccgacaaacgcttgacttacgacgcgccgaagaatttaacggacgcggattttccttctgacaaaagagcggacgggcttttatcctacggcttgcaagcggtttccgctcctctttcccgccccgatagttttcgacgatctcttacctgatagggggaaattcgatgccgaatttttctttcagccaggaaatgtccgtaacccagccctccgcctcgttgcggcggagatactctctgttcgcttccccgagagcctcgtgaaactccgactgcgtgcagccgttcactttcataaagtgttccatcgcctccgcgccccgccccgtcagctgcgtgcgcccgatatggatgacttcgtggcagcgatggcagacggcaatcactgtttccaatttttgcagtcttttcccgtcgtcgtaacgccatctctcatgggcttcgaggcgggaagcgcgcgcgccgcagatcatacatcggccgcccgcccgggcataggcgtcctttctcaccgcatcccattgctgtttggaaagcacgctgcgcaaattggcgtaccagcactcttcgggcaccatttcaaaatcgagcttgtatttcttattcttcatcccgcgttcactccctgtttctcttttcggctctaagccaaaaggaacaaaatttccatgcactgtctgaaagccgtgggcagagataccgacctttctatctcctctatcgaatagacgggaaaaggagccgtttccgcccgcaccaaaaagcaatccatctcccagcgaatgtgcgtaaaaacgtgcgtgtaacgcttttcccttacgatcgtgtacggagaaacgccccattccttcaacgcgcgttccggcgtatcccccagctcggcaatgcgggaaggaaactcgttcattcccttcaagacgcccgactcccgttttcggacggcgatgccggacggcgtttcgatgacgaatacgaaaactttttcgctccgcttttccttcttcgcgggcaggacgggaaaggcgctctgcgtgccgtgcctgcgggcgaggcaaattcccccgagcggacacttgtcgcagtcgggggagagcggcttacatatcagcgcgcccagttccatcaggctctgcgtaaaatccgagcatccctcaccgtcctcgggatatattgccgccagcttttcctgcaaataggcgcgataaaggggctgagagatgtcagtgggattttcggtgagtcgggacaagacccgaaacacgttgccgtccacggcgggaacgggcagaccgaacgcgatggagagaatggcgcccgccgtatactccccgattcccggcagacttttgagctgtttttcatcggcgggaaattccccgccgaaacgcttgcagaggacgatcgccgccttctgcatattgcgcacgcgactgtaatatcccagcccctcccaaagtttgaggagtttttcttcctcgcacgccgccaaatcctgcacagtgggaagctctttcaaaaagcgcagataatactcgcgcgccgcctcgacgcgcgtctgttgcagcatgatctccgatacccacaccctgtacggcgtgggattctcccgccacggcaatacgcgcttgttttcccgataccaggcaagcaagggagcgggaatgagagcaaaaggaaaatcgtccgttttttgtatcatatctcttattttttccctttttacgtccctttacgcaagcgcgttgaaaaaatcgattgtttccgaaaaggaaggggaatcggggaaagagaactccttaggcaaggtcagcgaggaatcggcgttgacgaaagtgacgtccgccttgccctcctttttgggcgtgacgaggcagttgcctatccccacgaaagcgcccgggtagccgctgaaaatgctctttaacaaatcgacgcccgtgatgatctccgtcccgcttgtccccgccgcgtcgaaacacgccttatagggttccagcatcccgtttttcgacccgtcgggaagttcctccaatccgtcgaggacgacgaaaagccgcgggcagcccgccttcaagccgcgcatacgcaccagttcctccaccgtaccgagcgccgccagatagtccgccgtggaacggaggtaaggcacggtgacgtccgcatttttaagtcgcagcaattccccgtattcggcgcgcggggaaagaatgagaaaagccgcttccgatctgtcgtacacacaggcgagagtcatcaccaatcggcggatgaagttatcccgccccgcgcccgtgacgcagacgtgatgatagcgcgcggggttttcctcgcggtgcgccacgaggacgttgcccgcctcgtcctgaccgagcgggatacaggcgcgcagctgttcgaaacgatagacgttttttcgggatatttccgacaaagaggcgataaattcttccgctttcataaaattccgtcctttccgcgggagaaccgcgaagaatatgcgttcttttcctatcagtatactccctttgcgcccaaatgtcaagttttcggaaattttttgaaaaaactcgccccgttcgttgaaattttctttttttcggtttataatagaataaggaacagtataggctccgtccgagccttcgccttcaaagcgaaaaactcctttcgggcggaacgggaggcttttatgaccatagacgatctgaaaaaagaaaaaatagcggcgatgaaaagcagggacgccgacgccgtgagcgcttacaacgccatgatctccaagctgacgctcgcttccatagaggcgaagggcgcgggcagggaattcggcggcgcggaatttgccgccgtgcttaaaaaggtgcagaaggaactgacggaagaaaaggagagtttcgccgcggcgggacgctcggacagcgtcgcttctctcgaaagacagcttgccgtcatcgaaaaatatctgccgaagatgctgtccgaagcgcagatcaaggagattattctcgctctgcccgacaagtccgtgcccgccgtcatgaagcattttaaaagcgcgtacgcggggaagtgcgatatgaagctagtcggagagatcttgaaaacgctctgagtttccgtgcaaaaacaaaaaatttttaagggcagtcgctgcttcgccgcagccctgcccttttgatttataaaaaaggattcgcgtacgccataaggccgaaagcgtaaattccccgtatgcgacagcgccctttttttgcaggggaacgggtaaaaaccttttttatccctttgcagagtcgccgtagactattctctgcggaaaaaatcccgtcggtcgtatgtcccacgaaaaaaaacgcccgtcgcttcccattcaaaaaggcgcgtctgctgttacccaaacgcgcctctttgatgaaaaatatataagagagaaaataatgaaaaaaatataaagagaaaattagaatgagcaatttcagtgggacggcattcccgctctttcgccgcccgctttcgtcacgccacggcgtcgaaatatttgtctttatcgaacgtaaacgaaagagccttctccgcgccgtcgcgctccaccgtcacgaggacggtatccccctttcgcacgttcagcatacggtctatcatctgatagcggcgggtgatttgtttggtttctccgccgatcgtgatcgatttgatgacgtcgccctttttgaaaacgccgtagccgatggtgcccgaggacacgtccgccaccgagttttcctcgacgatcaccgctttgccgttttccagcaccgctttggaatcggtgagctgtacggaaatcccgaacatggcgcgtttgatgccgccgttattgtcgagaatattctccacggcgtattttacctgcgtgatcggcagagcgtatccgatattgtccacgctgtcgatggtcgttctgtccgattccagctgatccacgcgcttggcattggtgatgccgatgagcttgccctgcgcgtcgaacagcgcgccgcccgaatttcccgagttgatggcggcgtcggtgcgcatgacgcggaaatcgatcgtgctcttttcgtccgccgcggtgagggagatatattccgattccacggaaagcgcgccttccgtcacggaaatgccctcgccttcgggattgcctatggcaaacactttctcgcccacgctcagcgattcggagtcgcctatttcggcagcttccgcggcgctctcgcgcagcacctgactgccctgcacccgcagcaccgcgatgtcgtaagtcatggagccgccgacgtacgtcgcgggaatcccgcttccgccttcgtccttgcccgtggcggtattaaacatattcatcccgccgtacagatacagataaatggattcggatattttgctgttgctttccgcgttgtaaaccacgtgataattggtaatgatataggcgttgcccgcgtccttattcaattcgtaaatgacgccgctgcccgcggagcacttgatcgtcgtcgtggtggagcccataaatccgcccgtcgcggtggtgacctcgaagccgcagtatacgctgaccaccgacatcagattgtgcgctatgatttccgtatcgttgtcctccgcgatgtccgcggagagatattcttttaaaaattcaaaaaaggttccctcgtatccgctgtcctgcgccgcggcgtagacctctttgatgtcgagatcctttccgtcgccgccgtccgcgccgtgcagacttttcaaccagtccgcctccgtgcccttgaagccgttatccaccgccacctgataggcggatttcgccttcgtttctccaaagtcacaggctgtaaagccgatcgctacggcaaaggtgcaaccgaccgcaaccgctgctttccagaatttagtcataattataccggcctccccgacgctcgcccgaaaattctcttccggtccccgtcgctgtttcaatttgttttacacctactattatacccttcttttcgttgaacgctttaagaatttttgaaaaatgcgtgaatatttggttttttgattttcgcaaacgcgcgctttcgacacgcttttcccgctttgtcgggcgggtttttaaaagagaaaagcaaaaaaagcgcttcaaaagccttccagctcgtccagcgtcaaagaaaaagagggaatgaaattttcgaaaaagtattcgatttccggcatacggcgggtatgcagatcttcctcgatactctttttggccttcgcaaattcgctgttgcccgaacgcagttcctccaaacatttgatgtacgccgaaagcctgtccgccgcttttacgaggcgatattccacgctttcctcgtccgccagcacatacggggaaatgctgcttttcagcttcgcaggcagcatttccgtcagcttttcgcacgcgctccgctctaattgcttatacgcgccgctaatattgcggttataatatttgatcggcgtgggcagatcccccgtcatcacttcgctcgtttcgtgatacagggcgtacagcaccgttttcgaaacgtccgcgcttcccccgtaaatttcgttgtgaatcgtcgcgagcgcgtgcgcgagaacggcgacgctctgcgaatgttccatgatattctcttcccgcgtcgaacgcatcaactgccagcgcttgatatacttcatcctgtcgaggtaagcgtaaaaatcgtatcccattgtttttctccttgtctttatctttcggatgcgcgggcgttttgtgcgaaaaacgcccacggcgggaccgtccccaaacactttcgcccgacgcgcgccgccttttccctttggtttaggaaagagcgttaaaggcgtgcgagaaaataacgggcgaaatatgtcaaatacgtttgacatttcaaaaattatgttttataataaatgcgaaaatatgcgtttgcgccatcgtttgcgaaaaccattccggcctaacgaaagttacggcgggacggaaacgcgcgctcgcataagtattttcaaaacctatcgggcatggctcgtctgcgtcgtccatgtgaggataggctcgaaaaattgaattatccgtcgtgggtgccctgagaaggctgagattataccattgaatcggcaaggtaatacttgagcgagatgatcgataa

SEQ ID NO: 2311 - DNA, 2534 bp, Unknown
  16S sequences of unknown bacteria
caacggcgtggagctttcctccggcgcggtgcgcaaccacgatccggaaatcatggtgaaggcctttgaactggtggggctgggcgaggaagatgtgaagtccaaattccccgccatgtacaacgccttcacctacggcgcgccgccccacgcgggtatcgctccgggcgtggaccgcatggtcatgctgctttccggcgaagagtccatccgcgaggtcatccccttccccatgaacaaaaacgcccaggatctgatgatgggcgcccccggcgaagtgaccccggctcagctggaggagctgaacatcgccgtgacccggcgcgaagaggactaaagcatggacttccaccgcgtgacggcaaccgccgatcccctctatgccccggccatggcattgtaccgtgccagttttccatcccatgagcagcgtcaaacagcctctcaggaggcgatcctttcccatccggattatcatttcctggtgctgaccgagcagggcgctcccgtcggtatcctgctcaactgggatacgccgcactttcgctatatcgaacactttgcaatctcccctgccctgcggggccgctcgttcggcagccgcgccctgcaagcttgggccgaccgcgcggacacgccggtgatccttgagatcgaccctttgacaaccgacattgccgtgcgccgcaaacgcttttatgaacgcttgggcttcatgctcaaccccttcccccatgtgcatccgccctatcacgacggcctgaccggacatgcgctgctggtgctgtcccggccggaggcgctggaggaagacgtttatcaggccttcgcgcagtatctgcacaccgtagtcatggcctgaccccatgcatcgccattcttcccggcgaatactcaaaaatgaaaaaactgccgcaggaaatggattccgcggcagttttttgtcgtctgaacggaaaacagcagtcctcctgcacggcacgcaatgcgtttccggccggctgagctttcccaacaccctggctcagaaatggatcacagtgaccgggcggaggcactggggcggaaaccgtgcctccgcccctgcaggccgtcctgaccgttccgtttgcagcaaaacagcccttccgtcccccctgtttgttccacggcacggacggctttcgtacccaaagcgagaaaagcgcccggttccgggcgcttttttcatgcaattgggccgatcaggcgcagcttctgcgtccgcgtcagacgcttgatggccgcctcccgccgcagcgcggcgcctttgtccgccgcttcttccacatacaccagcgcgcagggccgccgggcgcgggtgtatttcgcccctcggccggcgttatgcgccgcgagccgtttttccacatcattggtggaaccggtgtacagcgttccgtctgcgcagcgcagaatatagacctgccacattacgcctcctgcagcagtcccaggctctgcttccattccagcacccggcgcacggaagcgtcaatctgagcttcatcgatctccccggccgccacagcctccagcaccgcggcgatctgggtgggataatcggttgtcagcaccatatcgttgcccgcctgcagggccagcaccgccgccgcgccgccggcagtgtatttcttcagcgcgtccatggccagatcatcggtcaaaatcacgccttcaaatcccagctcagcgcgcaggatttcatgcaccggcgcagaaagcgaagccggatatgcttcgtccatgcatgcgacaatattgtgcgacaccagcaccgccggcgcaccggcccggatccctgctttgaaaggcagaaaatccgacttcataaagctctcatagggccgctcatccagggaaatgccggtgtgggtgttcaaattattcccatagcccggaaaatgcttcagcacgccgccaatgccggcacggttcatttcttccaccacagcggacacatattccgccgtctcctccgccggcgcgcccagcgtgcggggatagatataatccccggggtcggtggaaacgtcgcacaccggggcaaagttgacgttgacgcccagccccagcaggaaggacgacttttccgccgcatcgccgcgcagagcggacagacccccggcagcgtacagcgcctggggcgcgggaaacttgtcggcgcgcagatgggggttcgcgctggcccgcaccacagtgccgccctcctcatccgcaccaatcagcagcggaatgtccgcagactgctgcaattcctccgtcaaggcacgcacctgggcataagttttacccttaaaatcccggccaaaaaggatcataccgcccaaatgatactgcgccacatcctctgccgcgttctcttcggggcagcgcacaaaaaacagttgccccaccttttcttccactgtcatggcagcgatctgcgctgcaatgggatcctgctcctccgccgggggcgcctcctctcgggtggaatccatcgcctgcgcgccggacggcggcgcttcatcatc

SEQ ID NO: 2312 - DNA, 2265 bp, Unknown
  16S sequences of unknown bacteria
tcgccctccgcccagcgcgccagaaattccgcgccaaacagcgcgcgcacgtcccccgccgcgaaggccgccgcgttttcccgcgtgggcgccaggtcgccgccaatccagatgaacacacccatccccctctttcctgcctttattgtaacgcaaaacggctcttctggcaagcacggcgcggaaaatgcggcaaaatcccgcccattggcttgtatttttttccgtaaactgatataattaacaaaaacgccgcgttttgcggcgacgagggggaatcgtatgctgctgggaatcgatggcggcggcaccaagaccgacgcgttgctcaccgataacgagggcaacgtcctattccggcgcgttggcggcggatcgaacctgaacgattccggcctgggcgtggtggaagagcacctgcgcgctctctttgcggatttgcccgccgggccgatcgacgccgtccacgcgggtgtggcggggtgcgctacgagcgacaattcgcagattctgggccagtgcctgcgggaactgctgccgcaggccaaatgcatcgaggtgacgagcgacatgcccaacgcctattacaccgtggacggcgtgcgcgacggcatctgcgtggtggccggaacgggcgcgagcggcggcgcgctggtgggcggaaagctgcgccaggtgggcggctggggccatttgatcgacgacgcgggcagcggtttcgacgtgggccgggcggtgctgcgcgcggtgttgcgcgcacacgatgggcgcggcccgcagacggcgctcacgcccctggtggaaaagcaactgggcatgcccgcccaagacgccatcggcatgctctatcgcgaagggcggcacaaaatcgccagctttgcgccgctggcctttgccgccatggaggaagacgaagtggcgcgcggcatcgtggaaaccgcggcggaggaactttgcgccctcatccgcgccgcggcgcggcacttgagcgcgccgccctatttcaccgtgctgtgcggcgggctgtggaaggcgcagcccttgtacgcgcgcgtgaaggcgctgttgggcgcggattacgacctgcgcttgcccaccctgccgccggtgtgcggttgcgcggccgcggcggggcagaaaattggcctgtcgattttgcccaaactgaaggaggcgcatttcgcatgacggacgtgcagattctttctcatctcaaaaccgaggccagtgacgcgcgcagcgcgaatttgagcgagctagcgccgctggaattcgcccggctgatgaacgatttcaaccgcgaggcggtttcggccgtggagagcgctctgccgcagatcgcgcgggccattgagggcattgccgcgcggctgaaggcgggcgggcggctgttttacctgggcgcgggcaccagcggtcggctgggcgtgttggacgcttccgaatgtccgcccacttttggcgtggacgcagatctggtggtgggcatcatggcgggcggcgacggcgcgctgcgcaacgccgcggaaggcgcggaggacgatggccccgcggcggtgcgcgatttgcaggcgcgcgatttgcgcgcggcggacgcggtggtggccatttccgccagcggatacgcgccctattgccgcgccgcgctggactatgcccgggaggtgggcgcgctggccattgcgctcagttgcaacgagaacgcgccccagtccgcgcacgcggacatcgccatcgaagcgcccacgggcgcggagatcctctccggctccacgcggctgaaggcgggcaccgccacaaaactgatcttgaacatgctctccacgggcgcgatggtgcaaatgggcaaggtttacaaaaacctgatggtggatgtgcgcgcaaccaacgccaagttgcgcgaccgctcggtgcgcatcgtgatgcaggccacgggcctagagcgcgcggcggcgcaggcgctgctggaagaggcgggcggtatcaagaccgccatcgtaatgcacgaagcgcgttgcccgcgggaagcggcgcagcgcgcgttggaggcggccgatggatttgtggcgcgcgccatcgaggttgtggcgcgttcatagcgacatttgggcgcaattgtgttgcgcaatcctgcgaaatgtgatatgatacagactgtcaaaaaaccatgggagagcgcgagagggggcacgaagcgcgcgccctgtgggacagagccctttcgcgcttcaatcgtccccggcggcgtgtacggcgggggcgggg

SEQ ID NO: 2313 - DNA, 32759 bp, Unknown
  16S sequences of unknown bacteria
ttttcgcctataaggtgtgtttgcgaggcacatgtcctcgcaaacaccgatcggtaacccgcctccgcttttttcgtttcacgaatggcggattccctttttcgatagcctcaaaacccccgctatctaaaatagcgggggttatacgctatataaccgcttactgcgcggcggccgttgtggtggtcgcctgtgtcgcggtactgtcggcgccgccggtgggttccgtcggcgtggtggcggctccgcccgtgaggatggatagcgccgccttcagctggggatccgtcgtttccgttaagagctcgaagtctgtcgtctggctttcggtcagggaaatcagcttggtgggggcgatgcctttcccttccagcccgccactttggatcagggacagctgcgccacggtcagcttgacggcggagctgtccaccttcaaggggaagaattcctgtatacggcctttaccggcggtattctcccccaccaccgtggtcaattggaactcctgaagcacgccggcaaacagttcagcctctccggcggttttcccgttgaccagggtcacgctggggacgctcatctgatggagatcctctgcgattagttcggtggttttgccctcattatccgttacggacgcatacttaccccggggcagcagataggacagcatatccttggcggactgaatcgtgccgcccgtgttgccgcgcaggtcgaaaatgatgctgccgacgcccgcctcttccaaggcggaataggccgctttgaactgctccgtggtgttattatggaagccgcggatgcggatatagcccacgctgtcgccgataacccgttcctccacgctgaccagcacataggggctggccgtcagctcgaaggaggagggctggccgtcgcgggacacggtgaccagcaccttggcggcgttctccagcttggacttgacggcggcgaaatcttccttctttacctccgtgccgtccacggccgtgatgacgtcccccttgcgcatgccggccttctcggcggccgaatccttatgaatcagcgtggcgatgattttcccttccgtggacagggtgacgtcgatgccgacgccggtcatcttgccttccgcctccgcctgtgccttggtataggcgtcatggctgagataggcggcgtacgggtcgtcaatgctggagatatacgcctgggccagagccgcgcgcagcttggcctcgtcaatgttcgcgtactgctggcgcacggctgtgtccacatccgcaatgttgtcaaacatgctctgtttctgggccagggccgtgacgttggagttgaaataccgcatggccaccaccatggtgaccgaaatggtcagcgccatggtgatgatgatcagcgctagggtggctcccaacggaatttttttgttcataggggaattcctttcctgcggttcctgcccgcgccggcaaggagacggcgcggcagaccttattgccgcaacaagctcatgaaaactccggctataccggcgtcttcatgagcctgaacgcttggggcaagatccgggcaacccggcttacttattcagcgaaacgtagccgttcttgatgggatccaccgccacgccgttgacgcgtacctcaaagtgcagatgcggcccggtcacattgccggtatcccccgccagggccagaacggtcttgccgcgtgtgaccttatcgcccacccgggcatacatcttggaggtgtgagcatacagggtggaaatccgccggcccttggaatccaagccgtgatccacaatgcagtaatagccgtagccgccgccccaggtgctggtataattcgaatagataacggtgccgctttccgccgcgtagatcttctcgccataaatcgggacagacccgttggcaatatcgatgccgcggtgaaccgtaccccagcgggagccgaagccggaggaaatgttccgcacggtgggcaccggccagaacatggtgccgccgccgtattggccgttgttgttgctcttggaatcgataattttctggatctctttatcgatatcgtccagcagcttcttattcttttcgatctgcgctttatagttgttggcctgggccaggattttcttctcctcggcctggatcgccttatagaggttctccatttcttttttcttggcgctggcctcgttttgaagcgcctgctcctgcttcttgcggtcggccagggcctgcttgtccgtttccagcgcggacttgtcggccttgatcttggtcagctcggcctccatgtcgttcagggccttctgatcgttctctgcaatgcgttcgagcatcttcgatttgatgagatattcggcgtattcctcggtgctgagcatcatctgcacgctggacaggttgccccgcttggacagggcccgcaggcgctcgttcagcttatccgacgcatcctgaatgttcgcttccttttgagaaatagccgactccttggcggcgatttcactgttcttgccggaaatctgggagttcaggctgctcagccgctggttgatgttctccagctgctgccgggcgttgtccacctggcttttcatgtttttcaagcgggcctggctgtcctccaaattgtcattggtattggccagctgctttttcagctcatcggcctttttctgcagctccttctgctgagcgtacagctgttcctcggtcatggccgccgaggcgggaatcgtctgcagcgaaaacgccagagccagcagaaccgccgacacgatggcgagaagcctccggaacccggcccggcttgcagtggatgcggtcgtcatgattggcttcctccttcgtccttcaaatacttggtcatggatatagcgctgcccgcgatgccggtgagcatgccgatgaccaggaagcctaccagcagcacggcccagacatcggagaaggtcagcggactaaacgaaatgccgaagctgaacagggaggccagcttgctgtacacccaggcaatgatgccgtaggagagcagcgcggccagcaggcccagcacaacgccctcgatggcgaaggggaaccggataaacccgttggtggcccccaccgatttcataatataaatctccaggcggcggttgtacaccgtcagcttgatggtgttggcgatgataaacagggaaaccagcagcagcatgagaatgacccagccgcccaccgccagcaccacctggcggattttggtcagcatgctggcgattcccccgtcgtaacggacgtcgtccaccccgctgacgcccttcagttgggaaaccgtcccttcaaactgatccaagtccttgagggtgacgatgtaggtgtcctgtaggggattgttctccccctgcatgctttcaaaggtttcggcgggcagctcgtcccgcatatcctccagggttttatccttggagacgaattccaccgacgccacgttggtgatggccttcagcttttcgcccacctcagccgtttcctccggcgtgctttccaggtcgacgaacaccgccaccacgttctggccgtaaacccaatcgaaggcgtgatccacattggcgaacaccagataggcaaacccagtgagcagcaggcaggacaccagcacgcctatggaggcaatggacataaaccggttctgccagagattgcggaagccttcccgcagcagataccgcagactgctgagcttcattgcgcgtcacctccctgcgtgctgtcggagaccacgcacccttcccggatttcaatcacgcggcggttgaacatccgcaccagatcccgctcatgggtcaccatcagcaccgtggtgccgcggcggttgatttcattgagcagctccacgatttcataggacagctcgggatcgatattgccggtgggctcgtccgcgataatcagcgccggattgttcaccagcgcccgggccagacccacccgctgctgctcgccgcccgacagctccatgggatagttcctcgccttgttctgcagccctaccagccccagaatgtacggcacccgcttgcgcacctcccgctgggaagcgccgatgacccgcatggcaaacgccacattgtcgaacacattcatattgttgatcagccggaaatcctggaacacgatgcccatggtgcggcgcagatacggaatttcccggcgtttgagcttagacaacttaaaatcgttgacgataacctctccggcattcgccacttcttccctcatgatgagttttaaaaaggtcgatttgcccgcgcccgacgcgcccacgatgaagacaaattcacccttatcaatgcgtaaattgacatccttcaaagcctttgtaccattgtcatacaccttatgtacgcctttaaactcgatcaaagaaacacctccctgtgccgacgttcgccgtcgaaatcccggcggaaaccgcaaaagccgtcgattggccgggctataaaaaacgccctttgcgggcgccggagtattcgtattcggtgggcggccatatccttccgcctgaaagcacgagcctagagcaattggcgggtaaaatggcatgaaaggaggcaaggaaaaatgacgtggggcaaggcggaggacgccggcgggcttgcgcccaccaaggacgacaacgatgtccacacgccatttttaccgccgaacttgtgtcattttattcgccaattgctctattgtcactataccgtgaacaagaaaaaggcgcaagcctcaacatcttccattatgggaacaaacttccatataaatgggaacccgcgtctcccgttaagcgagccgggcgtctcccgttaagcgagccgggcgtctcccgttaagggagccgccgacagaaaactgtcggcggcagcctttgtatcctgagcggattagtatttgatgggattggcaatgaggtatttcttgaccatcagcgccaccttgaagacgatggcgtcgtcgaattcccggagatcgagacccgtcagtctcttgatcttctccagccggtacaccagcgtgttccgatgtacgaacagcttgcgggacgtctcggaaacgttcaggttgttctcaaagaaccgctggatggtgaacagggtttcctgatcgagggaatcgatagagcccttcttgaacacttccttgaggaacatctcgcacagcgtggtgggcagctgataaatcaggcgggcgatacccagattgtcatagctaacgatggtcttctcggtgtcgaacaccttgccaacctcgagggccacctgggcttccttgaaggagcgggccaaatccttgatgccctcgaccacggtgccgatgccgacggtggcctgggtatagaactcgctgctcagcgtatccacaatggaacgggccagcttctccaaatccttggattcgatgcccgagcggatttccttaatcagcgcgatatcggtctcgttgatattgatgacaaaatccttgttcttgtcggggaacaggttctgcacgatgtcataggcggaaatatccgagcgggcggcaatccgaatcagcaccaccacgcggttgacatcgttattgaaccgcagctctctggccttgaggtaaatatcgccgggcagaatgttatcgagaatcacgttcttgacaaaattgccccggtcgtatttttcatcgtaatactgcttgatgctggacagggatacggcaagcagagaagcgaacttagccgcctgatcgtccgttccctccacgaacaggatgtactcgctgcgcggccgggagccgaagggcttataggtgtacccgtcccgcatgaacgcttcctgggcggaaaacgattccgcgttcaccgcgtcggatacctcgccgatacggccgagatcgctgcacgcgatgaccgacatggtttcgtcgatgacgccgatggtgcggtcaatcgcttcccgcatctggtggacaactccctggaaaagccgattggacatagaattcttcccctttacataaaaataaataatagaatccttccgaatccagtccgccggccagccggaaacaccttatacactctccgcataaagcggcggacatgtctcaaaacgatcccgagagtccctatatgggatctctgtgcgggtctgcggcggcttccgcggagttccgaaccggcaaatcactcggatcttgcttgtccttccttaggcggcggcttggccccattcccgggtatcgtatttattgtacacaataccgaaaaatattgcaagggctgccggaaagattattcatgtaatctgaccgaaactttgtaaagtttacaattttgtaacactttctttgccgttccttgcatttccgggaaatcctgccacaaaaaacgccgtcccctgctgcaagggacggcgctcgttatatggcgacggtcatgccgtcgtaggccaccagcaggccctgctcggcagcgatcggcaccagctcgtcataggtggcgcctccgttgtgtgaaaagtggtgcaggcaggcggcggtggcgtcgtccgccagccccatatggcgcagccgggtcagagcctccatcgccgtatccagccccatatggccgttgcgccagccggtccgcaggccgccggtgcagtccagcgacacgaaatccagatgcgggccatgcttctccagccactcccaggtctcctccgggaaccagccggtatcgttggcgtacaggagagatttttctccatcctcaatcaggaagaacaccgggccggaggccggatcgtgattggccggcagaggggtgaccgtatagccggcggcctcaaagggttcaaagggccggatttcctggaacagcacccggttctgttttatcaggccgcatttctccagcatttccaaaatctccggagccgcctctttggtggcataaaaaaccagggggcgatcgtcgccgggatacgcaaacccatccagccgcatttccaaatccgccggatacagatgatcgctgtggctgtgggttataatgcagtcccgtatacggggcagatccagtccgctgtaatacatgtgcgccagggtgtccgccggaaaatcgatcaacagcttgtcgtccaccgccgcctgggaacgggtgcgcaggttccgtcctcccgccttggcggcccgccggcaattgtcgcaggtacagaacagcgccggccacccctcggcggccgccgtgccgaaatactgaaatttcatcgaccccatcctttccgtgcagggcttttccgccctttgccagtatcatctagggtcagtatacagccctcctcccgtgaagtcaagagacaagctccgggcggaccaccgctcttttctttccccgcttcagcgggagggagacgggcggccgattgcctccgccgctccgtcaaacaggacggacagggtatccagccgcggcgcgtccatggcgagatagaccgccggaccgccggtgaacggatcctccaccccgacgcacagcttcacgcccggcctggacagcagcgctgcttccaccgtcgtgcgggtgcggatttccttgttttccgtcagcgcggacagccggatatccaccggtgttctcgagagcaccttgccgctgtcgctcaggatatacagacaggcgggccaatcccagtacaagggcgccgccccgtcgttcacccactggagctctaccgccagctccgcttccgaggcgctgtcgacaatggcggcctcccggacgcgcaggcggtagcccaggtttttcaagatctctccggccccgtccttcagccccgcgccgccgctttcgctgaagccatgcgggcatttcgggccgagaaaggtggtgtggctccgccggacgagggcggcggtttcctgcagccggggccccagaagctccgcgaaggaataccggctggtgaattccccgcccaccggggcggtctcccacaccgacggcatggccaccagggcgtcggtttccccggcctgggcgtaatcgccgccattggcaatccagtccagccattcctccgtgctttcccggtcgccagccatgtcgttaaacaagccgaaattctcctttttcgcatccacgaaaggccgacgcatgaggattttggcatgagggaaggccgtcagatagggggcgatatactgccgccgcaccgcctcccccggcatgcggggaaggccgtcctcatatttgacatgccactcgccccaatgtcccaggctccccagctccacatagctgaaaaaggtatcctggccaaaccgcttccccagggcggcgacggccttcgcatgggcttcgataaatacccgattggcgtagttggggctgtagcctttgccataggagatatcgtaatccttgccgtccttggttttctcatacagccagtcggggatatcccggtgcggctcatcgccgggcagatcgcagacgaagcggaacaccacatgcttgccggcggcgcgccactcgtccaggtggttggccttttcgatggcctcgaaggcaaaaacgccctccgacggctccagctcccgccaggacacatccacataaaccagtgtgttgtcggcagcggcctccagataatcggcctccggtgcgaagcccatgaccgggtttttcagaatttcgccgcttttggcaaacgccttggaggccaggagagaggccggctccccgccggacagccataggctcagccctatccccccggccagcacgagcagcagcaccagcgccatcagcatccctttggcacggctagtcatggtattcaccgtcatattgaatgagcgtcacgtcctcgacaccctccaccgcccgcagcttctccagaaacaccatgctctgggttttgcagaagacctccatggccatctccgcgctttcccctcgcagcgtcttagacttgacgcggaagcgcgtgttccccatggcgcgcacaatgttgtctcccaccaggtcgccggtataatgcaggacgacgatatacacctgccccttggaggaacggcggctgaaaatcaggagaacgagtatcatcacgatggccgcgataagtaccagggcaaacatgttggcccccacggcgatgccggtggtaatcgcccagaacatgtacagcagatccatcggatccttgacggcggtacggtaccggacaatggacagcgcccccaccatgcccagggacagcaccacattggtgctgatggccagggtgaccatgcaggtcagcaccgtcatgcccaccagggtgacggcgaaggagcggttgtacaccacgccgcggaaaaagcggttgtagataaagcagatcaccaggcccatcagcagggccacccccagggcgatcaccatctgcagtattttctccggtgtgaaggagttcttaaacatatccagctccagcaccgatttttttatcaaatctttcacactcatggggacttcctcctcaaatcaatagtggatggattccgcatataggtatcccgttttttcgcagcccagcacgaacttcgagaccgcggtcagctccgaggagcggggcggcagcgcccggcggacaagatcgggcaggaattccgtgaatttgacctccagcaccagcttgccaggctccagcagatagagcatgggcagccggggatcgaacagcttttccccgcccgaacaggcgcggacgttctcgtcaaacgtgacgcgcacgtctccggcctccatcacaaagggggtgcgttcatagtcgataatcacccgcggccgcagcatccgggcggtcaactggacatagaactcgccgcacagcggctctttccgccccagaagaaacgcgtagtctccccgcaggatccgatcgacttcctcccgagacaaggggacggcgcgcttataaatgtagctgtcctgcttgctcttgcattccagcttgataacggcgtcattgtcgtcataaaaacggatccggtactttttccgcccggtcacgcccatgagcttctccccataggcagtgtgccagtagtcgtcaaaataaagactgcggattttgtagccgccctccggcgcgtggggatcccgccgcatcaggacgtccaggcgccgggcaagcagctcccgatcgccggcgttgatgaggaatttcagctcatgccggtaatgcggcctgttttcggccatgggctatccctcccccagcgtgccatcggggaggatatagaagcaccggacgccataatgcctcacgccgttctgatcctcgtaatattcctgggcggtctgggtttggccggatgcgttcttgacggacacccgcatgaaatactggccgggagccagcttgccggtctgcgcctggggcagcttcaggttttcctgcttgttcagcgtcgtcttaaaggtgtaatccctggccaattcgaaggtataggtcagcgcctcgttatcaaagtcaaaggaaacgtcccactggaacctgaccgcatccttctccactgtaatggtgtccaggaagaaggggagcgggcgctcgaggctggtcagatacatctgataattgatttccacctcctggcccagggtgttcagcacctgctcatatcccttgacatcgtacacgtcgtacatgacgtcgggcatggcgtacagatacggctgggtgaccttctggtattccttgaccttggcggcgaccacgctttccgatacaagcttccggattccctgtatcttattgtccagcttcttgcgcagctccggcgatttgagcacccgcttgtgcagcaccgaaccccagtagttgctgatacccttctcataattgtagccgctcaggcccttgaacagccggtcctccccgctgccccaggcgccgtcgttgtcccaggagatgaaataccacttctgggagttctgcgggctgtacaggaggaagttctggctggtggtgtcggtgttcccggtcagcatctggaaggccagccaggtaaaatagttctcctcgtcgaaatatttggcgaacacctcttccgtgggcagggagtaattgttgaggtcgtccagcatggtcagcagcttctggtggtcgtcgttccccttgacctccagcacctcctcgaaggcggacaaatcgtacttcggatcgtccacgagcttcaacgcgtcggggtaccggaaaaactcgaacatgctcgctttatacagctggccgtattcgtccagcccatgattgcgcaggaagcgcttgttgggctgctccacctgggtatacaggccgtaatccacaaatttggcccctgtggcgtcgtttccggtctggtccttgacgtacaggtgaacaaactgggtgcgcaggccgatcatgcccggcacggttttgatgaggtcgtagctgagcttgttgcggatgcgggtgctgtcgtaagggtgcttgttgagggcgatggtcttctggttgcgccaggagccggccccgctctttatcttaatcttaaaggatttctgctccgcgcgggagctggttttgccccgcacctgcacggtggcgttgggcacgttcagcccgtagccgatttgatccggagaggggccggactcgtcccctacctgcaggatgccctccacgccatagcgggggatccccttttcatcataatagtaggtggaattgccgttgacctcgctccaggaatgatcggtattgtcagcggcattgccccggcgcaccgtcagatacatggtgacgatagaatcgtcgtcgtcggcatacaccgacgccttatccttcacctgtacgtcgttgatgctgccggagggctcgatatccgggcgctgctgcaccgtcgacgtgtcgtcccccgtcccgaaattgcaggaagacaaaagcaggcaaaacacggcggcagccagcagaccggtccccttccgccggcggcatgtctgttgattcttcatgtactaccaatcctttcacaatggagagcggcatcagctgtgtgacgggtgttcctccgccttttcttcggcggcccgctgctttctggcggcccgagcttccaggcggacgcataggcgggtgaacaggccggtttcctcccgcacgaacatgggctgccggctgagcacatgatatttcagcttgcccagatactgcatcagccgcagccaagcgaccgcgcagaagaccagcccgcccagcacaaagccgaagccgaacagcatgctcggcccgcgcataaacaaaagcgtaaacgcattggcaaaaaccgtaaagcaggcggccgaaaacagagcgcccttgttgtccgcgaaatacagctgaatgagcatgatgctgttgccgatggcatacagggcgtatcccacgcaaagcacccgatagattcccagcatttcggcggtgaaccccagggcggtcttcggcagcagcagagttcccgccacaataaacagcagggtggaaaacagctgcttctgcgctagatagctcagctcctcccggagcacccggatcatattgctctcagcggattcgatatcctcgagcgcgcccccgtcgttgaacaggctgaaatacgtcttatactgcggataaaagcgggtttccaccgaggtggtgaaattgatggtggtgatcaatatggagaaaaacgccaccagcgcgggaatatcatgggccggcgcgccgtaatacagaccccgcacctgcacgcccaaggggcttgcccacatgatgaccagatggccaaacaggccggtggtgacgaaaaagcccaccagcgccagctgggggaaccgatcgaaccagcgcagaaagctgaacgtcgacccggtcccctcgggaaagtaccggtacagcagcgcgaaataccacaccattaaaatgccgtacccgcagcacaccccggtcagcagggccacggtgatgtcccagtgcagcacgaaaatcagcagaatcccaatcaaaaacgccatgagcagcgagacgaaaaaagccagcaatatgtttcggtaatccttgatagccgttaggtaattgatttccgtccacacaaccaccagcgaggcaaacagcagcaggctcaaaacctgatacagcaacgggataccggagacatgcaggaacacgccgtacccgacgacgccgatgaccagcatcaccgtcaggctcccgtaaaaggagggcatgaccgcctgagcccgctccatatagagcatgtcggccgtgcagcgggtggtgagcatggaaaacaggctcgtcagggtcagagaggccagaagcgcgtaggtgatcatggacaccagcagctcccggtcgccgcggtcgaggcctgccttctccgcgatgaaagtgacgcccagcagcagaaccacccctagaatcataggaccggtgcagacgatgccggcatatccataggcgcgcagcgtggccaggagaccccggcgggaaaacagttttttcagttcgaatccaatgcctgccacgcgtccatcacctcccggtaattttccaaataacgacggatcatgtcctcatggacaaattgggttaggatccgcttctgccccacctcgcccatttccaggcgcagatcccggcggatgcacagcaactccatagcgtcggccagcgcctgcgggtgcatgggcggctcgcacagccccgcccggccaaaggcatcgtagctcgtcccctccagcaagtcccggcagcagcccacgtcggtggtgacgcagggccggcgggccgccagggattccagcacggccagcggctgcccctcggaaatactggacaggacggtgaaatccagctttttgagatattccgagacattggtgttgcccaccagatagagatccctcacctccagctgcgcgataaggtcgacgcattcctggcggtattcctcatcatccgtgtcccccagcacgtgcagccgcgcctgcggcacccgggttttcagctccaagaaggcgtaaatcagcgtcttgatgtccttgatgggggcgatgcgcaccacggcgccgatatccacaaaatcatcctccggcttgagggggatatggataaacttctcgcagtggatgccgttggcgatgacccgccgcttgtacgcctcgcaccccagctctccctgaatctctgaatagcgggagaacagcgccgtcacccgcaccgccgcgtcataggagcagcgggccagcatataaaacagattgatccagtgctgcttgaagtaggaggcgacccactgggcccggaggatttcctcctcccgctcccgcgtgtaaatgccgtgctcggtcagaatgaacggccgatgataccgccagcccgccagcgcccccagcaggccgccgtagccggtggacgtcgcgtgatacacgtccgcccgcggcacctcctgctggatcagatacaacaggggcagcagcatggagcgcaccgtgtggaacagctcggagaatgcgatatacgggtacttctcccggcacatttccaacaggatgttcagaaattcctcgctcatcaggaaggacagcacgccggtcttcttgacattgtaggtgtcaaacagcacttcccagtccggatcctcgcaggccagcagccggcggagggccgtcacctgctcgggcgtgaagcgcagcttttccttccccgtcgggcgcaggcgcagggcgtcgtccaggaacacctcgtggatttccgccacattgcgcggcagctcatatttgaattttcccttgtcctccgccttggcgccgataacccagagcacgaactcgtgctccggcattccctggatatattcatgcatccagctggacaccccgccgcggacataagggtaacagccttccagtatcatacaaatccgcaattcgaccactccgttttcaggatgccagcaccaccgtaacctccggggccgtggcccgcagcacatataagctgccgttcacctgctccaggctgccgccggtgattttctggcagcggccgtccagccgcagaagcagataggcctcgtcggcaaagccctgcaggttcaggcggtacaccccgttttcaagcgtgcgatccaccgtcaggcagtcgtagcgctgcaccgcgcgggaggcctcggcggccgtttggttacgcaagccgggggccgcgccgtacagccagtccatatagccgtccaggttgtcgcgcagggtgttccagcccagggccgcccctcgatcctcgtccagaacgtcgtcaggatggataaagtgggaattgacgtactgaaagttcagctcgttgaaggccgcccaacgcatatacgggtcgagaatggcacccgatatgatgcggggcagttccacaataccgtcgtcgctgacacagaattcctgctcgtattcatagtcctccttgaggaacaccccggacagggtccggatctccggaaagctctccgcgagcatcgcccgcccttcggccgacaggatattggacggcggcacatacgtggagatggtgtttttcgggaacagggttttggtaaaatccatcagttccgcgatggcgctgcgcatgtcgttcgccgtcggccaggtctcatagtccaccttgcccagaaaatcgaagccgtcggggcacaggggcatgtggttatacccgtggatgccgatttctccgcccttctccagcagcagtccgccgaaatagcggaaccgctcggtatccgtcgtgcgcggaaaattcccggaggtccgctccgagtaatcctcgataaccacaccggtatagcgcacgccgtgcttctccgcgattttcagcatatccggccaccagatgttggaataaaagctggaaatgtcccggccgaaatacttgcggatgtattccccgttgcccataggcaccggagagggaaaatcgtcgaggaaaaacacggaggaattgataaccggataggcaaacacgtcctggagcaggctgtaggccgccgctgtcaggccccgcgttaccttttcgcacatgccatggttattgaccacaaaccgccccttgccatagttccgctcccagagcatcggcacggcattggcgccgttggacgcgacatgtacggtgcaggcggcgtccagccgcacatccagaacgctcgcggagggctcctcccaggcgtactcgaagccggccgcccccaccatgaagttgtcctgaatcttcagaccgacgacgctggtataccccacgccgccgtccacaatccccagttttgaggcgatggaacggaacaccaccgtcggatcgagggtggcaaaaaacatgcagcgcccgccggcctccacccagtcgcacagcgtgaaaatattgtcctgaaacggagataagtctggacagagcaccaccgccgtggcatagccctgcagcttcggaaagccgcccttcgccagatccaccacgtcatatcccacgctcatgttgtcgagaacaacggtcatgtgatcgtaaaattcggcatgagtctcctggcggctgtccacgataagcaggcaatcgatggtcttatgcttggccgccttgctctgtttgacaaagtccatggataaaaattccgtttccacatgggacacccgatagctgatgccggagcgctcgaacagcagcagcagaccgatgacggtcagcgccaggatgggccagatgaggatccacagccggtccttgcttttcatgtttcatgcacctcccgcttctccggcgcgccccagaagcgcagcgcctcccgccccacggcggacaggtagatttcccggcgctgtatctcctcggtcgtccgacgaatcagcgccccgtcgccggttaaaaagccgtattgcaactgcagcagccaggaattttcatcctgcggccactgcctcaggcagtcttcgataagctccgcggccagcccgaactgccgcagcgccagtcggttctccgccgccgcaaaccatacgcggcgatccggttccccgccgccggcccgctttttgtccagcagctcgccataacgtgtccgctgaacgcccaacacgctgtcctccagcaagccgctgtcaatataccgccgcagcgccaggagacaattgtccagcgcccgagcgctgtccggttcctctgccagccggcgttcgcagcgctgcaaatcgatttcgtattcccgctgtacctccatcatggcggtggacgcatagtgcgtcacctcgatatcgtcgttcagacgggcctgctggaggagctggatatactggttgggatcctgtcgcagaatctccaccatcagccggcggcgggtgacggcgtcgtttatcaaaaacgcttcctccagcgggaccaccggcatctgagtgctttcttcctcgatgcccagcaagcgataatcgttgatatgtaaatcttctagatctattaattttgcaccagacttatgccggcgcgtgttccattcggctgttgccgcggccagcagtccccataccggcaccagcgccaccaagggaaacgcctgggaggaaaatttcagaatttccgcccgccggcacaggtatacccccaggcaaaccagcgcgtgaatgagcaggcagaccaagagaattccccaagtcataccgtcgcgccacccctttcggaaccgtccagcgcctggtagccgataccgcagcgcttcagccgctccagcaccacgccgatgttctcctggcccgtctgggtaagaatgacatacaggtccccgtccgcgccctgcccgacgacgtcgatgctgcgcagggccttgctgatccgtgcccccacctcatccagctgctcgggtgtgacggcaatatgcagcagcgaatactccgccaccgccttttcctccatctcctcccggacggccagcaccttgcggaacgcttccttcttcatgatgcgggtcccttcgatgaactgctctgtctccgtgtaagccatgaattcgatggcccgcagcagtgctgcctggatgaggccgcagagcactttgatcaggttctggtaatacatggccatctggtcgaagcgggtcttctgaatggtgataagcgccaccaggcggccattctggaaaatgggcgcggcatactcgggatagccgagcagcctctcgttgttgcaccacacttcgccttcctcaaaggacgggaccatcagcccatatttctccagatccacggatttcccggtggtatccgcaatggccttcgagcaaaccatcagccggccgaaccgcgcgttctgatcaaaggtatacaggcaaatgctctggttatccagaatatcctccatggcgatcagcgcctccttgaacacctcgtcgggcataacggtgttcaggcggcgtgtcacctcgaaaatccggccaaagctgtcgcggtagctcataatctggttcttgtactggctcttgttctccagcgtgcggatatacagctcgttaaggaaaacataccgctgctccagatccgctttctcctcctggacaaaacgcagatcgttgcgcatacgatcccgggtatacccagcgaccgcgcccatgatgacgaagcaggcaaaggggatccagttgtccacgttgtaggcgatgatccgccagtccatgccgttggccatatagcttaagaaacaggacagacacgccagcgcggaagcggccagccccgtgcgcaggccgtgaagggtggccagcagcatgacaaacagcagccgaaaatccacgtactggaactgaacggaggttttcgtaacggccagcagcagctccataagcccatatcccagcagcagctccaccgtccggataatgatagggtgcgcggacaaatagccttttatcctctcccccgccgatcgcttcgggagctgagtggcggcctgaaaggcggcaatcagccgttccagttcatccgttaccgcccgtgtcggaatccagtcgtaatcccgccgaggaatatccgaagccaccggctccgcgatcggcgccagatgctcggcgtaagaaacgcgcagggtcgggaagcgttcgataaacgccgcgcccaactctccaaacgtgaccgctttcgcgccgggaacatggatcaccggatgctcttccggccagctgtccagcatacgcatcagcaattcggccaaatcctcctgcgaaaggaaatcgcacagctggttggccccgcctttgaaacgcacggctgcgtgccgcaccgcctgggcgatgagtccgcccaccatggacgcgctttccccgtagccgaacgtcacgggagtgcggaggataagaatctcgatggcgtgccgcatccgataaaacgcgcacagctcctcgcaggatgtcagcgccacccccgcgcttgtaatgggcgccgggcgggtttcctcgttcacgccgtcgagccctgcgaacaccgaggtggaagaaaaaaacacgacccgcctcacgtcgtgggccgcgcacaggcgcagcacctgctcgagctcccgcagatcgtcggcgcacgccccatcctcctccggacggcgtgcgaaatacatcaccgtatcaaagctgtaggaatgaaagagcttttcgaaccgatcttcatgcagcccataggaaaagggatccacccctcgccccagatcgacggatggaatctgtttggccgccaccaccagcttgtgctcctccgtcagccgccggcaaaagggagccgacaaggccgccacccatccggtcagcaataactccatatgaacgccccctctttggcagtactactcaggtcgcttccgccgccacggcgggcttccggacgttctccgcccgataaatcgcttcgatctcctcccggctgccctcgaaaagctggacgatttccggatcgaaaaaatccccggcatgatcgagaatatacaaaaagccatcttcaaagctccaggcttttttgtaggtccgttccgtggtcagagcgtcgaacacgtcggccacggccgtcatccgcgcatagcgatcgatttccctcccgtgtaaaccgaggtagccggagccgtcgaagcgttcgtgatgctctctggcgatattggccgccagctggaaaaatggctcctggctgccgcataatatatgatagccatacagcacatggcactggatttgctcgaattccaccgccgtcagcttttcttctttgaaaagcacgtcgggggggatgacgattttgccaatgtcgtgcagcagggcggcgttcgccacatagtcggcttcctccgcagacatgccggcggtgcggcacattacccggacatattccgccacgtgaaccgtatggtggttttccgtatcacatttgatgctcatcagctttttcagcgattccagaacaaccgtatgcccctcctgatacccgaacgcgaaatccaccggcgccgaatgggttgcctccggcggcagagaagcggcggcgccggccttcatcagccggagcccctcgatgatgcccgcagcggaaaccaacacgacgccgaaaaataccggcgcgcgcagattgacggcgattcctatcaggctgtccatccagaaagcggtttcgacaaaaaacagggccgccgtcaggacgaatcccacggaggaatcgggcttccggccgattctcaaaaagctcagaagcgccacagcacccgccgccagatgccagaagccgtagtatttcgctaccaaaagggtcagcggctcatagggcgaaagagcaagcagcagccctagcagcaggctgccgcccagcatgacctcctgggcgcggttccaggtctgccggctggataagagaaaaacggtcgccgccgacagcagcaccaggctcagcatatggatccggtagaacaggggagcatggaaagccggcagggtcggtaccgactgattgaaaaagcaggcggcggcgctgaaaagcgccagcgcgccggcggccagcagctgccgccgccacggcctccgggcattcagcccccccataatcaacagcaccacgcccataaccgcgaacgcgatgacaaacgaggtgctggtatagatgctgacgccgtcgatattggacagctgatccataggaatcagacaggcggaaaactccaggcggtaggggcagaacacggtcgccgtcagccgacttttcgacgaggaggccggcagggtcaccgcgctgacacggttacccacaaagctgccggatgaacctagcgtgtccagaacggtctgcccatccaccgcaacccgcagcggggcgtttcccgtggtgatcatcaggcgccgccccgcatccgccgcgggaatttcccggctcagaaacagatagtctccctggccgaaccggcgaatcgggctgtcctttcccgccgagagggtctccctgccgctcgtcgcggaatccgcctgctccgcccatgtatagtcccagtcggccagcatgtgaccaccgctggacagatcggcaaccggccggctcagaccgctccagagaagcagagcccccagcgcggcggcggacgccagaaccagccagcggacgccgcgcgtccatatgttcacggattttgagcggctgtccatcctccgttccccccctgccgagctgtcttttcctacctgtccgcctcttcatcaatcggctttgccaaacacatcccgcgcttttacgcgggtatccaccacgagaggggcgatgagcggcgcggtaggctttttaacagccgttgacgccggaaccaccggcgtgtccgcgcgctcctccggcgcggccggctccttttcacgccgctcctccctgaaagagcgcagcgcatttaggagaagcggcggcagcgccgcgttctcttccggctcctcctccggctcttccgccgggcggaattcctccgggatttgctcccgttcttcctgcaatgtagccgtgaaaagcgcgttcattttctcggtcagatcctcgcagatagcggacacctccgggagcgcgccggccatctgctgcccctgtccggcaaagtcctccagattctccagcatcgcctcataggattccaccagttggcgggtcgtttcctctttaacgaccgccatctgctctaaagaggcgcgcagatgcccgtccgcctcggtaaggaccgcggcgtattcctgaatccgctcctgcatctcctcaatgagctccgcgcggattttctccacgttttcataggcccgggcgtaaatcggccccacgttgatgccgtaaggcgcggattccttttcccgctccaatgcgccgattttgccgtgcagcttctgcgcttcttcctgtagtctggccgcccgcgcggtcagctccgcgttggccgcccgcagctcctccagctctcggcgcatgtcctcgggaacggccgccgccggggccggcgtctccatctcggattttgccgccagttccatattcagcttggttagcttggaactgagaatgctgttttgactgcgcagcgagtcgataacctcgtcagcctcccgcacatcgtaaccccaaaacgtttttttcatagagccaaacctcctgtcggaatctatcaagggtcaaaaaaatggctgcattatttttcaaataatgcagccagacgatcatggcagggtttcccgctttagattcttaagctttgcgtctccagctttcgctagatttgcctatatttgattggtaagaacgaaatctattcaaatgataccgtttttccgccgccttgtcaaggaatatttttatagttggcctggtgtcatgttctgtatacgagttacaaaatttattgcacggaatcaatgcttccattttctacaaagtatgatataattgtgtaaaataatcaagggggatttgctaatgagtatggaaagtttaacaagtttgtccattcgaaatataattgataaagtaaatacaggcgcaatcagaataccttcttttcaaagagggtttgtttgggaaccagaagctgtcgcttttttatggacagcttatataaaaaatatccgatcggtgcggtattgctttggcggacaaaagagaggcttcatagtgagagacaacttggtagatttattttaccggagccagtaaaggattatccaatcgattatgttttggatggacagcaaagattgacctctgtattttcggtatttcagtcggggttattaccccaatccgactctagttggatggacatctattacataatagggacaaatgaatcgccacaacaaagctgttttgttccgctcgagatagaagatgttgatcctagaaaacatttccctctatgttctctttttgatcccgtccaatatcgccgatccacaaaagacctggatgatgatgtaataattgaacttgataggttgcaggcttgttttcaggaaattgctataccagttcaacttatggaaaccgatgataaagctcatgtagcaatcgtgtttgaacgtatcaatcgcgccggtgtccccttagattcatttcaattgctaacggcttggagttggagtactgaattcgatctacaagacaaattagatgaattatcggcggaattatctgaatatggttttgaggggttggctgaaaatcaagaccttttaatgaaatgttttactggatatatcttagggaatacatcgcctggagcgataatggatttagacggcaagatgatccgcgataatttcgagagtataaagaatggcttaaaatcagcagtggattttttaagaaaagagttgcatttatattctttaaattgtttgccatatccggccatgctggtatctttagttcgtttctttggctcagaaaagacaaacggatgctcatatacagataaacagagaagacaattagtacgctggttttggagaagctgctttgcaagacgttattctagtggcgtaaacagcgctcatgaaacagaccttaattccatggaacgacttagagataacgaaaactttgatataagcagttttaaatgcgatattccgaccggattttttaccgataacgtttttaatatcaattccgtcaactcacggacttttattgcaatgttggccaataacaaccccaaatcctttatttcaggagccagtgtcgacttatcgcaaacgttgaaaattgctagttcaaaagaatttcatcatatttttccggataaatacctgcagaaactttcactggaacgtaaggatatttatcagctggcaaatttttgttttttaaataatgcagataaccagaaaataaaagaccgttctccatcagagtataaacagtttctcaatcccgattctataccggatgttcttaaatctgcaatttgtccctcggacacttttgaactggattacggagaatttatactgaaacggaaagccatgttgatggattttgcaaatagactcattaactacggaaacgacttttgagtcttttggttgacgactgctcaaacagcatcgccgaaagctgaccaactccacagataaagaaagcgcccgggaaccgtatgcctatacggcttccgggcatttttctagccgtcgcccagggctctgaacctcgcaggttcgagtctcggactcgtcaagcataaaaatagccttggtaattttgagaagcgactcgaactatcacacttttgaaaaccgttttttcaaaactacataatggttccgatttgacttgtctccaccattgtcaggaaataggcaaaacggcaggctatcggtcgtgcggtgcttaattacacacgcacagcatttcccgtgattggggcaagtctgctttggacagctacactctttcacatttttacaaggcattgggttacctcgcttttttcagaatggcaatcacctcatccggcttcagtaccttgccaaaagaaaccactttaccgtccaccacaagggctggagttgtcatcacgccgtatgccgcaatttgcgtaaagtcggtgatatgatcgattgtcgtgtctaggccgagctgcttgagcgccttcagtgtgtttgcttccaactgattgcacttggcacagccggagccgagaattttcacgcttgcgcctcccgccttgcatacctccgctgctttcatagactccgcattgcagctccctccacagcagcatttcttttcttctttctttttactgaataaacccattgtgttttcctcctaaataaatacataatggaatgcgttaaacagatagcctacaacgataatgccgactgtacagataccaataaacagagcgagcagttttggtttcacagcttttcgcagcatgataagggatggcagcgacagcgttgtgacagccatcataaagctaagaattgtgccaagctgcgcacctttcgaaagcagagcctcagccacggggatcgtcccaaaaatgtccgcatacatgggaacaccgataaccgttgccaaaatcacgccgaacgggttgtcgctgccgagtaccgcttcaatccagtgttcgggaatccagttatgaatgaccgcgccgattcccacgcccacaaggatatacggaaatacctttttaaaagtggacagcatttgatcctttgcgtaaaccagtcgctctttttgcgacagcgtcggagattcgacatcgaccgcacttgcacttttgataaaggattccacatacttttccatgtgcagcttctcaatcagtgtaccgcccgcgacggcaatcattaaaccgaccaccacataggcgacggcgattttccatccgaaaatgctggaaagcagaagcaggcttcccaggtcaaccatcggggaggagatcaagaaggaaaaggtcacaccgagaggaagtcctgcgctggtaaagccgataaataatggaatagaagaacaagagcaaaagggcgtgaccgttcctagcaatgcagcgatgatattcgcccatatcccatgaaaccgtcctaaaatcttcttgctgcgctccggcggaaaatagctctggatatagctgatgaagagaatcaggaagcagagcagcaccgtgattttgattacatcatagagaaaaaattgaatgctgcctccgattcgtccggtaatatccagtcctaaagcggacagtcccataccaatcagcttattcagccatttcataccgagaagctgattttgaataaagtcccaaactatcgacatgcgcagtcaccaccctcgcagcagttcagcgtccctatgaacgccttgaatgccgacagcgtttcgcaatttagagaatagtgcgaccatttcccctccttgcgggtttctactaagccgcactcgcaaaggattttcatgtggtgagataatgtcggctgggtaatctcaaaggcttccagcagcttgcaaccgcatttttcaccatctgacaacatttttacaattttcaatctgttagaatctccaagcgccttacagatcaaggcaatatccatttctttcatctcaagcacctcgcattgattatcatctatgtaatcattatatgctatacatagataaatgtcaatgtgtttctgcttcatcttattggtattcggtttctgctcattttcaaacggtacaaagggattcggatttagcaaaaacacctattgatatccaaaccacaatggttcaaatttcaataggtgtttcatttttgggacgagatgcttaatcgtaaatttcccgtggtaaatattctatggctgtgagttggccatctttataaaaagcaccatataaccgaattttaagatgtttcagagcccaatttttgttgatccgtcttatacatctttctgcctctgaccttggcagagcgataccataaatatggttgttctttctagaatcaacttctatgcgtaaaataatttgagataacgcccagcgaaaatttgtattacaggaagaacgcattttgctcccatcggcctttaaatttcccttcgcttcaatgaaataccaattgccattcttcttctggttttccaatttaagtactaggtcaacaccgcgttcctttttttctgcatccgctttatggataattcgtttatgagaagtacgccctttttgccttagaaaattttccaccccttgaatcacttcattttctgtcaacaggtctctatgttgcatgacgcccctcctttttagatgcctttttgaaaggcaaaaactgtacgtacaaagtttttattaagtaaaaagaaaaatcgacaaggttcaaaagaaacttgtcgatttgtcaacaggtgacgaaaaagatgccaaactcaaattctcagtaggacttgaacctgcaaaaaaattgtattgacagtgagcagtcgtaagggtttttacaatcgaacagctaaaccgagcgaggctttttgcggagaggaggagcgacggcttgaaagggaagtcgtcgcaaacgatcatagtccgcgacaacgtggtgcgaatgacgatatgggatttcattgaaacctcagtaatatcaacgatttgcgagcaatcagcaagcagtatttacgcctacaaaaggaatttcttgccaccatattaatgtatataatcaaaactcaagtggtataaattcctgtaaacctgtcgatagccaaattgattttaatgcgggaacggaaatccaactgcaacatccccataagggtttctcgaataactctgccatggtgcggagcctctacaaagtcaatatcatccaattcaattggcgaatgcaaatcttcagatgggcgtaacggattttttccagtaaacaactctgttagcacaagtccaagctgaaatacgtctgactccaaacgcagattatctgtgcggttagcgtaatttactagctctggtgtacgataataccgtgccattgcagcgtaacctgagaaattacttatcaccgtcgaattgacaagttcaatgtcatcgtcaatagtagcacgatcttcaacctcgatttttttaataaggccaaagtcacctaacaccgcattatcattacttatgaaaatattgttgggcttaatatctctatgaattatattctgcgactgtaagagtgcaacagcacttagcaattggcatgagtacttgatttttgattcaaacgacagaggttgacccaaaagtttgttttttaatgtttctggcataaaattagtgaccataaacggaaaactctcctgcgccgtaacaaacgtacctaaatcatattggcttagtattgcaggatgattacatgaccttaagaaagcaacttcccgcaaaaagcgcagccgtcgtatttctgtagagagattatactgcaacttaattacaaactctattccacgattatatccagaagtgcatatacatctatatgcaaatgcatttgcaccacttccaagaaactggagaatcttataatattggccactatctgctcgtatgctttgaccgacttgaatatatatatctgccatatgatcacttccacttttctcatagctgtttcatgtaaaatattgtaactgaagaagtacataatgtgttttttatgctgtgaaaaaattgatgattgacaaaagacaataatttgacacttccaactaagaaccagcctatataattacagcatacaaccagattaagtgcagtacaagaggcgatcttactttaaaagaaaaaattacaaaacatctgggaattataagtgtatttatatcgtatttcatgaaaaacgagaacagatttatcaaatacgataaatctgattgtgttgtattgataaaaagatacactttgtaactattgtgctacaatggtttgtgtaattctcggctttcttccttaaaattagtgctttttggtctggcggtgacagtggtgatgaatgccctgttagcgttttgcggcttccccccctggctgatggtggcttggttttcttgttatttaagaatactgtcatcgtttcctcacatggcaggcccctgattcacttccgcagattcttcagtgaaagtctgagtatcttcatcatctaaagccgccagttcttgttcccctgcaagaaagcggtcatagtcgctttcatacaattgatcctggataatccggtatcgttcaaattcgctctccgcatgagcctttgcaatttcagcggtaatcgttccggcatctgttagtatttcccggtcatctgccatcaggaaaatgtccagccgcttggcccaatcctccattgtcatggggatatggcgccgcgcccgatcttctgctaagtcaaggtatgcggacacaatgcgttccagcgagtataactcatcctctgtcagatagtttttggcgatggacacatcgcttttcataatctttccgagaggcgcttctttccaggatgtcagccccatgtgcggctgctccgcatcggcccggtaatatatcacctcagcagcagtttgcccgtgaaccgcaaaatgcattttgttctgaaccttggcaaaaaactctttggttgtttttgctgtcctgtcgtagtcaagggccgtcgcgtagatatccgtaatcttttgataaaactttcgctcagacagccggatctcccggattttttccaactgttcctcaaagtatttctctgtcaggacagtgccgccattcttcagccgctcctcgtccatgacccagcccttaatcgtataactcttaacgatagcgttggcccatttgcgaaactggacagcacgttcattgttcaccttgaagcccactgcgataatcatctgtaaatcataatgctttatctcacggctaatctgacggccgccctccgattgaactatccgaaattttcggatagttgcctgttcttctaactcggaatcctcgaacaccttgccgatgtggtaattgatagttcgcacgtcaacattgtacagttctgccatcatcttttgagtaagccagatgttctcgtcctcgtagcgcatttcgatactctctgcgctgtcgcctgtggacgctacaaaggtaagatactcagccgcactggaacggatgcctatctcatttttctgtttttccatgaacgtcctcctactgcctgttcatcagagcagatgccgcacaccccaggctggcttcctttttcttagtatagcacgcttcgtctgcaaagtcgagtgtaagcatattcacaaagggattgcttctatgcccaacaagccatccccggcaatgttctaaaactgccggggatggctgcgtatgccgttactctgaataaaactcggccatatcgtcgagccgcagacaagcgagtcggcaggccgcatggtttttgcctgcgccgcagtcgatcccgattttgtcaccgccgtgccatattctcagtggtatatcttcctgataataggctgtcggcgtatgtccgaagatgacggttttgccatccggcatcttgtcctctggtcggagccttgtccatacggcgaatttcctttcgttttccgcatcggacggtatttgcccgtaaagctccggcggcgcgccgtgtaccagaaggtaggttcgcccatttacggccacttctgcggccagcggcatctgcctgatatattccagtatggccgcctgttcaccggcttccagtgcgtaatagtctatgtgcgtaatcttgccgccgttttcataccataggcgaaggttcccgcgcaaaccgctcttttcctgcagcgcgttccacatcatctgctcatggtttccgagcagtaccgttgcgttgggcatgtccatgagttcctgcagaatccggatgccgaaatgcccccggtctatcacatcgccgaggacgtataagctgtccccgacagtaagcccgatctgttccataaccattcggaagcggctcaggcttccgtgtatatcgctcatgacgtaaaccatggtttttctctcccttcattacagattcgcatcaatccttgtgccatccttgaagtagatgtacagccgatcggcggacatcaccttgatacactcgatgagctgccgtatcgccaggtcgctgtattccaccgggtggttcttcagcccttctatgaccgccgtcatttcttcaagcgaaccggcagcggtttccagtttggatttggctttctcggcctcagctaactcatccttgatgatgtacatctcggcatacaggctctcgaactgtgcgtcaaaatcgccgttctgcgccgcctcgctgtccatatcggtcagttggtcgatatgcgcctgaatcgccctcaaccgctcctgcttggcgagaatactgcttacatcctgcctgctttggtacagctcgatatgccgccggatttggtcgataccgtcgttttccatctgcgccttttgggtgatggcctcggtgatggcgttttgcagcacggattcctcgatagacggcgagtctttgcaatatttcgtgccgtaatccaggcggctaatgcaccgccataccacctttttcttcccgttctttgaccaagtgcagcggcggtacggcgtcccgcagttcccgcagtagaggatttcggagagcgcataccggctggaatatttgccaagatcggttttggttccggtctgcttcaccttccgtttgctgttgcgccgggcgacttcctcctgtacccggtcgaacaccgccctctcgatgatggcgggatggttgttctctacgtagtacatgggcagctcgccgttgttcttcttcactcttttactgatgcagtcggcaatataggtcttttgcagcagggcgtcccccttgtatttctcgttggtcaggatggaaaggacacgctccgacgaccaccggggcttcccccgtgccgtagggattccgtccgccgtcagcccattggctatatccttgaggcttttccccgctagatattcggcgaagatccggcggacgacaaccgactgttcttcgtcgatttcgggcttgccgtccgcccccttgcagtagccgaggaaggaaccgtagctgaacggtacgttgccgtttttcaggctctgccgtttgcccatccggacgtttgcgctgatggactcgctttctgcctgggacagcccgctgaataaggtgatcagcaactcactggacacctggagggtgttgatgccttccttttcaaagaggatggggatccccatttccttgagttcccgcacatacagcaggcagtccagattgttgcgggagaagcgggacaccgatttggtgatgatgaggtcgattttccctttccggcaatcttcgatcatccgcataaagtcggggcgctttttggcaatagtcccggtgatgccctcgtcggcgtagatacccgccatctgccaggtgggcttcatcataatcagatcggtgtacatttctttctgggtttcaaagctgtgttcctgctgctccttgtcggtggatacccggcagtaggccgccacccgcctggggcggatatcgatccggttctcaccggaaaattccggcttcggcgggataaccctcaccgtcttgggcatggcttgtgctgccattc

SEQ ID NO: 2314 - DNA, 2358 bp, Unknown
  16S sequences of unknown bacteria
ttctcggcgtgatactcggctttgcggtgagcgccattccggtgcggctcctcaagggttttgagcagcgcgttttgagccgggggagccatgcttcccgttattatcatgacctttcggctgctctcgacgggcatgacggaggcctcttttctcagccgtcttatgtcgtccaccgagagaacgcccttgtctcccccgttttcgagcaatatatcgggatgacccgtcacggcctttttgcaggaggaacaaaccccgcagggccgcttttccctcgatttgcagagtatggcggcggcaaggcttttggcaagagtctttttcccgctgcctctttgaccctctataaggacggcaccggggacgttttcctcctccgacattctctcaagcgaggaaacaagctcctccctgccgacaaaatcgccgaaagcggttatcataatttatggaagctctccacgtcgagcacgaaaacggtggcccctccgacggttatttcaagaggcatggccatggtgttgaccgttccgtagggagaggggtcctgaattatctgagtgcgcttgcgggcattgtttccgattatctgaatggcgtcgtcgacctgttcgtcctcaacaccgattatgaaggtcgtgtttccggccttgagatagccgccggtggtggcaagctttgtggccgagattttggcctttgtgagggcgcccgaaacggtggcggcgtcgtcgtcgttaacgattgcaagtatgagtttcatattattcctccgtatcttatgcaaatttaatactacttctctgtttacttattataatacaaaaccgccgcttaatcaatagtttttacatccgtttttttgtcggttttcggcggcggagcaattactttcgaaagcgcattgttttcttgacaaaagtgcgcattgcaattataatagagtgtatctatgcaatcatataaaaggagtgggcttatgaaatcctaccgcaaggagctgacattcaacattccctcgagacggggatttaaaaacatcacgggcgaatgcgaaaaggcgctttcggaaagcggcataaaggaaggacttctcctttgcaatgccatgcacattaccgcaagcgtttttatcaacgacgacgagccggggcttcatgccgatttcgagcggtggcttgaacagctcgcccccgaaaagccttatgagagatatgctcacaacggatatgaggacaacggcgacgcacacataaagcgcacccttatgggacgcgaggtcgtggtggccgtcaccggcggcaggctcgatttcggcccgtgggaacagattttctacggagaattcgacggaatgagaaacaagcgcgtgcttattaaaataatcggcgaataaggagacagcatcatgaacatcgaagcatataatttaataatcgacaaaataaagcccctgctcgacggcagaggtttcaagacggtggacaccgaaaccggaagctatttcgaaaacggcgaaattgccgtccgcgtgattttcaaggagaaggaaaagctgttctgccttgaaaaatgcgagctttcggacgacaaaaagccctccgactggagccttataagtgaatggcttttcgaggacggaacaaaagcctcctatgcctcctccatcggcggagatttcgaggacacccttcgcgaggccctcggaataaagcccacggcaaaccgtcaggccgctttgccttccaaggcaaagaaaaacgatcagcccaccgtcaaatccctcaccggcagctttctcacggtgttcccccagtataagaacgaatatcccaaatatgtaaccgaggacggcgctttcctctatgcggaattttacgagaccgtcggcgctccgctgcttaaagagctgctgcgcgccaacgacaaaaagcgcctgcagaaatatttcgatatgctcgacgaggcctaccgcctcggagaccttgaagtccgctcggtggtgagcacctgcgtgctggcacaggctctgaagggcgaaaaagagctgaccgaatcggctctcggctatcttaaggacaaaaattatcttgctttggcccttaaaaactccttggcaatcaaaaaataatcaaagggtgtttaatacggataaaaaatcaatgcccatcggcatttttgactcgggactgggcgggcttaccgttgcggctgaggtcagaaagcttttgccgaaggaagacattatatatttcggcgacaccggccgtgttccctacggcaaccgcgggcgggatgtcattcgccgctatgcgggggaggacgcggattttctcctttcgaaaggcgtcaagc

SEQ ID NO: 2315 - DNA, 32759 bp, Unknown
  16S sequences of unknown bacteria
taatttcggttttcaccgttttccgttatcgggtacggatcgccgagccgataacggaagaaaaaacattatcgtttaattatacaacgaatttttattgaaagcaagacatcagacaaaataaatgatatacggacagcaaaaaatgcgtgattttttctttttacaccgctttcggaacaaaaatcgccccgccggaaaaatttttcaccgctttttttctcatattttgtcaatatttcacctttacttcacagaaacttcactttgatgggatattattgttatcaagattagaaaaaagagtttacattgaaaaaaaagtatgctataataagaataatctttggatcaaatcagatccgcattatgtcggagaaaggacgatgaagatgggaacgaaaattcttgttgttgatgatgacgcaaatatatgtgaccttttgaggctttatttcgaaaacgaaggttatgaggtcaaaaccgcaaacgacggtgccgacggaataagctttttcaaaatgtatgagcccgatcttgttctcctcgacataatgctcccgaaaaaggacgggtggcaggtttgccgcgagataagagagatcagctcaaagccgatcatcatgataacggcgaaaggcgacgtattcgacaaggtgctcggtctcgagctcggcgccgacgacttcgtggtcaagccgtttgacatgaaggagatttccgcccgcgtcaaggcagtgctccgcagatacaccgctcacgaggatcagagcgacgacggagtgataaagttcgacaatatcgagatcagtctcccgaaatacgagctcaagctcaaaggaaagccggtcgagatacctccgaaggagcttcagcttctctatttcctcgcgtcgaatttcaaccgtgtatttacccgcgatcagctcctcgacaaggtttggggattcgattatctcggagattcacgaacggtcgacgtacatatcaagagacttcgtgaaaagcttgagggcgtatcggacaaatggacgctgaaaaccgtatggggtgtcgggtacaagttcgagcttcttcagtaacttccgtaaaataaagtaatcaatgcacctcccgtcagagcggaaatccgttttgacgggaggttgatcggtttttaaccttaattccgttccggaatcaatcttaccgcgcggggcttctccgcagcacgaggtgaacatatgccgcattcaaaaaacagaatgttccgaagcgtattcataaagtatatgtctgcgtttatgctgataaatcttgtatgcttcggtctgctttctctgataatcacttcccttatacgctcctacgggaccgaaaatcagatgcgctttctcgacagctcggcgacatcgctcgaaagatttctcgcaacggagtattcttccgtaaacagcgtaaacaagatcagtttttcggaatatcttctggaatcgggaaatgagatcagccccgccatcgatcttgtttccgaaagcgtaaccgacatacttgtattcatcaccgacacaagcggtgagatatacgcatcgagaggcggcggaaacatttttctcgaaacgcaggtagaggtcaacgacgacggaaagtacgtcgttccgtctaatataatcggaaaagtcatgtccgagggaaagtattcggacaccagcgacctcgaaggctttctgaacgaaaagaatcttgtatcggctaagcggattaagcttccctccggtacggtcatcggtacagtattcctgtgcaccgaggacaccggagtagatgttcttcttgatgccacgataaagacgataatcatgtcatgtctgtggatcatgcttgcttcgctcattgcgacctacttcatatccgaaagacttgtttcgccgatcaaggatatgagccgcgccgcgcgcagttttgccgacggcaaattcgatgtgcgcgtgaccgtcacgggaagcgacgaaatatccgaacttgcaaccgcgttcaataacatggcgtcaagtctccaggagcttgaagacatgaggcgttccttccttgccaatgtctctcacgacctccggacacctatgacgacgatctccggatttatcgacggtatactcgacggagcaattccgccggacaaatacgattactatctcggcgttatcgccacagaggtgcgccgtctgtcaaggcttgtatccactctgctcgacatcaccaagcttcaggcgggcgaaagaaaattcaagatggaagccttcgatatctgcgaaatggcaaggcttatacttatttcgttcgagcagaagatagacgaaaagaagctcagcgtcgatttcaactgcgattccgaaagaatgtttgtatgcgccgaccgcgacgcgatatatcaggtactgtacaacatctgcgacaacggtataaagtttgcctttgaaggcgggaaatacgagatcggcatcaccgagcagaataagaagaccgttatctccgtgttcaacgagggcgaaggcattccgaccgaagatcagaaatacatattcgaccgcttcttcaagagcgaccgcagccgcggactgaacaagacgggtgtgggtctcggaatgtacatcgcaagaacgataatcgaggcgcacggagaaaagatatggcttgaaagcgagcctggcaaatactgcagattcacatttaccctgccttccgcgatagacgcggagcaggtcgaaaaaaacacaagtcggcgcgaaaaataagcttatgccgccggaatcggagaattaatgaaatataccgcaacctgccttttcgggcttgaggggcttctcggacgcgagatcgacgccctcggatacaaaagatgcgagacaatcgacggaagagttacctttgagggggatgaaagcgccgctccgagggcaaatataaatctgaggtttgccgagcgcgtttacatcaatatgggcacattcccctgcacgaccttcgatgcactttttgaaggcgcacgttcgcttccgtgggaggagtttatctcaaaagacgacgctttccccgtaagcggacactgcataaaaagcaagctgttttccgtgcccgactgtcagaagatcgtcaaaaaagcggtcgcacggcggctcggcggaaagtacgggcttgaaaagctgcccgagacgcaaaccgtgtacaaaattgaattcttcattttcaaggattcggcatcgttgatgattgacacctccggcacggcgcttcacaagcgcggataccgtccggagacggtttcggcgcctctgcgcgaaactcttgccgctgctcttgcatcattggcgcgtccgagagagaatgtgctcttctgcgatccgttctgcggctcgggaacgattgcgatagaggcggcgatgataatgaaaaatattgcccccggaataaaccgctcctttgcagcagagctcttccccgctttttccgaaaagctttggcgcgaggcgagagaagaggcgcgtgcaaatgaagtatccacgaattttcgcgcatccgccggggacatcgatccggaatgcgtgcgcattgcggaagaagccgcacgacgcgcgggtgtagccgatacggtttcggtgcgctgtaccgacgctctcaagcttacatccgacggtgtacggggaacggtcgtgacaaatccgccgtacggtgagcgtctcatgacaccggaggcggtccgcggactttacgccgatatgggaaaatgcttccgctctcttgagccgtggcagatatacgttctcactcccgccgaggattttgaacgtctctacggacggcgcgccgacaaaatacgcaagctctataacggaatgattccgtgtctgttttatcagtttttcaagcctcagtcaaaggctcaccgataaagtcccgccgcgcggacgatgcggatcgcggttgaaatcgcgtatgccgctccaaaatcaaaaacggagaaaattaaatgcagaacaacaaattcaccgaattcttaaagaaggttgccggggcggtatacaagccgaatccgcgcctgaccgacaggatcaagccgatgtggctcaggacggctctttatatcatcggatacattacggcgcttgtttatccttttctttgctggtgcctgtcggaaatgatcgtgttccggagcaaggcaagaccgttcatgctgataaaggaagggctgcccaaggtaacgtttgcgcttaccgcaatttatcttgctttctttattctctggcttctcttccgccgcgcgtggatcgcgaataccgtaatattcgccgttcttacgtcgttttcgatcaccgctttcatcaagtacggtgcaacgggcgaatacttctatccgtgggatcttcagcagacaaaaaatctcgggcttcttactgattatgtcagtctgaagctgccgctgatatattatgccgcgattgccgcaatgatcgtgcttatagtcctgatattcttcaccaagccggcaattcccgcaaaatggtacatccgtattcccgcggcggcgctctgcgtgacgctgaccgtattcagcttcaattcttcggaaaagctcagaaacgccgtcgaaagtcacggaatgtcattctttgatgctgcgcttccggagtcaaactatatggcaaacgggtttaccgcgggatttctgataaactgtttttcttccgtcatcgaagcgccggacggatattccgaaaaggcgataaacgatatactttcgggttatgaatcgactcccgcaaaggaggatttttcaagcccaaatataatcctcgttctcggcgaaagcttctgggatgtcaccaagcttgaaggagcggaatttctcaatgcagacggaacagaggagatagaccctatttcgaattaccacgcgctctgtgagcgtgatgacgtatacaccggttcgttcttcacgaccgcattcggcggaggcacggtaagacccgaatttgaagtgatgaccggacttacaaccgattaccttccttccggaagcattccgtggcagtacatcaattacgatttcgagacgtatgcttcatacatgaaggacttcggataccgaaacgtaatgcttcatccgtatctttcaaatttttatatgcgcgttgaaaaatatccccttctcggatttgacgaaacttactttgacgaggatctaaaaaagataagcgaggtcgagcgcatttccggaggcggcgaggtgtcggatatcacggtattcgattatgtcgaatatttcatgaaccgcagcgaggaacgggatttcatatttgcgataaccatggaaggacatcagccgtatccgcgccgcttcaaggaagatgaatttgatgtaagacttaagtgcgacgcgatggacgagcagacctttgagatcgcgcgtcagtacacgcagtgcgctttcgaagcagacgaagcgatagcgcaccttatcgacattgttgacagatgcgacgaggacactgtcgtcgtgtatttcggggatcacgccccgacgctcggtgcgaatttcgcaggctatatagcgtccggctttgcagcggatcagaaggacatgcttagccaagaaaaaaggctgcagacctatgcaacgccgttcttcgtatatgcgaatttcgaccttgacgaaaacaacggcatgctcactcccggaaacggcaacgagatcgcttcatacaacctcatgaatgcggttttccgtatgatcggcgcacccgtcaccgagcgtatgcagttcctttacgattactatcagacaattcctaactacaatatcaagctcaatcttccgctcaccgatgatatagaatattacaaaaatgcgcactggcttctgacctacgatctgctgtgcggaaaacgatactgcctcggaaaataaggaataaaaaagccatctcccggagatacttataaaaagtgtcttcgggaggtttattatggagattttcacggaaaagttaggggacgatttccgaaaaaactgcgaaatgatcgattctcttctgcgggtagacaagagctttgacattataaagcgcgagatgaagatcgcaggtgcaaactgcgtcatgtactacatcgacggatttgtcaaagccgagctcatgcagaagcttatggtatatctcatatccgtaaaagagatcggcgacggcggcaaggatgccgcatacacctttgcagccaaaagtgtacccaccgtagaagtcgatgtgaccgactcggcagacaatataatcctcatggttctttccggttgtacggcatttctcagtgagggattcggtcccaatgcgataatcatagattcgcggacatatcccacgcgcagcaccgaggagcccgaaggcgaccgcgtaatgagaggatcgcgcgacggctttgtcgagaccctcatattcaacaccgcgatgcttcgccgcagaataagagatacgtccttcacggtcgaatacctcaacatcggaaagcgctctcgcacggatatcgcaatatgctatatggacgggatcgccgatgcggaatatgtttcaaagcttcgggcaaatcttgagagcattgacgccgacagcataatcctcggtcaccagagcatagcagaatcactgatccgtacaagatggtacaatccgtttccgaagatacgctcaacggaacgtccggacgccgccgccgcgtcggtgcttgagggctcggtcgtcgtaatatgcgacaacacgcccgaggtcatgatcctgccgacatcgatcttcgattttctccaagagaccgacgattactacttccccccgttcaccggaagctacctccgcatactgaggcaattcgttttctttgccgccatgctcataactccgctgtggtatcttctcgtgtcaaatcccgaaatactgcacggaagatggcgctttcttattcccgccgatcccggagaagttcctctgatcgttcagcttttcctgatagaattcacgatagacgggctcaagcttgcctcgctcaacactccgagcatgctcagcaattcgttctccgttgtcggcggactgcttctcggggatttcgccgtaaaggcgggctggctctgccccgaggtgatcgtgtatatggctttcgtctcgatcgcaaactttgcccagccgagctatgagctcggatacgcattcaaatatatgaggatgctgcttttgtttgcgacgtggcttttcggcgtatggggattcttcggcggaatcgttctcggtctcatacttgtcgcgtcgaacaagacgataaacggagaacgaagctatctttacccgctcattccgttcaacgcttcggctctcggaaggctgtttcttcgtcggctcaagccgataggcacaaaggagagcgataaataaaaatcccccgccgcggcggtcagtccgatttacggaaagtccgtccgggcggggacatattttatttattttcttccggaggtctgactcccgcaagcgggtttttctccattgctttctccattccttcggagcttacatgggtatatatctgagttgtcgtgagctgctcatgaccgagaatgtccttcaggacgcggatatcgacctcgcccgtctgatacatcagcgtcgccgccgtgtggcgcagcttatgcacggaatagttgcgattccgcagtcccgcttcgccgagatgctttttcacaaggtactgcaccgttttcgtcgagatgcgcttaccgagcctcgagataaagagcgcatcctcggcggtattctgcctcaaaaggacatttcgcttcgggagatatgcctgtatcgcctcacggcaagcctcattcagatagatcaccctctgcttggcaccctttccgatcaccctgagtgaacgcatatcggaatcgatatccctgagtccgatacccgcaagctcggaaagacgcattccgcaattaagaaacagcacaagtatggcaaaatccctctcgcgatacggattttcgctttcgttcttcaccgcgtcgagaagagcaatgctttcctctgtcgtaaggtacttcggaagcgacggctttcttttcggagattcgatatttatcgcggggttctgatcgaatttatggcgtttgaccgttatgtatttataaaaggacttcaccgccgaaagcttgcgcgctctcgatgcgggagagttattccgcacattcgagagatagaagagatacgaatacacatcctccgttgacacggacgcgaaaaaatcgcttccgatgcgggatatgtcggttttatcgaggctttcctcatcggtcggaagagaatttttcaaggcatagatgtaacggctaaacattctgagatcgagaagatactcattcacggttttcggcgagcagttctgtattgaaagcttataccttgcaaatgaggcgatatcctcgggataagcgttaagatcgtatgcttcggacacggcaaggctcctttccttttatatttccattatacaacttttgtgataattttcgtggatagattgtaaacaattgaaaatgtgtattgaaaaaatcacgttcggaaaataaaatatatatatgacaatcttttgtgaggtttttgatggactatattaaagaaaatgcgtatatgataacaaagatgctgctcaaccagttcggagccgcatttctcgggctcgttctgtatcttgcgtcgtccaccggagacaacgcctttctgataatcgcggcatcggtattctcgattctgttttacgtttatctccaatactccgtcatgtgggatctcggagcgcgcgacataatccgtgtcaacgggaaacgcgcttcataccgccccgcaaacggatttataattgcgcttatcgcaaacataccgaacattcttatagccgttctcgttctcatcggtcacatcttcggctccgccgacggtgcgttcggctatgaatgggcaggcactctctacgtcgcgtcgaaatcagtgggggttatctgggaatccatgttcagcggattcgttcagctttattctccgcacaatccggtaatcttcttccttatgctcatcccaccgcttctcgcctcttccgtgggatacattttcggaatgaagaatttccgcattctttcgctcatcggaataaatccgaagccgaagaaaaaataacatatgagttttataaaacatggactccgcgccgacaggtacggagtccatgtttttgttcagccgatcaccttgtatccctgatcctccactgtctgacgcagcttatcgtcggagatcacgttttcgagagtaacgaccgcgcttcctttttcatggctcacctgagccgatttgacctcgggaagctcttcaagcgcctttttaactctcgcctcgcagtgtgcgcacatcatgccctcgatcttgattgttttttccatggtttgttcgttcctttcgttgttcttctgaattttgtttttcggatttcgtctttttccgtcatgctttgaattgtaaggacggaagaaattcagcctcaatgcgttgctgacgacgcaaaagcttgacaggctcatcgcggcagcaccgaacatcggattgagcttccagccgagcacgtttatgaaaactcccgcggcaagcggtataccgatcgtattgtataggaatgcccaaaaaagattttcttttatattgcggaaggtcgcgcggctgaggcgtatcgccgcggggacatcggaaagcttgctgttcacaagcactatatcggcggcgtccatggcaatatcggtgcccgctccgatcgcaatgccgatatcggcgcttgtaagtgcgggagcgtcgtttataccgtctccgaccattatcaccttgccggtgtttttcagaccgcggaccgttttctccttcacgtcgggaaggacattcgcaatcacctcatcgacgcccgcctgagcgcctatcgcctctgcggtacgtttattgtctccggtcagcataacgacccgcagccccatattgtgaagctgatccaccgcactgcagctgtcatcctttatgacatccgcaaccgcgatcatcccgaggcagcgccctccgcgcgaaaaatacatcggagtcttgccttctccagcaaggcgctcggcgcgcgctctcaaatcatcggaaaccgcggtgacggagtttatgaattcatagtttccgcctcggacttcttcagcgccgacagatgcagaaagcccttttccgggaatcgccgtaaagttgtccgtttccgaataagatatgccgtttttctccgcatatcttacgattgccgcggcaagcgggtgctcgctttttctttcgatggaatacgcagcatgaagcaacgcattctcatcaccgtcagccgttgttatatcagtgacggacggctcaccgcgtgtgacagttcccgttttatcgaaaacgaccgtattcgcctttccggtttcctcgagcgccgctgcggttttgaagagtattccgtttttggcagcaactccgtttcctaccatgaccgccaccggagtggcaagtccgagcgcgcacgggcagcttataacaagcaccgaaattcctcttgccagagcaaatccgacccccgcgcccgctataagccaagccgcaacggtcacggctgcgatcgaaatcacgacaggaacgaacacgccggaaacccgatctgcgatcttggcgatcggcgctttcgtcgatgacgcatcgctaaccattcggattatctgcgaaagcgcggtatcctcgccgaccttcaccgcctcgcattcaaggtatccggactgattcacggtagccgccgacaccttatctcccggagccttatcgacaggaatgctctcgcccgtaagtgaggattcgtcaaccgcgccgttgccgtttttcacaacaccgtcggcggggatgctttcaccgggacggacgataaatatatcgccctttactatgctgtcggcgggcacggtctcctctttgccgtcgcggatgaccacggcgcttttcggcgccaatgccatcagcccgcggagcgcatccgtcgtctttcccttcgaacgcgcctcaagcatctttccgaccgtgataagcgcaagaatcatcgccgcggattcgaaataaaatccgtgcatatactcggcaacggcagccgaatctccgtgaagctgcgctccggtcattgcaaaaagctcaaatgtgctgtatccgaaagccgcgctcgccccgagcgcaacgagcgtatccatattaggcgagcggtgaattatacctttgaatccgttcacgaaaaaatgctgatttatgaccatgaccgtgacggtcagaagaagctgcgcaagccccatcgccacatgatttccatcaaagaatcgcgggagcggccaattccacatcatgtgtcccatagagaagtacatgagcaccgcaaggaacgcaagagatgcgacaagtcttttcctgagagcgggcgtttcgcgatcctcgagagcatcggcgccgctgttcttcgatgaggtatcgccgccgacttccgatgcgccgtatcctgccttttcaacggcaccgatgacctccgccgcagaagcgcttccctcgacgctcatggaatgagtcagcagattgacggcgcaagctgtaacgtcaggaagcgacgataccgccttttcgacccgggcgctgcacgccgcacagctcattccggtaacgttataatgcttcataatattcacttcgctttctttaacgcatttatttcataagcttacggagaagctccgtaagctcgtccacgctttcttcccttcccgcgcggatatcgtccgcaacgcaggtctttatatgctcggaaaggagctctttgcagaaagcgttgagcgcggcattggcagccgcagcctgaacgaggatgtcgggacagtacgcgcttttttcaaccattcctctgatgccgcgtatctggccttcaatgcggttcaggcggtgtatcaggctcttatattccttttccgatcggagtttcgtcctctcggacatacagcagcaatcttttttcatgttatcccccgaatcaagttttccttatcaaggtcaaaattattatataccccatatgggtatatgtcaatataattttataagaaatccgcaataaattttttccggtgagtcgggcgtcggcaaagaccgcaaagtgcggctgcatacggactcagaaagcgcatgaaacgcggtcgatgcatatggtcggtctgtaaacggaagccaaacaaagccgaatccgaagcattagtccgcactgaagcggataacgaaaaacggccgccgattctttgagaatcggcggctgtcagactcagattcagatcatcttgcgctttccacggcggatatgaccgcgctgcgcacatcgctttcgcagatcaggagcagaagagcgtcatcgtatgttttcagaaccgcctcgtcgcagagagcgtatgcttcgggattatacatctcgaccgccgccttcaccgacgggatatacgtttcgtttatcgcattcttcacgctttccttctgtgcgtcgtccgtaccgtctttgaagacgaagtacgcaaatgtcgttgatgtgttcgaggtcagctccgaagcgacgtacgaatcgaacattccgatcatctcttccgtcattccgaacgtgaagatgagaagatcgtcggcatattcgtcgtcgctgtaaacgaacatcatatcccgaaagtttccgaacgcgctcgcggcattgactacgctgtgaagatccgtcggggtctttgcggcgggagcggtatccgcaggagcgcttgtatcggttgcgctctgctcgggtgccgcggtgctttcggaaacaactccgtcaccggactttccgcacgcggcgagaacaagcataagtacaagagaaagaacaagaatttttttcattgtaaattaccgactttcacaaaaatataaagactgtaagggccgatctcgcgctttacaaagcatccatcagtccgcgctgcggcatagccgccgcattgaaatccgttttccggattaaaaaatcgcatattaatcggagaacgcgcgccctttaataaggtcgagcaagcttctctcgacaacctcaataattatgacgtctgcgccggactccgttatctcagtgcgtgaaaaattcgtctgccagctgaacgtcgaagttgaaaagctctccttgaagaacggaacaagtgcgatcgcataggaatctctcatcatgtagagcgagggtgcgctcatgttttttgcggaggtgaatttggcaaatctcagatcgtcgcggtagccgtcgtcccatacattgcaaaacacatactgtccggtcgggttagtggctctttttgaagtcaggactgccgcaggaccgaatttcagagaataaacgggaccctcgtcacggtacttatcgtaatatccgagatagtacggcatatccttcatataagtttcgtagtagtttatgttaaaatcgttctttccgtaaacgaccgcattcggaaagtccgcctttacatgcttcattatctccgtatacgcgacaaatccgccgtttgcgttccaatgcgtatcatagttgtagtaaagatcgtcgccgtaaaccgagcgtgcgcttttgagaacatttcgcaggtcaatgatctttacagaagaattcgcattcatataatcgatcgcctgatcgagcgcggtgtagtccgccgggttcacataatcggaaaggtagtctccgtacaccgatgccttgttcggacatacgacaaaataaagtttctttccgttctgctgcgcccacgcataccgatcattcattgactttgcaagccgcttaagatagaagtcggtcagcatatcggagccgatataatcgggaatactctcgccgataaacataaaatcgttatcgccgatatatatattctgtttgccgagagggccgctccccgctctgagcgcgccgcttcccaccttcggtctgttatagtccgcattcggatcggtacgggcgcttccctttatgggatatgactttgcggggctgttgtctatcggctccccgggagcgggcgcgggggtggtcgtcgtagttgtcgactgtccgagggtgttcggctgagtggtctttcccgttgttgtcgagccggggcgttttgttgtcgttgaagacggtctctttgtcgtcaccgacgggcgtcttactgttgttatccccgttgattggtttccctttgtcgaaggagttttagtgctgtccgtgtttttaagctcattccgtgtggtcccgtctactccgtcgccgtcatccgggtccggttcttccccgtccggagttatctcttcctccgtcttaccgtcttctttactgtcgcggttatcttccgtctttcctccgtccgatttatccgaggaaaaatcggaaccgccgtccgtccggctgccggcatcggttgaattctccgcatcgctgtacgcggattcggactgcaaattctccgagccgtgatcgtcctcgctgcgcgcgcaggaaaacgcagccatcgccaagaccgcgacaaggaagatcatgataaccttttttttcattgtattctccgttccgccgtcccgctcggacggcaaaaaaattaacatattaaagacggtcaagtgcggggtattctatgatagcgctcttcccttcgcgagattgtcaagtgctttctcaactacctcaaatacgacgacatcggcaccggaatcgagtatttcgtcacatgaaaagtcgtacgtccaatcaaatgacgattcggaaaagctttctttaagaaaaggaacgagtgacaccgcatacgaatccctcatcatatacagggagggcgcgctttcgttcttcgatttgaatttcatatggataagattgtcgcggtatccgtcctcccattcttcgcagaatatatactgtccgtagtttccgtcgctttccttttccgtcagcaccgccgccggtccgaatttcagcgagtatacgggtccttcatcgtaatagctgtcataatatccgagatagtacggcatatccttcatatacgtttcgtaatatttcacgttgaagtcgttcttgcggtacagcatcgccgaagaaaaatcttcctgtatccgcttcatcatctttgtgtaggcgataaacgcgccgtttgaattccaatgggtatcgtaattatagtaaagctcgtcgccgtactcctcacgcgccgcggaaagctcttcgcgtacatctatcaccggaacttcggaattttcggacatatatgaaataaactgatcgagccgcgtggtctctgcgcgctcgagtccggagggaagataatcccagtaaaccgtcgccttatccgggcagacaagaatatagaatttctttccgttttcttccgcccactccctccgtttttcggcaagagaggcgattcttttaagagtatgctcgttaaacaggttggtgccttcgtaatccgggaaggtctcgcccatgaacatgaaatcgtttttacctatatatacgttatggcttgtaagcggtcccgcgccctctttgatcctgctttttgcaaccatgcggcggttgtactccgcgccgcttcgtgaaggaagatcgtttttcagaggatgagactccgccggctgtgcctttgtaaattccgcagacaccgttatttcgcagcttctttttgcgtgctttaccgttacggtatccgatatatttccgctgtccgccgcataagcagaaacggacagagcagcgggaatcagaaaagcgcaaaggacgagagctgctccgcctctgccttttttcgtctttacggtaattacggctgccgcggcaaaaagaaaaacaaaaaccgaagcgccgaggagtataaacggaaaataccgctgaacgaacgataccttttcgaaatcaaggacaaaatcgtgggatacggtctcgccgtcagtgagattgccgatgtcaacggacggagactgaatcacaacgccatccggaacagtgaccgtgatcttcacgctttcaaaggaatcctccgtattgttcacgacgctgaccgcaagctttccctgctcgccgctgccgaaagaatcatcgtatgtacaggtcaatgagggtgtgtctccgtctgcgaaaacgcaggtgaccgatgccaaagccatcaccgcggcaagcgcagcaaaaaatatcatttttcgcatatacaatcctcaaaacatcttcttttttgaacattatactacaagaaaaagagctttgcaataacattttatgaactatgtaaacaataatttaacgcacttgcgaaactttcccgaatgtgataaaattttagggagcggcgctcgcttccgcctgcgccgaaacaaagaaaaattttaaatgaaagccggtacaaaaaatgaaagccgttataaccgttgtcggcaaggacaccgtcggtattctcgctaaagtaagctcggcatgcgcagagcgcgaaattaacatcgttgatgtcacgcagtccgttcttcagaatctgtttgtcatggtaatgcttgcggacatctccggaatgacctgcgatttcggaaccttctccgacgatcttaaaagcatcggcgccgagctcggaatggacatccgcgtaatgcacgaggacatcttcaactccatgcaccgcatctgacgacggaaaggactttttataaatgataaaccttaacgatatcatggaaaccatcaccatgattcaggaggataacctcgacatacgaaccatcacaatgggagtttcactgctcgactgtgcggattcggacattaaccgcgcatgcaccaaagtctacgacaaaatcatgcgtctttgcggcaggctcgttcccgtcggcgaggagatcgaaaaaacatacggtatcccgataataaacaagagaatatcggtcactccgattgcgatgctcgcggcttccgcaaacggcgatccggtgatgttcgcaaaaacgctcgagaaggcggcgcgcgaaaccggggtcaacttcatcggcggcttttccgctctcgtccagaagggattttccgcgggagaccgtgagcttatcggcgccattccccaagcgcttgccgaaaccgaccatgtctgctcatcgatcaacatcggatcgacgaaggcgggaatcaacatggatgccgtccgtcttatgggacagacgatcgttaaaaacgcggagctcacgaaggaccgtgactgcatcggctgcgcaaagcttgttgtcttctgcaatgctcccgaggacaatccgttcatggcgggagccttccacggtccgggtgagccggactgcgttataaacgttggagtatccggtccgggcgcggtgcgttccgcaattgcaaaagcccccgatgcaaacctcaacgagatcgcggacataatcaagcggacggctttcaagatcacgcgaatgggtcagcttgtcggctcggaagcatcaaagcgcctcggcgtgccgttcggcattgtcgatctttcgcttgctcccactccggcggtcggcgattccgtcgcccacattctcgaggaaatgggacttgagtcctgcggaatccacggaaccaccgccgctcttgcgcttctcaacgacgcggtaaagaaaggcggcgtcatggcatcttcgaacgtcggcggtctctcgggcgcgtttattcccgtatcggaggacgcgggaatgatcgacgcggtacgctcgggtacgctctcggtagaaaagcttgaagctatgacctgcgtctgctccgtcgggcttgacatgatcgtcattcccggtgacacctctcccgaggtcatctccgcaataatcgccgatgaagcggcgatcggaatggtcaactgcaaaaccaccgcggtgcgcgttatccccgccatcggaaaggatgtcggagacgagctctgcttcggcggtcttctcggttcgggtcccgtaatgaagctcaacgacgaaaagaagccgaacaaattcattgaacgtgccggacgcattcccgctccgatgcacagcctgaaaaactgatgaaaaacaaaaactattctttcaaggtaaccgaggactgccgtcttcttgactttttgatcgatcacattcccgagtcccgcaatacggtaaagcatctcatgggcgccggattcgcggcggcggacggagtatccgccacgaaattcgatcacccgctccgcgcgggtcagacggtcaccgtatcgtcggaaaacgcggtccgctcatcaatgccgttcggcatactgtacgaggacagcgatataatcgtgataaacaaaagtgcggggcttctctgcgtcgggaacgaccgcgaaaaggaacgcacggcgtaccgctttctttcggattatatgagggcaaaaaacgacggcggcagagtgtacgtcattcaccgtctcgaccgcgacacttccggaatcgtaatgtttgcaaagagtgacgagctcagaaaagcttatcaggacaattgggaccgtctcgtgaaaaagcgccgctacgccgccgtatgcgaaggcgttccctctccggcggaggatactataacctcgtatctgcgcgagagcacctctcacatggtatacaccgccgagaagagccgtttttcaaaggaagccgtaactcattacaaaacagtcaaagccgggaagcgcttttcccttctcgacatagaaatcatgacagggcgcaaaaaccagatcagagtgcagcttgccgaacgcgggaatccgatcgccggagacaaaaaatacggtgccgtaacaaatccgatacaccgcctcgcgcttcatgcgtctgagcttgaaatcatgtcaccctcgggaaagcatttcaaattccgcgcgccgatccccgcatcgttcgccaaggtggtaaaataatcctatataaaatcagcctccgtgctttatacggaggctgattttatattttgtttttttcaccgaacggactcatcggcttcagacgttgacacgcggacaggatgagcggcgcattcggggttcgcgagcggaataaccccgtcaggcgggatcctcgggaagagccgcggatacaaaacttcctattctgtccgccatgcgcaaaaatcccgcatcgttcggatgaactccgtcaaccgtacaaagatcagcgtgaggtccgttgaacagagatgctccgtcaatgaaatacacgctgcggtctcccgcgtttactgcattcatataggtacggaacacaacctcgcggcaccggagcatctcattctccggcggtatcaccgatattccgtaggcgtgaggtccgccgtagccctcttcaaaggtcgggcggcttatcataatgaccggaagatccggatgagatgcgcgtatctttttgaagaatgcctcatgtgtacgttcaaggtgctcgggattcggtgcgttatggtcgtaatccatgacgaacacgctcatatcgagcgaatttatataatcggtgatcgcctcctcggcaagtgccgagccggagaagccgaggtttatgaaatcgcagtcaaggtcgtttgaaataatggcttcataagcgttcccgggacgcgaagcgcaggcaccctgcgtgatcgacgatccgtaatacacaacgggcttcaaatagcggtacggcgcggaatgctcaatgcggctgccctcggcgactccgatataaagattcttcacatcgctgtatgtcgggaaatgaagcatgacatccttcattccgggaaccttgaatcgggagatcgcctcgtaatgatcgccgaacgtcggcatgaaagtatcgtgatagacgtatttcgctccgcatttaacataaatatcgaacgcgctcgagccggttctcgcaaaatggctcatatctgccatcgagggcatctccgcatagatcgcaatatactccgaatcggtcgaaaaacgaagccgtccgcccgccgtattcgacgaaagtgccgcaacggatgtgcttgtcgctgccgcaacatcctccgggacacgcctgtaatgatcaagcttgcgcgggcaaagaagtccgaaaatatcgaaaaccccgtctctcgcttcgcggtaatatgcattttcgggacaaatttcgctttcaaaaccaagattagtcttcatattaaactccgttttctataattttcgactgtatatggcacaatcgctttttcattttgcctctttgagttttttgtgctttgttcttgtttatttttatcttcatggtgattttagcctattgttcacaacaatttttgtgtaatattttttataaaaatatcttgtaatttcatgttgattatggtattattttactgtcaaaatattacacaaggatggtatacagcaatgctcaccaacactaaaattttaatcgcagacgaagaccttcgctcaagacgttcgataaaggacgcgctcgtgaaaaacggataccgttttgtggaggaagccgaaaacggtgaagaagcaatactgcttataaaccggatacatccggatgtggtcatagcggatgtatggctttcaaagcttgacggtatcggattggttcgtcaggcaagcgcatcgagcttttcaccggataaagctccggcatttataatcgtatcgatgatcgcaaatcaaagtatcttcgtcgaagcgagccgtgccggtgcagtgctttgccttccaaagcccatagacaccgagagcctttcggctcacatagaaacgatagtcaagcgtcgcgccgacggaagccttttcgcatcgtcaaacgaaattcccgacgtggagactcaggtcacgaaaataatacatcagatcggcgttcccgcacacataaaaggatatcagtatctgcgcagtgcgataataatggcgatcaacgattccgagatcatcaactccgtaacgaaaatactctatccgtccgttgccaaaaaatattcgacgacgacctcgagagtggagcgcgcgataaggcacgcaattgaagtcgcgtgggaccgcggagacatagacacgctgaactcatatttcggatacacggttcagcaggggcgtggaaaacccacaaacagcgaattcatcgcaatgatatccgacaatctgcgtcttaaatacaagataagataatcagtccttttccgtaaccgcatcgatcgtatcgccgtcggtcgtcaggacgatattcccggaaatgtccgtgcggtagactctgcttcccaaagcatcgagccgatcgagaaccttttgcgacggatgaccgtaggaattgtccgcgccgacctcgataacggcgatttccgggtggacggcgttcagaaacgcctcggttgacgaggttttcgagccgtgatgccccaccttcagcacatcacttctcagctttgacgaaggatattcttcaagaagagctttctccaccgccgcttcggcatctcccgtaaacagaaaggtcacaccgccgaagcgcgcgtggacgaccgcgctgtaatcgtttgtattctcatacgactcttcaagcggcgaaagtatctcaatttgcagatctcccacggagtaagtgtcccccggagcggcgatatgtgcgtcaacgcccttcttctccacagaatcgagaaggcgggaaaacgcagccgacgacgaaaccgcgtcgggcatgatcaggttcacgacctcaagcgattctatgacctcggacgcgccgccgatatgatcctcatgcggatgggtgaggatcatataatctatcttctcggtatatttttcaagataggcgacaagatcgtgtctcgaatccgtcgtgccagcgtcgatcaggatacagccgctctccgtgcggagaaattccgcgtctccctgtccgacatctatgaaatgcacttcgcatttcccttccgcggacggaagaagaaattcgttacggaatatgcagagaatcgccgccgcacacagaataagtgctccgacaagcgtttttgagggaatttttcttgatctcattgttttttctccgctcggcaaacttattacgttatgccaattatataccataagccctgctttttcaatataaaaagaacatccggattcatttttttcacttttcggataaaatcgtgaaaattcccgcgcaagatgaagttaacggttgaaagaaaaatctttttgtgatagaatatctttacgaatattctccgaatcttttcggaataagaagcaaggagtacatatgaaaaaggcaaagggttttatagctgagttcaaggaattcatatcccgcggaaacgtcattgatcttgcagtcggtgttataatcggaagtgccttcaccgccatcgtcaattctcttgtaaacgacatggtaatgccgcttatcggatggatgttcggcggaatcgattttaccgatctgaaatatgtgatcacgcccgcgagcgacggagttgcggaagctgccatacgctacggaaacttcatacagtgtgtggtgaacttcattctcatatccttcgtgatattctgtgtggtaaaggtaataaacaagttccacaagaagaaggacgaagaagaggcgaaggaagaggaagtaaaggaagacccggaggacatcgttcttctccgcgaaataagagactccctgaagaaagactgaatgtcaaaagtgaaacaggcggcgcactgcggtgcgccgcctgttcttttatattcccgacgaaattcacgtccttgcgcaggctgactcgcggatacgttattgcgtccgcataacgcaccctgaagcatcagtcgataatcgtgtacaccgagtcgttctcatccatgctcagtgcgtcggtctttgcaaaatcatcaagtgaatatgatgttattccgacagtattatagatatagagaaagtttcctatataaagccctctcatagcatcgtaggaatattcttctccgaaggagatagtcgccttttcgacaaagctgccgttctcgtaagcgtaaacaagatattctccgctgcttccgggaaaagcgataatgttctttcccgcatttataaggatcgcatgatgattgtatgaggcttcgctgtaatagatgcccggaagtataagcgttgcggcttcgatgacattattcttatcgcttatatcgaacattgaaagctttacgttgcccgcggatataccgccgaactcgtttgtataggtatcgtgtccgaggccgaaaagaagtccgtccgtgtatttgtggagataatcggaaaagcccggaatcttcagtgcggagagcaccttcggtgcggtcgggtcggaaagatcggcacaaaacagcgggtcggtctcacggaaggtgacaaagtacaccgtatccccgtcaaaccttgcggaatatatccgctcgtcctccgcaagcccctcgatgcttccgacggtttcgagattttcattgaggacatagagtgaattcgaagctgcggaacccgagccgtcgttgatctcataggcgatatccctatcccgtgcggatgtggtataataatacatatgcgcgggaacactcgtcacaaggcggaagtatccgcggtattcgtccatggaaaagctgttaaggacgctgcccggaacctttccctctgcggcaagcgaaagctccttgtccgtggctattttcacgataacggtctgcgttatcgatatcgttctgccgtccgaagcttccttgagatcatattcggtgcgtgcagcgtagatcgcgttcgcgctctgatacatatctcccgcgccgtatccgagaagcgacagcttcgagactatcttcgcctcggaaacatcgaccgagcacacgttcagatattcgttgaaatctccgccgtccttctcgcaatagatgttttccggagccacaagagcttcttcttctccggtatatatcttcggaacatatgttgccggatcgtttttgactattctgtcgtaatagtaatcggcggcgataagatacagaacattatccttcattctcgacgaaacgatatttccgctgacgcagaatgtctttacaaaagacggagaagaaatatccgaaatgtcgtatatcgcggcgcacgttttttggtcagcgccgtcatagctttggaataccgcagtgagccgcccgtcggaaatgtaaagctgatatccgtaggcggacgagttgtcgcctatatcgggaagcgggaatttcgatacattccccatcttaccgttttctgcggaaattatatagatatgtttacgggataccgcgtaaatatacctgccgtccgtctttacgacatccgcttcggcgattccttcaacctgcacgttggtatccgaaaaatcgtccgaggcctcagtggtgaacacttcattggcgattgcggcatctctttctgctgccccttttgtatcgttgcttttactgccgaaaagcgatttgtataaagaaaaccccgagttctttttgattttcagctttgcataaacatcggcatatccgtcgaaggagcagagattatcgacatagtttgacgctccgtttccttccgtgccgatcggcagcaccgacctcggcggaaaaactccgctcactccggcgatgatcgcggcggcaagcacaagacacacacacgacagcgtggttgacgccgcgaatatgcgctttctccggcgcgatttttcctctttggcctttgcaaggatgtcggctgttctttcttcatatgttttcatatccgtaaccgtccttttcgagaattgccctgagcgttttacgtgctctgaaaatgagattttcggtttgctttttcgattttttcataacatatgccgcctgatccgccgtcatattttcaaaatagacgagatacagcaccgcgcggtaattctcacacagctccgacattgcgtcgtgcaggtgtctgtcgcgctcgtccctgagcagacgcgaatcaagctcggtcatgtcgcgcacggtttctatatcctcactcggcatttcccctctgcgcgacgcctttctgacatagtccacggcgaggttatgcgcgaccgcgaaaagatacgatttcaggctcgaatcaccgcggaatgcgcgctttttcagcgcgatctgcacgaacgaatccgcaacgatctcctcggcggtctggatattcttcaccgtcgggcagacaaaatacaaaagctgatcgctgtatgcgctgacgatctctccgagcgcgtcctcatcacccgaagtaaatctcctgtacgcctcggtcattgtgtcgttaaagctcacctgtccacctcttttcatcggctttcaccctttagtcgtttgttttcccgaaaatactcacccgatacggaaattttttcagcctttcataatcagtatgcagaaatcttccgcaaaagtcaatagatgcggagaaaaataccgagcaaaaaatcgctttgttcataaaatacgctatatttcggcgcgaaatatgatataatattaactgactattgtgacggagtgcgcgtcgcttcggacagaaaatcttctaaaggagggcaggaccggttcggatcggtccggtattcagatttggaacgtataatcgaatatttgaaaagaagtctgaagatcgcatggaagagtatcttttttaattttaagcagtatatattcttcttcattgcaatacttatcgttcagatgttctacggagtcatgacgatctccacgtacaacaacactcttgtcgaaagagaattcgtaaaggagtactacgactatcatgtgctcgtgaccaacataaacgaagggcaactcaaccttctcagtggttatggcggttccgtttctacagatgatcaattctacgggaagttagttccctacagcagccaagcatctgacagcaccaacaacgatgcatcttatttaaagaaagttaagcaagcagaatccaaatatgtagaatacaaaaacagcaacggggacaaacggttcgatgtttacattgtattcaagtcagaatctgcaacaggcaagagtatctccctctcagattctttcaataaattagacaagaactatttaaataatacgaatttcaccaatgcgactgaaaagaacgaccaattctttgtgtacaagtcgccgctcatgaacgtctcaacgaatattttagcaaacaacgcggtctactatacgatatccgccgtgcttcttgccctctcaatattccttatgatgatgctctacaacatccgagtgaaccaatacaagttcacatacggtgtctatatgaccttcggtgcggatttcaagatgctgttcaacacggctttctgggaaatgttcgtaatcatggtgctcacatttataccgtcggtcatcttttcaacgctcatcgtattcatcatgtacatcccttcgggattcggtttcaccttctccgctatggtattcctgaaggtgttcgtattctcgctcatcgtcgtaacggtagcggtattcttcccgatgcgtgtcatggcagtccggatgcctatgacccttatcgttacgcaggacaactccaacctcgtttcttctccgaaaaattcggtcaacattttcaagagaaaattcccgaccttctacgaaacgctttcaagctggcgtttccgcaagtacagcgcaaaccttcttctcactgctatcgtattctgcgctatattcataatgggtctttacctcgcggatatctaccgcaccgaccttgaatacaaccgtgcagaatacaccgtcgatctttccgcaggagcgatcgattatgacgatgtcatgagcgaggaactttactccgtaaacggtgtcaaggctgttgaggccgccggaaactacgttgaggctacgaaagcttcttcgggaccgtcccacatcctcgttcccgcgtccaaggtcaaggcactcaagggcggacttatcacctacgacggaaaggattataagggcgaaggctcgatgaaggcaacgaacagcgttctctacaacggtgttaccgccgagcagctcaaggtaatcgagcagctttacgcttacgacggaaatcttcaggatgttctcaaggatggctacgtcatcatcggcgattcgctttccaacatgaagacgttcaagtacaaagtcggcgacacgatcgaggtcgcaatccccgtgaacacctccggcgcgatcgacgacaagctttccggcaagcagcttctccgtgcccagatcgaaaagtacaagtatcagtacaaaaccttcaccatcgcggctatccttacggatatcccgtcgaaggagcttcccatatattttaacacggacgactatgctgcagtcaccggcgcagagttctccgctctcaagctcaacatttatgttgatcccgatatgtcgcccgccgatgtcgccgaaaccgaaaaggctctgcgcgtatgggctcaggactatgacagcgtcggtatcgaatcctcctacaatctcactaccaagaacatcgcatacgacaagcacagaagcgagctctacataacgatctcgataatgcttcttgtgatctcgccgatcatgtggttcttctctcagacgctttactatctgaagcgtgaatccgagttcaacattcttcaggctctcggtgcaagagtcagggatatccgaaatatatatgtacagggcggtctccagatggcagggctttcactcatcgtcagtgttgcgctcagcttcctcggaagttacattctcttctatgtatataacgtaatcatccccaacttcttcacccctcagggtgccgttgcggtgcgctacaccttctatatgccttggtacgcgatacttacttccgttctcgtatccgtggcgtgcggattcctgtccgcttacctgccctacaagagctactacaagaaccgcttcactcttgaaaacggcggtgcaggttcgatcgaagaataattcggatatcaaaatctaatgaatttaagaggaattgaaatatggcagaaataatgcttcagacagacagccttataaagcaatataaacagtccgactccgttatcaccgcggtgaaccgcgcaagcatcaaaatcccgaaaggtgagttcgcggcaatcatcggtacctccggttccggtaagtccaccttccttcacctctgcgcaggtctcgacaagcccgacgcgggaagcgtaacgataaacggcacggagatcaccaagctttcgcacgacaagctcggacgcttccgcggcgaaaacatgggattcgttttccagcgtcacaacctcattccgcagttcaccgcgcttgagaacattctcatcccgaccatgatgtgcaacaagcccgacatgagctatcaggagaacctccgtcacctcgttgaaaccctcgacctcggcgaccgtctcagccatctgccgagcgagctttccggaggtcagcagcagcgtgttgcgatcgcccgtgcgcttatcaacaatcccgacatcatcatggcggacgagcctaccggagctcttgacagaaagaacgccgatgaagttctcaaccttctcttcaagacccgtgaggaattcggtctgaccctcgtcatggttacccacgaccttgctatcgccgaccgtgcagaccgtattttccgcatggacaacggcgagctcaagcttgagcgtgattatcagaccggcggacgcaccgaataaccgaaatataaaacagggctgttgcgaaggcaacagccctttcgccgtataggcagttctcataaaaacgaaaggatttgcaccaacatgaaaaaacttgatgcaaaaacagaagcaagaatcgaagaaataatcaagacgctgacgctcgagcagaaggtcgggcagatgaatcagaccgtatcgtggggcggaaccgtcgaaatgtacgccgagaggatccgccgcggagagatcggttcgatgatctgcggcgctcccgacgtttcggcagaccgcagtttcgagaagaagttccgcgatttccacaatgctcttcagaaagtcgcagtcgaggaaagcccgtgcaacattccgctgatgttcggcgccgacatcattcacagctacggcgtatgctaccccgtcggaataggaagcgcagcttcctttgatccggagcttgttgagaaatgcttccgcaatatctcggaggcatgcgcccgtgacggacttaactggacgttttctccggtgctcgatctttcccacgacccgcgctggggacgctgcgtcgagtccgagggtgaagatccctatcttgcgggacagatcggtgcagcgatggttcgcggatttcagaagaatctcgacaacacggacaatctgatcgcctgccccaagcactacatcggatacggcgcgatggaaggcggaagagactatcacaactctgacataagcgactatgtaatggaaaattggtacgctgctcccttccgtgcggctgttgacgcgggcgcgctcaccgttatgtcatccttcaactccgtttcgggtgaacccgtaacctcatcgaagaagctgcttcgtcagctcctcaaggagcagatgggcttcgacggctttgttatcagcgattacgatgccgtaatgcagcttgggaatcagggcgttgccgaaaccccccgcgactgcgcgcggctcgccgccgaaggcggagtcgatatggaaatggtcgattacacctacaaaaactatctgtgcgaccttgtgagatcgggcgagatcgacgaaagtgtgatagacgaggcggttcgccgcgtgctccgcaccaaatttgccgcaaatctgtttgacaatccctacaagaaggactacccgatcgacattgaccgccaccgtgccgacgcacgtcagctcgcctcggaaaatgttgtgcttctcaagaacaagggcaatattctcccgctcagccccgaggaccgtgtattcatggaaggtccgttcttcgacgagagaaactgccaggcgggagcatgggctgctcacacggacgacagaggaatcagaagctaccgcgaggcgctctccgacattgtaacgatcgttgaagaggaggacgacggtcccggcgtcgatattccggaaaacaacggtaatttcgttttggcgaagaagagaatccgcgaggaagcaaacaaggcatgctacacaaatccgttattccttacgaagtacggcgaatccatcggacgcgatctgcttgaaggcggatacaaggcaatcgttctcttcctcggtgagactcacttctgcaccggagaagcggtatccgtagccgatgcttcgatcccggacgatcaggttgagatggtccgcagagcgcatgccacgggacttcccgttatcgccgttatgaactttgcgcgtccgcgtgcgataggcgaggtcgagcacatgcttgacgcgatcgtatggggatggcacaacggaacaatgaacgccgaaggaatgctcgatgtgctttacggaaagaaaaatccgtgcggcagacttcctatgacagttctccgcaatgtcggtcagataccgatgtactacaatgctcccaacaccgcgcgcaaggtcaacgcatattacggcgagggcaagagctactacgacatgaaatcaagccccgcgttcccgttcggatacggactctcatacaccgaattcgcctactcctctcccgaagccgaccgcactgagatttcgctcgccgacattgaaaacggcgaaagcatcaaagtcaccgcgaccgttcgaaacatcggcaagcttgcgggcaaagaggtaatccagtgctatgtccgcgatcactttgcagccatgatgcgcccgcgcagacagcttgtcggattcataaagcccgaaatcggtgccggcgaagaatacactgccgtatttgagatcggaaagaaggagctcgggtattggctcaacggaaaattcattgttgaaaaaggaaagttcaccgtttatgcaggagaaaactgcctcaccgaaaacggggtggaaattgaaataaagtaagattttgtgttttgaaaagaggatgttaagatgaaggatatgacaaaatgggccggcattgcccgcgagagaatacacgacaggccgaatgctgcggggcggcttagctcaaaggctgcgatcgtcacgggaagtgcgcagggattcggaaaaggcatcgccgaggcgatctacagagaaggtgccgcggtcgtgatcgcggatctcaactacgatctcgcgtgcaaggttgccgacgatctcggagaacgcgcgttcgcggtcaaggtcaatgttgccgacgaggacagcgtagccgatatggttgcagcatcggtcgagcgtttcggcgggatcgatctgtttgtaaacaatgcgggcgtcgtccgttccggtgcgctctccgagcttgagaagaaggatttcgactttgtcaccgggattaactacagtgcatatttcctgtgcgtaaagtatgtctcggcaataatgcgggcgcagcacgaagccgatcccgcatgggtcggcgacattgtcgagatcaactccaagtcggggctcgaaggctcgaagaagaatttcgcatatgcaggaagcaaattcggcggcatcggtctgacccagtcattcgcgcttgagctctgcgaatactcgataaaggtcaatgcgatttgccctggcaattacctcgacggtccgctgtggaccgatcccgagcgcggacttttcgttcagtatctccatgcaggcaaggtgcccggtgcaaagacggtggaagatgtgcgcaggttctacgaagcgaaggtaccgatgaaccgcggctgtctccccgaagatgttgcgtgcgcgctgttttatgcggtcgaacagaaatacgagaccggacaggcgatccccgttacgggcgggcagtgcatgctgagctgatgatagacatatccgtactcaacaagctcaatgtaagcgatgcgtccgagcgtctcgaaaatctgcgcagtcttgtaaaggatgccgattttcccgcagtcattccggaatacataaacaaccacatccacaccacatactcgttttcgccgtactcccccgccgcagcagtatacgccgcgcgcgcggaagggctttccaccgcggggatcgtcgatcatgacacgatcgcgggtgcgcgggaatttatcgaagcgggaaagatcgcggggattcccacgacggtgggaatggaatgccgcgtacgcatgacgggtacttcgcttataaaccgaaggaccaacaacccggatcaggtcggtgtaagctacatgacatttcagggcgttccacaccgcaatattgaaaaactcgactcatttttcgcgccgctgcgcgagaaaagaaacgaacgcaatcgtgccatggtatcgaatatcaactccgtcaccgccgatctcgggatcacgcttgatttcgatgacgatgtgcttccgctctcaaatgccgcgcacggcggaagtgtgacggaacgtcat

SEQ ID NO: 2316 - DNA, 19699 bp, Unknown
  16S sequences of unknown bacteria
atgaggctaccggagaaaaagattatgtaatgacatggcaacacaaatagaaattccagtttgtcggataaacttacaataatcaaagaccgcttacatcgtgtaggcggtctcttttcgtgtttagatatatttgattttgagctttcttttcttggctgaaagcaccttgcagagaacatcgtcaaccccgtcggtatatctgccttgtgctatcaggctgttcttcaaacggataagtgattgtattacttcgctgtattcatcatcagtaagatagatatggaacttatcttctctcatagtcgtttcctccaatcatcaaattttgctctgattaccgaagcatctgcttcgacatcagaataaataaagatatgtacgcttttgaaaactgcttttactctatcggcatacttcgcttccgtttcgtttgacttaaaagggagcttaacgagttttatatttcgctgcttgcataagtggcttttgagaacctccatctgttctgagccactcgtaaattctatcgccagcttttctgacggaatgtaggtttcaagtggtattcctaatagtttatctgaaccgagctgcacctttaatcctttttgatttgcgtaataggcaacagccaagccggggaatacggagcgatattcgctttcgcatacggtgcattttccttcaagaattgttctgtcgctgatttttgctttccaagagtgtccgagtgaacatttccaccacacacttttcatcgactttcttgatacttgtgtcgggagcagagagtttttttcataatcccattcagcaagcagtttcctgtccgttgtggctaaatcattgtaccctgcaagaaccgctctgtccgcacagaccgggcataccgttccttttacacgggcatttattacggacttccactcattgccgcaggtcttacacttccaccaaacattgcgtcttgattttgcgtttacctcatcaggtaatagaggataatttctttctgaccactcggcggcaaggtcagggtgcgtagtcgccaagtcattaaatcctttaagcaatgtatatccactacaatacggacatctgctcccaccggaacgggttgaaataagagtgtaccactcgtttccgcaatctctgcatttccaccaagccttactgtttgcaaaggctgttaccattgtaggctgcaacggaagatttctgtcagaccattcagcagcaatatcaggatactgtgaagcaaggtcattgaatcctgcaaggactttattatgtgagcagtatggacagcctgtgccgtttaccgttctgcttttaacgcttgcttcccattcgtgtccgtgtttgcatttccaaataatcttcttatgagaagcgacagaaacctcagtaggctttaattcgttcttttcagaccactcctgagccagcaggggcttcaatgtggctaaatcattgataccctctattactctcgctcctgagcatatcgggcatttctcgccctttgagcgagctttgacgctcgtttcccactcgtgtccgcaagcacctttccaccacactcttttatttgaaccgaaggttatcttatccggcgtcagcggtaaattcttctctgaccattcaggaataagctccggatgaacgcttgctaaactgcccgtcatagtacaaccaccccttcctttgtgattatcccaattatattgagaaaatcgggattggtgtagtttgcgaataataagaaagaccttgggagaaaatatctctcaaggtcaataagtgattcctcagttagaattttatctttcctgtcgggcaataagagtggttacactataataaatcatcactaaacccgcacttaaaattgccccgccaataatatcagtaatccaatgaacaccggatatcaacctgccaattaccataaaagcagtaaatgcaattaaagcaaaggcaaatgctcttttcatttttgtatttctaattctactgtttagctgcataacagctgtcggcataacacacataacaagcaaggttgtcgatgatggatacgaagcttcaagaaaaccgttaatcaataccgggcggtaattgacaacataaaattcaaaaaacaaatatgccgccattacaacaatatagaatgctcccaacaccaaaatactggaatcgaccttgaataagctttttcttttaataagctgtataagtccaagcaacgcaaatcccaaaataaagcaaagcggtatcagtcctaaccagtccgtaacggtatatattgccatatgcacacctgtcaggctgtggataaagccgttcaaggttgcaaatccaacagaagagttttgtggcccgatgggctgaacatcaataaggcttattgccactgtccacaaaataaataacactaccattgctattcctgaaagcaatactttttgacttttttcttttttcatttttatcaatcctttgccataattatttggctttcgcctgtttacaatataggcggaatgaataaaaatgaaaagaatttcaccgtcacattggcgacacgcttcgtatcatcgccattttatcagcatcagagactttatcgccaagaaaacaaaagtgaaaaaggctgcataaggttgaagtgttatcataaattctattgtagcaactgtgcttaacacaatggatatttgatgtttgtgtttcaaccaaaacactgcttcataattttgtagagcgagaagcaaaacacctgtaagtacaattccaaatacaataattaaatacggtattttgatatactgcggggtacctgtcagcgaaagtaaagatacctcttttataatctcatcacccttttgtccaaagaaaggcagaaacagaaacataatcaaactgcaatcgagtaaaccaaacactaagtcgcttgtatgtttttccttttgcttattatcctcgtcagcaattttaagtatttcttcaccggacaataactcatctattgacactgaaaaaaactttgaaattgcttttaatgactcgatattgggaactcctctgccggattcccacttagaaattgcagtgcgagacacaaataacgcttccgcaagttcttcctgcgtgagtcctttttctttcctcaactcttgtaatttttcacttaattccataataaacattccttttgcactcagatacgaatgtatcctttattagaaatgggcaatcccactatgggactgcccattcattccgtaaattatgcgattttttagtctctgcaccgtttttagcaccgattggtgtaaaattggtgtaaagaggtaaatttattcagtttggaaagtcccgaaacccgcataaacactggctttttcttacttgtcgttcggtaaggacttcatcgtcgggaacagcaaaacatctctgatagcccgtgaatttgtcataagcataatcattctgtcgataccgaagccgataccgcctgtcggtgccataccgattgacaacgcgttaaggaagtcctcgtctgtgtggttggcctcctcgtcgcctgcccggaacatttcctcctgggcggcaaatctttctctctggtcaatggggtcgttaagctcggagtaagcgtttgcaagctcccagccgttcatatagaattcaaatctctcaacatattccgggttttccggctttctcttggtaagaggtgaaatatctaccgggtgatccataataaatgtaggctgaatgagcttatcttcaacatattcttcaaagaacagattgagaatatcgcccttcttatggcgctcctcgtatgctatattatgctcctttgcaagctctcttgcctgctctaaagtttcaacctgtgcaaagtcaacccctgagtactttttaactgcctcaatcattgtgagcttttcaaaaggctttgaaaggtcaagaaccttgtcaccgtactgcaaaacctctgaaccgattacggtttttgcaatatgtctgtaaagattttcggtcaattccatcatgccgtggtagtctgtgtatgcctggtaaagctccataagagtaaattccgggttgtgtcttgtatcaacaccctcgtttctgaaaacacggccgatttcgtaaactctttcaagaccgcctacaataagacgctttaagtaaagttcaagagaaatacggagcttcaaatcctcgtccaaagcattgaagtgtgtttcaaaaggtcttgcggcggcgccgccggcgtttgaaacaagcataggagtttcaacttccataaagccttggccgtcaagatagcgacgaatttcgctgatgattttggaacgcttaatgaatgtgtcctttacatcatcgttcatgataaggtcaacatatctctggcggtatcttgaatctgtgtctgtaagaccgtggaatttttccggcaaaatctgcaagctctttgaaagaagtgtaagagaatccgcatggattgaaatttcccctgtttttgttctgaaagcatagccggtaacgccgtaaatatcaccaaggtcgctctttttaaagtctgcgtaacattcctcgcctactgcgtccttagaaacataaacctggattttgccctttaagtcctgaatattgcagaaagatgccttacccataactcttttaaacatcatacggccggcgattgaaacatggattggctgtgcgtccataatccggcgtctttcgttgtaatcgttatttacagcttcctttgcccgtgcctcgtcaaggccctcaacattaacaggctctctgcctgccaaaagctctttttcatgggcttcgtacaaagccttaacctcatctgtgtgatgagactgattatattttgttatttggaaaggatccttgcctgcccgctgcaagtcggccaatttttggcggcggatcttcaaaatttcgttgtcattttgaacctgaggctgctttttgttttccatttacaatctccttttatacttcggcaatttgtataattacaatatgccgttattttatcttaatatcattatactaacacaaaaatgtagtttttacaatattgattttccccaatacggctataataaagcaaaaaggccgagcttacaaagccccgcctttgatatgcaaacatcttatctgtttataacaacctttttgattgtcaactgcattgttttgcctgtgggcaattcaaccgtaacggtttcccctgttttgtggcctttcaaagcccgacctacaggtgaatcgtcgctgattttgccgttaagcggatcatattctgtgctgcctacaatgctgtaagtttcttcgtcgccgtcttcgtcaacaactgtaaccttggtacctacgcttacagtgccttttgtaacagagcctttattcatgattttggcatttttaactgtccgttcaagttccataatgcgctgttcaacatgaccctgttcgtctttggcagcgtcatattcggcgttttcggacaagtcgccgtagccacgagctactttgattttttctgcgatttcccgtcttttttcggttttaagatattcaagttctttaaccaaggcgtcatagccgtcttgtgtaagttcaatttccttagccattagtaatctccttttgcaataattacttttatagacaatacatattatatattcatataaaatttatgtcaacaaaattttgtgtaaaaggatgggaaattttgtgcgattgacaaagcaaaagagccttttcccataggaaaaagctctttcttgggggagactttggccgccgcatttattgccgacagccatttgatattattcttcgtcagatttcataacgataaacttcttagcctcttcgataaccttgctttcaaggtttgcaggcaactgttcataccttgcaaattcaagggtgaaactgcctctgcctgctgtaagagaacgaatatatgttgtaaagtccgctgtttcgctcataggaatttccgcaactaccttttgcaatccgtcctcgcccggttctatacccaaaactctgcctctgcgctttgtgacttcgcccattacatcccctgtgtttgtatccggaacagaggcctgcaatgtgccgataggttcaagtaagcaaggtgacgcatctttcaaccctgccttgtaagccaatttggccgccatcttaaaggccatttcggaagagtcaaccgggtggtaagaaccgtccaacaatgtggctttaaggccaaccagcggatagcctgccaatacaccgtttgcaacggcctcctgcaagcccttttcaacagccgggaagtagttcttaggcacagaaccgccgaatacatcttcctcaaatacaagttcgtcgctgtcgcaaggttcaaatctgatttttacatggccgtactgaccgtgaccgccggactgcttcttatgtttgccctcggcctcaacggattttctgattgtctcacggtaagccactctcggctttgaaacctctgcttcaacgccgaatttatttttaagctttgcaagggtaacatcaaggtgctgttcacctaagccctttataagctgttgtgccgtttccgcatcttggcggtagcccactgtgcaatcttcttccataatgcgctgtaatgcggcggaaatcttagcctcgtcgcctttgctcttaggcctaattgccatttccattgtaggcaacgggaatatgttatcaatcgccttgtaatcgttctgcgggtcgcagagaacatcacctgtcttggtggaagcaagctttgtaaccgcacctatgtcgccggccttaataccccgggcatcggtttgctttttacctcttataaacaaaagtttacccattttttccggttcgccggtggttgtgtttataacatttgaatcggctttcaaaacgccgcttaacacttttacaaagctcattttgcctacaaatgggtcggcaacagttttaaataccaatgccgcaacctgggcgttttcattaaacggaagaacaacctccgttgagcctatatcaatctttgtgccctctgtgtcctgaggtgtaggcgctaaatcgttaataacatccaaaaccatatcaatggcttcaagttttgtggcaacgccgcacacaacaggggtaattgtaccgtctttaacaccggacttgataccctgtacaatctccgcttttgtcaaaggttcgccggagaaatatttttccataagttcttcgctggtttcggcaacagcctcattgatagccgttacaaggccgtcaaggcggtggcctgtggcaggcataacaacttcctctgcaacaccgtttttatattgatatgccttaaagtccataagatttacatatattgtttcattgcctctggcaaccggaacaacgataggacaaatctgcggaccaaactgtgttttaagctcttcaaaaaccttgtagaaatcagcatgttcaacatcaatttttgaaacatatatcattgtgctcttccgatttttctctgccaagcggaacgccttttgtgtacctacttctactccgtcctttgcgcttacggcaataagtacggtttctgccgcttttatgccctcataaagacccagttcaaagtcaaaaagtcccggcacatcaatgatgtttacctttgtgtcaccgtattcgtatggcaaaatcgaactttgcaaagagcaaagtctcttggcttcttcgccgtcatagtcggaaaccgtgtttccgtcctccactctgccctgtctgtccactgtctttgtccgatagagcattgcctccgccaagctggttttgccgctgccggcatggccggcaaaaaggatattcttcacctttaattgtttgtagtccataatacatgaacccccttttgtctgatttgtaaagccgaataatatcaaattatttttaatcgtacattcaatacaaaaattgtaccacatatcaatatttttttaaacatttttaatagatttttccggtgccaaaatgcagaatttaaaagtcccgaattgtatatttttaacaaattcgggtttttgtgacaatatttctgccagttttttgtctattcggccgaataattttaagtgccgatatgatatatatgtgttataataaaaatatatactaaaagaaacggagacatttatctatgcgcacattacaattagcggatttttacaagtacaaatttctctccggcctggaatacaacaaaagcggcagtttggccgccgttatccgggcagagccggatgttgaaaacaacggctacaaaaagaatttgtacttaattgacggcgataccgttaaaccttttattaccgacggcaaggtaggcggttttatttgggaagatgacgaacacattctctttgccgcaaaccgttccgatgccgagaaaaagcgccgggaaagcggcgatatgttcaccccatactaccgcataagcgtaaaaggcggcgaggctttgccggcgtttactctgcctttcaccgcattgtcaatagacaaaataagcgacgaactttttgcggcaacaggtgccgttgatgtaaattatccggatttttacacctatgatgccgacaagcgcaaggaaaccgccgcaaaatacaaagctgaggcagattatgaggttattgacgaaaacccatggtggtttaacggcacaggaatgataaacaaaaaacgctgcggcttgtttatatgcaatgttaaaaccggtgaggttaaaatgattacgcctgccaacttccgtgtgggtgactactgtgaaaaagacggggttatctactacgccggcgaggagtacaccgaaaaaatggcagatgttcatttcatatactcctatgacacaaaaaccggccggacaaagcagttgacaaaaaagcctatgtctgtttcgtatatggactgggttgataatatgttggttatttccggctcatataaagaaacttatggtgtgtcccagtcggattgtctgtataaattatcatttgacggcggggagccggagatgttcctttacacggagcagggccccggcaactccgtaggcagcgactgccgccttgggggcaacggtcggtttgctacagagggtgacaaagtttactttgtttcgactgttgtaaacgccgcacaccttatttcgtgcgatctctccggcaaggccgaaacagtaataggtattgaaggcaccgttgacggctttgacattaaaaacggcaaaatcattcttgtgggcatgtatgatatgaagttgcaggaagtgtacacatttgacggcaaacttcgtcaagtttcccacttcaatgagaatattttaaaagatacatatgttgcaaagcccaacaagatgacaataaagagccggggctacgatattgacggttgggttttgttgccgaaagattatgaccgggcaaagaaatacccggcgatacttgatattcacgggggaccgaaaaccgcatacggtgaagttttctaccacgaaatgcaagcctgggcaaatatgggttactttgtgttcttctgtaacccatacggctccgacggcaagggcaacgaattcagcgacctccgtggcaaatacggcacaaccgactaccaaaatattatggactttaccgaccgggttttggcggcttatccgcaaattgacaaggaaaaagtagccgttacagggggcagctacggcggatttatgacaaactggattatcggtcacaccgacagatttgttgcggcagccacacagcgttcgatttccaactggatttcattctacggcatttccgacataggcattatgttcggcacagatcagtgtgcggcaactattttcacccctgagggagttgaaaaaatgtggaatgccagcccgcttaaatatgtcgccaatatgaagacacctacattgtttattcactccgaccaagactaccgctgccctattgccgagggctatcagctttacacggctttgaaagacaagggtgtagacagcagaatgtgtgtgttccacggtgaaaaccacgaactttcaagagggggcaaaccattgcaccgcctgcgcagactgacagaaataaccgattggattgtgaaatatacaaaataaagttatgtataacttgaaacaataattgaatattttataaaaagagcaggtcgtttttttacccggcgacctgttctgatatataaaaagagaacggccgaaaccgttctcttatttattttacttacttttactttgcaaattccgttgcacggctttctctgataacatttacctttatctgacccggatagtcaagctcgttttcgatacgggcaacaatatcacgggcaagtataacgatctggtcatcgcttacggcctccggtttaaccaaaattctaacctcacggccggcctgtaccgcataacttgtctctacacccgggaagctgttggaaatttcttcaagcttttcaagacgcttgatgtagttttcgatattttctcttcttgcacccggtcttgcggcgctgatagcgtcggcggcgataacaacaaagtcgataaccgatgtaggctcaacatcgttatggtgtgcccggatagcgtgaataataatcgggttttctttgaacttcttggcaacttcaacgcctattgaaacatgagtgccctcatattcgtggtcaaggcccttgcctatatcgtgcaaaagacctgcacgcttagccattgtcacatctgcgccaagttcacctgccaaaagacctgccaaagcgcttacttcaagtgagtgctttaaaatgttttggccgtaacttgtgcggtatttaagtctgcctatgagcttgataagctcagggtgcaaaccgtgcacgccggcgtccataaccgccctttcgccctctttcttgatggtaagttccacctctctgcgggctttttcaacggtttcttcaattctccgtggatgaatacggccgtcggaaataagtttttccaaagcctgtcttgcaacttcacggcggattgggtcaaagctggaaattgtgattgcctccggtgtgtcgtcgataataagatcaacgccggtggcggtttcaaaggcacggatatttctgccctcacggccgataattctgcccttcatttcatcgttaggcaatgaaacggtacttacaaccgcttccgcagagtgatcccgagcgcatcttgcaatggcctgggttacaatatcccttgccatttcgtcgctgtcctctttcagctgagcttcgtaagccgaaattttaacggctttttcgtgggtcaactgccgatccaatttttccaaaataagagcctttgcagcgtcctgggacaaaccggaaatagtttccagtttttgcaattcacgctctttaacctgctctacttcggcaagttttgcctcaatcaaaagttctttttgcttttggtcggcctcacgcttttccattgcatcggttttcttgtcaaggttttcttccttttggtttaatctgcgttcctgacgggtgatttcattacggcggtctttaagttctttttcgccgtcggccttcaaacggaaaatttcgtccttggcctccaataatacttcttttcgtttttgttcagctgctttaatagcgtcatttactattttttctgctttttcttcggcaccgccgattttaccctcggcgtatatctgcctgtcttcttggcctttcttatagcgaaaaatccaaacgaaaacacaggctacaacagcaactaaaatgacagctaccaaaacatagaatggtactgatgtcatactgttctccttcaaaaagttaataacaatttaattttatttataaaaagatactataatatatattacataaatacacagcatatatactaaactatatatccgttacataaataataaatgtcacatatatattttatagatataatttaatattgtcaagaaatatattgacagttaaggtaaaaagtgataatatgagcttaaagcattgaagcggatatgttttgcttgacacagctttacagagagcctcgggcaggtgtaacggggcaggttgcaggcaaagtaccaccgccgagcaggcacggcgaactgtgcacgggcaagaccgttatatcttacaagagtggcgcattttgcgcaattcgggtggaaccgtggggttattggttacctcatcccgtttgggatggaggtatttttttatacttaaaaataccgaaatttcaaaaatctgtaaaaaattttaaagacagaaagggaatcatcatgatcaaagtaacattgaaggacggctctgttaaagagtttgaaagtcccgttagctatgcggaaatagcaaaatctatcagcccaaaacttttggaaaaggcaacttgtgcaaaggcaaacggcgaaattcacgatttgagagatattgccgacaaagatgtagaggttgaaatccttacatttgacgaccgggaaggcaaaaaaacattctggcacacatcaagccacattatggcacaggccattttgaaatttattccggatgcaaaacttacaataggaccggctgttgacaacggtttctactatgacattgataccgatgtaaacatcgacgaagaaatgattgctaaaatcgaggccgaatttaaggctatcgcaaaggcaaattcttcaataagacgatacacattgccaaaagaagaagctcttgcaaaattcccaaacaacgaatacaagcaggaacttataaacgacttgcctgagggcgaagttatctcattctacgaacaggacggctttaccgacttgtgcgcaggcccccaccttatgagccttggcgcagtagacgcatttaaaattatgagcgttgccggcgcatattggagaggcaattccgaaaacaagatgttaaagcgtgtttacggtatttctttcccgaaacagaagcagcttgacgaatatctgcacatgcttgaagaggccaaaaagagagaccacagaaagcttggcagagagcttagattgtttgaaatgtttgacgaaggccctggtttcccgttcttccttcctaacggcatgattgtttacaacacattgcttgactattggagagaagttcataagagaaacggctatgttgaaatttcaacacctacaattcttaacagaaaactttgggaacagtcaggtcactgggatcactataaggacaatatgtactttacaaagatcgacggcgacgattacgcaatcaaacctatgaactgtccgggcggcatgcttgtttacggcatggaaccacactcataccgtgatttgccgatgcgtgtaggcgaaatcggtcttgtacacagacacgagctttcaggtgccttgaacggtcttatgagagtaagatgcttccaccaggacgatgctcatatctttatgacaccggaacagattccgaatgaaatcaaaggcgttgtttcattgttcaacgaagtttactcaaaattcggcttgacatatcacgcagagctttcaacaagacctgaggattcaatgggctccgacgagcagtgggaaatggcaacaaacggtttgaagaacgctcttgaagaaatcggtttgccttatgttatcaacgaaggcgacggcgcattctacggtcctaagattgacttccaccttaacgacgctatcggcagaacatggcagtgcggcacaattcagctggatatgcttatgcctgaaagatttaaccttgaatatatcggcgaagacggcgaaaaacaccgtccggtaatgattcaccgtgttgtttacggttcaatcgaaagatttatcggtattcttatcgaacactttgcaggcgcattcccaacatggcttgcccctgtacaggctgttgttattccgattaagacagacagcgaagcacagatgatttacgcaaaggaacttatggctaaacttgacgccgcaggtatccgtgctaaattggacgacagaaacgaaacattgggctaccgtatcagagaacagcagggtcagaaaataccttatatgcttgttatcggtgacaaagaggctgaaagcaacatggtttccgttcgtgacagaaaagacagagaagaatttaagaaccctgttacggctgaagactttatcctttatgctgccgatgaaattaaggaaagacgcctttaatctcttggcttacaggatttaaaattaaataaattttaaaaaactatgctctcggcttgaccgagagcattttttgtgatataatgtccgagttgcttatgataacgctataaaaactttgaagaatttaaaaaatttgaaaaaagttgttgacaaagtgtaaatcatttgctataataattaagctatctggacaggtagatgtgagttattagctcagctggcagagcaactgacttgtaatcagtgggtccggggttcgaatccccgatagctcaccacaaaaagcacaattcggatgaattgtgctttttattttgtctaaaataaattataaatacaaatatttgtttcaaatttgtcattatcttaaattacacatttattttacaaaaactaattgaacattaacgcattttcacacaaaaaataattgcatttttttcaaaaagtatttataatgtgagtaatcgttatttggggagattaggattgaaaattttattcataggcgatgtggtaggcgataacggcagagagttgctgctgaaaagactgccggccataaaaaaggaatacagctgcgatgtttgcatagtgaacggcgaaaattcaaacgaaagcggtaccggcatgaccaaagccgacgccgacgatatttttgccgcaggagccgatgttataaccggcggtaatcactctatgcgcagagcaaatatttctctctacgaagaaaatcaatatctgttatgtccccaaaaccttttatatgccgaaaaaggctgtggcgtatgccaagttgaccttggcagaaccgcactgtatgtggtaaaccttataggcaccgcatttatggaaaatcacaaaaacccattttttgagattgacaaaatactggcggacatagacggcaaaaatatatttgtggactttcatgctgaatccactgccgaaaaatacgcctttgcccattattgcgacggcagagtaagcgccgttgtaggcacccatacccatgtgcagacaaatgacgagcaaattttgcccggcggcaccggatatataaccgatgcaggctgtgtttgcgcagacaattcagttctcggcgttgtaaaggaacttgcgattgaaaaacaaaagtacctaagacccatacactttaaaacagcagtggggccggggtatgtaaacggagttttcatcgagattgataacaacggcaaagcggtaaaaattgaaaaagttcacataaaataatttgtgaaacttttgctgttttacccggcaaatgttatatactccgtaaaaataatcacaccaataaactgagaaaggcagacatagtatggatacattaaaagtttcttcaagatcaaatccggtttctgtagcaggcgcaatcgccggcattatcagagaaaaaggcagtgttgaagtgcagggcatcggcgccggcgccgttaaccaggcacttaaaagcgttgctgtgcggagaggttatgttgctccgtcaggacttgaccttgtttgcattcctgctttcacaagcattgtgattgacggtgaatcaaaaacagccatgaagcttatcgttgaaataagaaaataattttactggcacaccaaaaaacctaagagccgctttgtcggctctttatttttctctgcgtcaaggtatacaaaatcggctgtctttttttgacataatgggctatttatttttattctttggtatgttacaatataatgtagtaaaaacgaaaggcggtttgtatcatggcagaatttaacggtacaccacacaatacggctaaattgggagaaatagcaaaaacggttctcatgcccggggatccgttgcgtgcaaaatttattgcagacacatttttagatgatgttaagcagttcaacaatgtcaggggcatgcttggctttacaggcacatacaaaggggttcctgtttcggtaatgggctcaggtatgggtatgccaagcatcggtatttactcttacgaactttacaacttctacggggttgaaaatattataagagtaggcacagccggcggtatggttgaatcacttgacttgtttgatgttgtccttgttgacggcgcatactccaaatcaacttatgcaaaagtgggcttcggctattgggaagatattcaaaagccttccgaagaacttaaccgggctattgaaagcgccgcaaagaaattgggcaaaaaagttacaaagggtcttatcgaatcaagcgatactttctattccgacccgacagttgtaaagaagtcaagatatgaacttctctgtgcggaaatggagagctttgccctgtttgcaaacgcaagacatttgggcaaaaatgcagcttgcattttgacaatttccgacagtatgattaaaaaagcggagacaaccgcagagcagaggcagacggcatttacggacatgatggagattgcccttaatgcagccatcactctttaatttttaatttacaaccggcaatccggtttgtaacaagtatatcagtttatttttgaaaggaattttattatggcagaatttaacggtacaccacacaacaccgccaaagtaggcgacattgcaaaaacagtgcttatgccgggggatcccttgcgtgcaaaatttattgcggagaattttcttgaaaatccaaagcaatttaacaatgtaagaggtatgctgggctttacaggtacatacaaaggggttcctgtttcggtaatgggttcaggcatgggtatgccaagcatcggtatttactcatatgaactttacagcttctacggcgttgaaaacattataagaataggcacttccggcgctatgacagaggatcttgatttgtttgatgttgttttggcatccggctcttattcaaagtccagctacgcaaaagtaggtttcggctactgggaggacattcagcttccatctgaaaagctcaacgaagctattgaagaatccgcaaagaaactgggcaaaaaaattacaaagggcttgattgaatccggcgatgtattttacagcgacaaaacagtaaacaagccttcaagatacgaacttctctgcggcgaaatggaaagtttcggtctttttgcaactgcaagatattgcaaaaagaacgccgcttgccttttgacaatctccgaccatatgattaaaaagaccgtaacaacagcagaagaaagacaaaatgcttttacggatatgatggaaattgctcttaatgcggctatttcactgtaaaacaatactaacatatagtcattcatacaaaaaagagggcttctgccctctttttattttactttgtgtctatttacaaattcagcctgcaaggctataatttagtcatagcccattaaaagataaaagggctttggaaaaatactattaaatacggagaaaattactatggatttgaaagcattggctgaaaaaaatcacgattatgtggttgagatgagaagatacttccaccggcacccggagcttagcacacaggaagtaaacacaagcaaaaagatttgcgaagaacttgaaaaaatgggtatcccctataaggcttacccggactacacggttatcgcaacaatagattccggcaaaccgggcaaaaccgttttgataagaggcgatattgacgccctgcctgttaccgaagaaacaggtttgccatttgcctcgcagaacccgggagttatgcacgcctgcggtcacgactgccacggtgctatgcttttgggcataggcaaaagccttatggaagtaaaggacgaattgacaggtaaaattcttttaggtttccaagttgcggaagaaaaccttaaaggcagccgcacaatggtgcagtatgtaaaagatatgggcggggcggataactcaatcgccattcatgtgggatgtgcccagaatataggtgaaattatgttgcctgccggtccgatggcctccggcgttatcacataccaaataagagttaaaggcagaggcggccacggttctgctcctcatgcggctcttgacccaatcaaacccgcctgtgaaattgttttgaagttggcttcactgccgtcaaacgccattgacgcacaagaccctatcgtgttctctacctgccatatcgaaggcggcagcgctgtaaacattatcccggacgaggctgtaatcggcggcacggtcagatactttaacaaagatttgacccaaccgattttcgactaccttgaaaatatttccgaatgtgtatgtaagagctacggcgttacaagaacaatggaatacattttcgaccctatgattcctgttgtaaacgataaagaagttgccgaaatgggtcagagaattgccgaagaaatgggattgaaagttaaaaaagacggcaagggcatgggaagtgacgatatggcgcttttgcttgacgctttcccgggcttttacgcaaatatcggttgtgccaatgaggcaaagggcatcggtcatgtggcaaaccacaacgcctgctttacaatagatgaggacgctcttaaactgggaacagaatttttgatgaagtccgcctgtgaacttttgaacaaataatttaatgtggcaaaaattaaactccccgatttttcggggagttttttgcgctaaaaaccattgggattggcagtttttgctttaacttaataatttaaccaaactgcgaatttttgttttacataataggaaatatactatgcctttggtgtggcgaaaaggttattaagtgtaaaatttaaaatcggttatccgctataagagagcaaaccgaataaaccgcagacccggctctctttggtgcatttgttcagttctaaatcaacatttcaaaccgaacgaatagcaaggctctctttggtaaagagagctgtcagcggtagctgactgagagattgaaaaacattttgtttatatacgatattcggttgtaagttcagttgaaaatcaggttattgtatcaaggtcaatccctccggtttttcttacgaaaaaccacctccctttaccaaagggcggcaaggttgcggatttttggggttgttatctataaccgaaatttgatgtaaacaagttgtaaaacaacccctcagacggctaacgccgccagctccccttgcacagtggagccaaggtgttgctaacctttggaaatgttattttgtatttgacattcatttataaattatattgtttaaaatggttttccactataaaataacaagccgagcagatagcaaaactcgccctccctgtgcaagggagggtggtgtgagcgtttagcgaacaccggg

SEQ ID NO: 2317 - DNA, 11944 bp, Unknown
  16S sequences of unknown bacteria
ggtactttggatactcatttatgagtgtcgctcctcgctaaaggagaaaaagtacgaactaaaacttaattatgcaaaaaaaggctgttcgcgtattatgatttaatactgcgtcagccttttctttatttaccccctcagcttctttatcttgtccctgaggaacgcggcttcttcaaatctcagctcggcggcgcactgcttcatctcagccgtaagtctctcgatctgctgctccacagtctcgccggtttttgcgctgtctttttctcccttagcctgacgaccgcgcttcttcttcgattttccgtcgtcgcccgcacctatcctgataagctccgctatcttcttctcgacagtcttcggtatgattccgtggacaaggttgtattccatctgaatctcgcgccttctcgcggtttcgtccattgcggctttcatcgaatccgtgatgtggtcggcgtagagtattaccttgccgtttgcgttgcgtgcggcgcgtcctatcatctggataagcgaacgctccgagcggaataatccctccttgtcagcgtcaagtattgcgacaagagttacctccggcaaatctattccctcgcggagaagatttattccgacaagcacgtcgaacagtcccattctaagatccctcagcagctccgtgcgctccattgtctcaacattgtggtggatgtactttaccttaactccgcagtcgtcgaggtattccgtgagatcctccgccatcttcttcgtgagcgtggtgacaagaactctctctccgcgggatgtgcggtcgcgtatctctccgagaaggtcgtcaacctgcgtctctatcgggcgaacctcaatttccgggtcaagaagtcccgtcgggcggataatctgctcaaccacctgctccgaatgctctatctcgtattccgcgggagttgccgatacaagcaccacctgcccgagcttttcctcaaattcgttgaagttcagcgggcggttgtcgtaagccgagggcagacggaagccgtagtcgacaaggttctgctttctcgcacggtcgccgccgctcattccccttacctgcgggattgttacgtggctctcgtcgatgaacatgatgtagtccttcgggaagtagtcgagcagtgtgtacggcgtagctcccggctcacgtcctgcgaatatgcgcgagtagttctccactcccgagcagtagccgacttctttcagcatctcaaggtcgtatctcgttctttcctcaattctctgtgcttcgagcagcttgttctgcgacttgaaccactccacacgctcttcaagctcgttttctatctcctcgaacgccttctcacgcttgcccgggtcgataacatagtgcgttgccggatatatcgcgatgtagtttaagtattcgagtatctctcccgtaacggggttgaattcgcacacgcggtctatctcgtctccgaaaaattcgattcgcactgccttttcggtgtagcctgcgggataaacgtcgagtatgtctcccctcacgcggaagcggtctctgcggaagtcgatgtcgttgcgctcgtagctgatggaaacaagacgcgccataagctcctgcatcgacacctccagtcccggacggactccgactatctgacccgcgtattcttccggcggaccgagggagtatatacacgacaccgacgaaactataatgacgtctcgcctctcgaacagtgcggaggtggcggagtggcgcagcttgtctatctcgtcgttgatgagcgcgtccttttcaatgtacatatcctttccgggaacatacgcttccggctgatagtagtcgtagtacgagacgaaatactcaacggcgttttcggggaagaactcgcggaactccgtgcaaagctgagcggcgagggtcttgttgtgcgagagaatgagcgtcggtcggttcagattcgctatgacgttcgccattgtaaaggtcttgcccgagccggttactccgagcagcgtctggtatttcattcccgcctcaaagcccgcggtcagttttgcgatagcgtcaggctggtctcccgtaggagcaaacggagaatgcaaacggaacggctgtgttttcatttaaagctccttttgcctaaaataatcttcctctttattataccacacatccgtgcattcttcaacggaaaacgaaaatttgttttttggttctttgctcttgcccgtgataatatattgtggtataatataataatcggagaatatctttgatgaaaaaaataatcgtactttttgtccttctttcccttgccggatgtgcaaaagtcacggaaaacactcctgtggatgagtacatatcgagaagcgcggagttttctcttacctttcccgcgtcgtatgagctgtcaacctcgtcggattcttcttcggatggtgtggaagttactgcacactgcgtgagaagcggagagggaataactctttccgttgtgtctccggagaggtcgaaggatgtcggaataaagctcggcggcgacggatgctttctcacggtgggagagacctctatagcaatgtcggagagcgcgggtcggggaataacggatgtgtttgccgcgatgttccccgacagctatacaatatccgcctcggaggacgggcagagcaggcttttgacgagcgagtacggaacagtgtacgtctcggaggacggaataccgcaaaaaatatcctgcggagagcgagagattacagtctcggactttgtcgcgcaggctgaataaaggttttgtaatgaagcacaagaatattgcctatataaacatgacggcgctggagaacaactaccgcgctatcgaaaaaatagtgtcggagaacgccgaaaagaagccgcgtatcattgccgttgtgaaagccgacgcatacggtcacggaatcgaaaacgtagctaaggctctcggagacgcgggatgcgatatgtacgccgtatcgtccgaggaagaagcggtggagctgcgcgaggttgaggagaaaaacggaagaatgcccgatatcctcatcctcagccgaatctcccccgagaacgtcgctgacatgatagagaaaaacataacagccgccgttacctcatacgacaacgcgcttgcactgaacgacgctgccacggaagccggaggaaagctcaaaattcacgtcaagctcgacacgggaatgaacagagtgggcttttccgcgagggaggacgacgccgacgacactgccgcaaagatagaagagctgtcgaagtgcaagggacttgagctgtgcggaatattcacccacttttcctccgctgacgacgagctgatggacggcaagatagtcgagggctacgaggactgcggcggatacacgagaatgcagctcaaccggttcacttcgatggtagataagctgagagcgcgcggagttgacacgggtatggttcacgccgcaaactcagccgctatactcacccttcccgaggcgtattttgacgcggtcagagcgggaataatcctctacggactcatgccgaacggtaaatgcgacgagagattcaagccggcgatgtgctttgtctcaaccgttacccacatccacgagataaaggcgggagaaaaggtaagctacggcgcggtgttcactgctcagcgtgacatgaggattgccacagtctctgcgggatatgccgacggatttgagcgtgcgtattccggatgcagagtagtcataggcggcgagagattcagacaggtcggacgtatctgcatggatcagtttatggtagacataacggacggagagggaattgaagtgggcgaccgcgctgttcttttcggaggagacgatggggagagcattaacgcactcgcgagccttgcgggaacaataaactacgaggttgtgtgcaagataagcaagagagtcaaccgcgttcctgtgaatgcccagtaaaggagaaaaaatgaaaaagatttttgccgtgatattggcgttctgtacactgtttgtgtcactgcttgtgtttgtgtcatgcggaagtggcggacacactgcggaggagatgcgtactatcgtcgagccgctcatagaaaagtccgcggagctgaacgttatctatttcggagagggactgccgctcaccgttgaccccgatgaagccgaaaggttttattcctcgttcgataccgacgttcaggcgataagctaccaccccgtcgataagtcctgcggctacgagagcattgacgagattaaaaacgctacccttgaggtgttcacggaggactacgcggactatctctttaccctcgccttcacgggaatatcggacaccgtaaacgacggagtgggagacaagactgaaacctcgacctacgccagatacatcgagcagtcgggtatgctcaccgcacgcatagacctcgcgaaggaagccatccccctcggcagagtgtatcatacggacaagctcgaggtggtgcgcgaaaaggacggatatgtgctcgtgaaaataccgacggagcttgacggaaaggaatgcgacgtgcagctgaagctcatagaaactgcggacggatggagacttgacaccccgacatattgagttttgagcggcaatgtccgtttttctgttaatgtaatgttaacgcggcaaccgtaattaataaacaattaccctactcacaattttgcgttaatcattaatagctattttcacttgtttgcttgaatatcggtaaaaatatttctgtatgctattgacaatatatgcctgttagtgttataatttatgcagacagttgttttttgctgccggtattttttgaatacggaggtgcgtatgccgtcgtctgttagaagactgctgatagcttcggctaaaggcggagtcggcaaaagtactaccgcggtcggaatagcggcggagatggctcgcatgggaaagaaaactttactgtgcgacctcgatatgaccagccgcagccttgatatgctcaccggagaagaggatagggcactgttcgggttctcggacgttatccacggcaaaccgcttgacgacgctgtgataaccgacgtttgcggaattcgcggacttaatctgcttccgtcaactgtcacagaatcagacacggattttgacgaaaggctgaaaaataccgtgcgggacatagtgtctcgtgaagactatgactttgtagtcgtcgatacgggcggcggaatatccgttgccgaaaaaatagcgccgtttttcgactctgtcgtcgtcacctcggagcagagccagacctctctcagagcggcggaatttgcgggagcggagctgcaaaactcgggcgggcgtaatatccgtcttgtggtgtgcgcgttcgatttgccgtctgtgaaaagggaaaagcgcgcgggaatagtcgagatgatagaccgcagctcactgaaatgcgtcggagtcgtcccgcttgacaaaaaattacagaaattacaggacagcggaaagatacccgagagaaccgagtcggcgttggcttacaagaatatcgcgcgtcggcttgaaggctatgacataccgctgttttacggaatgcgcgggatgagaaaaaagctctcgtcggcgttataggatagttgcaaatattatttatataataacaagaagtaaagaaaggaacggatgaatatggatatagcactcatagcggacgataccaaaaaggaacttatgacccagttttgtatagcttactgcggaatcctctccaagcatcatatctgcgccacaaatattaccggaaagtatgttcaggaagctacgggacttgaaatagaaaagctgctgcccggctctcacggaggcgcacagcagataacatcccgaatatcctataatgagatagacgtgttactttacttccgcagcaccactcccaattatgaccatgatgaaaacgaatataatcttctccgtatgtgcgacgtacacaatgtgccgatggctacaaatatcgcgacggcagaggttttaatctgcgctctcgaccacggcgaccttgactggagagaaatcgtaaacccgcgctcggactacaacagacgcagacgcggactaaattattaaacaaaattcaaaccttggcaaacgtctcattttttaagtaaagtgagacgttgattttttgatacggagaaaatatgataaaaatactgtttttcggcgatgtcgtgggagaatgcggcgtgtcgctcatggaaaaaaagctgccgcagctgagaaaaaagtacggcgcagaccttgttatagtgaacggcgagaactccgctgtgggaaacggaatgtcgtccgaatcctcggaaagactttacgactgcggcgcggatatcatcacaggcggaaaccatacatggaagcgcaaggaagtctaccgcaaactcgacgacgaaggctacctcgtaagacccgcaaactaccccgccgacgctcccggaatgggatacgccatagcagaggtccgcggatatagagtgctcgtcatgaatatgctcggctgcgtgtatatggaaccactgactccgcctcacgaatgcgcggaaaagattctgaaaaacgaacgcggaagatacgatattgcagtgtgtgacttccacgccgaagctacatccgagaagctgttcttcgcccgctatttcgatatgaaacccgatataggcttctccgtagtcgtaggaacacatactcatgtcgcaacggctgatataacagtgctccccggcggatgcggatatataacggacctcggaatgtgcggctcccacggaggaatcctcggcgtgaaaacggagtcgataatccataagttcacagtaaaaacccccaccgccttcgagcctgctatgggagacgaaagaataaacggcgcatacttcgaggtggacgaaaaaaccggaaaatgcctcagagccgaaagagtggaagaaagataacccatttggaaatatccggatttaatcaaaatcggttgaattcccccgaaaatgatgatataatgaaataaataagtgaatcaaaaaaagaaaaaacaaaaagctccgcccaaactctcgtcagcaaacgtgtaaacaatccagtgcgccagccaatatcgaaccaaatgcgaagtttaagccaaccaaaattggtgacggagtaaaaatttaaactcatctacggctacaaactaaaaaattaattaggtataaatccggcgggtagcccaaatcaaagaagaccctttcgccagaacttaccgggtgcgaagacggcagttcatcctacaagcctaacgtgaccggatagccggtactccgaactagcatatagcatagctagttcaagggacaggcgcctgaatccctctgtgcgccctccgcgtaggagcaccccctcaccgcagtgagataaaattaaatcgaaaagacgccagtcttttcttcatcttaatcggagattaacttgaaaaaagtatatctatatatcctagcgttagctctaaccctaactctgtcctcgtgctcacgagagctaaccctcctctcgtcagagtggagcgagatagcgcagttcttcaccccaccttcgtccgacgaagaattccccctcgccgctgaagccggaaaaacagcaaagtcctctccagtgcttatccaaacacgtcacgccgagcttctgccatccccatataataaaagcgtcgacgtgaatgccgtgacctcggtcggaaatacggataagctcgctgtctttgacaaggatagaatagcatcgaacgcggaaaagttcggctataccaacgtcagcttcggcgagaacctctcacttgactccgtcagcggaatactggaggacgcaagggtgctgtataatatcgaatataaaagcaattccgcgcccgccggagatgttttcgctatggagtacgcaggattctcttgctccgacggctacttcataaatcccgacgtcatcgctacattgtacgtcagctcggaaaagcccgcgaaaactgccaaaagcggagataaccttgtctatatcaccttcgacgacggtcctaccgagaaaaacacaacgcgcctgcttgaaattctcgatacatacggagtgaaagccgcgttctttactacaggagacgccgtggagaaatatcccgactccgcgcgtgagatagtcgagagaggacatatcttcggctgtcattcacgcacgcacgactataaaaaaatctacgcctcaaccgacgcgcttgccgaagaagtggacgagtgggagaaaatatctgcggcggcaggcataaaaaaggaagagattggacagcttacgttccgtttccccggcggatctgtcggaagctactttgacgacgcgcaggccgaggacatgaaaaaaatgctcgcggataagggctacttcgtctacgactggaacgttgtcacaaacgactccatcctctatatggctcccgacggcacaagaagctacgactacctcagcgataccttccgcgaaaccttgcagctttgcattaacgagaacaaaggcaaaagcggcgcgcccgttatcatcctcatgcacgagacggttgacgagacggtggagcttctcccgtggatgctcgaatatctcatctcggagggctataccttcggcgacctcggcaatatgagcaagtcgtggacgttcgccgacagataaaaattgcactcacctacggattttatcgtgtaagtgagtgcttttgttgtttacttttcttttatcagaacaatgctgttcgggcgcagagtcattgccatgccgtccggcagcgctgtcttttcgtttgtgtgctcttcatccaccagatatgcttcaaaatcgccgcttcgcccgaaatctacggaaatctgcttctctcccgcgttgtcgtcgtccgtgtagtacgtaactaacgccgtcagctttccgttcgcgtccataccgcacagggaatagatgttttcgggtgaagagacagccctgatctcgcactgcatatcgtagaacattccgtagtagtacaaaggataatatcccttcagcggctcgcaggtgtaataatcaaacgcaccgcagaaaatagacggacgcgtatcgtagtacatgagcatatcaatggaagactgctgtgccgacgaaatgcaagccatagtaaaagccgcgcctttcattccgtgcattaccttaatggaataaacatactcttccgtccatccctttatgtagttccactcgtttagtatgctctcggtcgctgtgtagcagtatttgtcgaggaggtttcgtatcctctcggctttctcgagcatcggctttggctcaacgcagtatatgtgccacgagaagaaatctataggcactttattttcgctcatgtgcctgagaaaatcctccgcccagttttcgtcccacgcaagagcaggtccgccgattttcagctcggggaagcaggacttcaaatgctttgccgcagtttcgtacagctcaaagaattgcgccttcgttccgccccatgtgcgcttgttttggctgtcgtcggagtcaaggtcgggctcgttccatatctcccagtagggcatattcagcttgaagccgtccgcccagccgtagttgtagtgccttatgatgtgctcgcatatgacagcccactttttgaaatccttcggcggaagagtgccgtgctttttgatttggtgctctatggtctgcccgagcctgaaaaaggtctgcgttccggcgtccagtgaaacaagtatcgcctcgtccgtgcaggcaaagtcatacgacagcgggtcatatgggtctgcgtcaaaattcgggaaaatcgcggttatgtcgtgtgaataaggtccgccgtagatcgatatcatctgactgtcgtggtttcgctgaaacggtattctcgccctcttgtaatcctaaaattggagcggtactggtcgtttgcgtgccttttgtgccatggaccgccgtttgtcgcgttcagcagcttaaactgcccgccgtgtacggacgtgtcaaatcttaaagtctccataatccctccgttgctgttatttttaaagcgtttaccgcctttcggacatttgcttcagcagctttcgcgacggtttgtagacactgaattcctgctcgtcgtactttatgacctgcgtgctctcaaatccgtcgcgcagcttcatcaccgccgatatccggtcgttttctccggcagacacaccctcgatgagaagccttctgtagttgtacatccacttttccgcgctgtcgactgtcacagcagggaattcctctcccgtcgtgtcgttgcggaggaagaactcgaactcgtgaccctcttccatgtcggtgtagccgtagacgctgtcgttccatctcacagccagctgagcctcgcccgactccgtgttgtagtagaagccgtaggcggaaaagtacccgtcggtcgacatctccgcggatattttcacagtgtacgtcagcgattcaccgtcggagtacgcctcgcaccagttctgcgtagcttcgggggaagagaaagcagacttgtccgccgcgactacgcatcttataacaaacataccgctgagcgcaagcactatgacggtgccgagtatcttcacaaatttttccatatcatcctccggaaaaataattgttctcatattatatcattaaaaaatgaacttttcaaggaatatgcataatatgtgaaaaatccggggaaaaaacagcggaaggtattgtaatcgtccgcgtgttttgatatactctataaaaacagcagaatgcacaaaaattcacataaaaggaaggtattatcatgcttctatcaacacagaccgacgttgttttccgcactctcggagagaaagacggaatcgacgtccttgcaagagccggctatgacgctatagacttctccatgttccccatgtcacacgacgcctgcccgctgaacacctgcgatattgagctctatgcgaagaacctcagaaaaatggcggaggacgcgggacttgtgttcaatcaggcgcacgctccgttcccgggatggagagtcggagacgacgcatacaacgcgaaaatgcccgagagagtagtccgcgccgtaaaaatcgccggaatgctcggagcaaaggcagtcgtcgttcatcccattgccgttccgggcggcggagaaaagcagaaggaattcaacctgaactactaccgcgacatggaaaaggtggctctcgactacggcacaaaaatcgcgctcgagaatatgtggggctgggacggaagacgcaactacatcgtaccgaacgtgtgctccttcggagaggatctctgcgactactacgacgagctgaatcccgacgcgttcaccgtatgtctcgacctcggacactgcggacttgtgggagacgaacccgatcatgcaatccgcgtactcggaaacaagagactcggcgcgctccacgttcacgacaacaactacagagaggacacgcacactatcccctacgaccgcgcctgcaagatggactggaacaagataacgacagccctcggcgagatagactacaagggagatttcacatacgaggctgacaacttccttgttcgctttgaccgctcgtcaattcaggcggcgacaatattcatggcacagctcggacgcacgctcatcgcgaaaatcgaagctgcacgaaagtaaaaatatggctgctgcatcaaggaaaaattccgaaatgcgagcagccttttttatgtagacaagtcgtttgttcgtactgtttctccttaagcgacagcccgtcctcaccttttataccacccccccgcggcttatgcaatggcggagtgaaaaaatcccgcggtttc

SEQ ID NO: 2318 - DNA, 2807 bp, Unknown
  16S sequences of unknown bacteria
cgtagtcgaacccatgcagagctaagggagctgtcagcgaagctgacttgggtgagactccaaacgcgcagcgtttggctaagtcgaacccatacagcgtagagggattgccccaccgcaaaagcaagtttgcaagcagagcgttactctgccaggcttaaaagccagccttgtaaatcgctacttttcaatttctaccaggcaagctagttagcgccctccgggggcccgattctttcttcagcagcgaagtaagaattggggaagaaagacgccgcgcgagtcgctggggcagtcccacgccctgagaacccgcccctgcatacaacatcgttactacagccgcacactgtcccgactgccaaacggttttgcccctgcatccgtaccctgccacccggtaaacaaaccgctcgccgcttcgcttgcgcttacggggtgcagttggggcttgggcgttttgttttgtttttcattatggaatttctgggacctctatctctgggaacagcgattggagcaaggcgcggcaggcggtggcgacgtcgcgccaggtggcgtcaaaatcgccggtgtaccaggggtcggcgacgtcccggggggtgggggtgtagtccatcagcagggagagcttttcgtcgtggccaaacaggcggcgcatatttgcaagattcgccgcgtccatgccgatgagatggtcgtaggcatcataatccgcccgggtcagctgccgggccgcatgggcatcgacccggatgccgtggcgcgccagcagacggcggaccggcggatagaccgggttgccgatctcctcccggctcgtagccgccgaggcaacgcgcacctgcgccgccagccccgcccggtcggccaagtcccgcagaacatattccgccatcgggctacggcagatattgccgtggcagataaataagatttttttcattgctgtgaatcctttcaaaagcctacaggccttactgtttcagggcttttggcgcttctgtcatttttgctgtcatgccggaaacctacgcagatttccgtaactctacgcagatttccgggcaaatggtgtaataattggtgtagtagctgttgcttcttcaacctggttttctctgcggctccgatgcggaaagccctttgaacgcaatgatcttttccttctgcacggcggcgcagccatccctctccgctgtatgggttcgactacgttgtataagcttgaggcgcaaaatcagcacgctgtgtaagcttgcgtgacaaaatcagcacgctgtataagctcgagtgacaaaatcagagatcttgactctcgcttattcgccaatcgcgcttcgcgctcttggcgtctcacccatacacaagggaacctttgggctagtgcggcgcttgcgggtgcaggggagcctttggctgtcgcccggctcccctgctggtgcactgggaagccgggcgaagctgcggcgttttcggctgcgctgtgatgtgcgatgctttgtcacagccagagggtgcctttgagaaatatcctgcctttgcgggagctgccgccggcttccaggaggctggcctttccagcgccgcgcagggataggatatcccccggcgcgacgggggcgtctggccgcaggcagggcatgtaattgagctgcaccagcccggcgcggatgcgctcggccgcctgggtgcgggaaagacggaacagccccgccgtcaccgcatccagccgcaggctctggacggtaaaggtcaccgccttctgctgtcgctccggcacagggacagaggccagcggcacagacgctagccggacgcccgtccgccccacctgggtcagctggtccagcagtgtcacggcaacggacggcaggcagaggacataggctccgtcctccgtcaccagcacatcccccagccaggggcggctgacgcccaggcccaggatcgcaccgagatagtcccggtggcccggtgttccaaagccgggcttgatctgcacggcccgcagggtctcctcaatcggcggctcgtccatccagtcaggcaggaaaaaggctacctggcgctcggcgtccggatagccgccggaaaacaccggctgcacggcgctgtggcgcggcgcccattgggccagagcgcagcgctgtgccggggtcagaaacgtcgtcgacgtcgggactccggcgcggtcgcagcggtcggccaggtcctgggcgcggcgcagcagggccgccagctcggcttgttcgtctttctcgttcatgggttctccttcccattccaacccagctgctgaccgatggtcgttttgctcgggcgcggggcgatggtctgcgtaatgcccgcctcggcggcggcgacctcctccagaaactcccgggctgagacccgcagcacaccgctgcgcagcgccgacagctgcaccagcgcgtccgacgtcacaacgcggacggcgtagtttttcccgatctcatgggccaggcgctcgatatacagatcgcccgtctcgttctctgccgtatagaccacatggaccccatggtgatctgaccggctgccccggccgccccggacgcgataggcatcgaagacgaccagtgtctcccgcccggtaaaggctcggtaattggccaagcgttccaaaagcttttcccgggcggcggcaaggtcgctggctgccagcgcagcaagctccggccagcagaagatcaagttatagccgtcgacgacgatcagcgtcttgtggggcgtcggaggcggctgcgccgtggctgcccggtctgaccgggcaggcgcggtat

SEQ ID NO: 2319 - DNA, 5127 bp, Unknown
  16S sequences of unknown bacteria
aggcgacaatcaatggatactgacggtcaaaacaaaggttttgacccataaaatcgagattttaactcgattttatataattgcatttgctaatgcaattattcagtagacattatttatcaaagccggggttgaatgcataaaagtttttgcagtcaagcctgtcggtcgtaagacgaagcgcctcgccgaatcgctggtaatgcacaacctcgcgttcgcgtaagaatttcagcggatccgttatatccggatcgtctatgagcctcaacagattatcatatgtcacgcgcgctttttgctctgccgccagatcctcgtgcagatcggttataacatcgcccttcgactgataatatgtcgccgtccacggcacaccgtttgccgccgcctgatacacaccatttgtatgacttacaaaatacggtgcaaatccgctcgcattgatttcctccggcgtgaggtttcttgtcagctgatgcaccatggcgcatatcatttccatgtgcgccagttcctctgttcctatatcggtaagcatgcccttgacctcattatagggctgaccgtagcgctgcgtcaaataccttaaagccgccgacgcttcgccgtcgggtccgccgtattgttccataattatttgcgcatacttgggatttgggtttttaatattaacagggtattgcagttttttctcatagctccacataattttcagccctccgcaccaaagtcgttgtcccacggccaggggccgtctgtccatttccagctgccctctgccggagcatcggcggcggttattattaaatcgccgaacttttcacggtattcgtccgcaacggcggcgcgtttttcgcgatactcgcgcataagctcaagcgctttttcgctttcggggtgcgaatcgagaaaaagggtcagctcgtatatcgcgaaatccagctcataaagcctgcgccttaatttcattttttcattcatttgcgcatacctcccaaaaatggcttatcaagctcgggaaaaagcgttcccgcgcagaatgccttttcaagcggataaacctcgccgcccgacggctgcatattgataaaaaccatggtaagcgaatcggcgcagtcggtattcacactgtctctccgaacggctctttgagacgcgctcatacagccgcatttttcgtaaaaatccgccgtattgaattgtttctccatttcggtattctccttttttgaattgggattttgtcctataacattttatttgccgcggcaatcgattgttacaatgacacgcattaagattttattaagatttttaaaatagagttaataaaaaaataattttattctatatgtattgtaatcgcttgactgattatatataattagtgtaattgggctaaatttgttatttttataacaatcaatttttacaactactttttacccttggaggaggtgctttgttttgtcaaatgttgtagataatctgtatgtggtcggcatgggtctcggcgttgttttcgtaggattgatttccataatcattctctgttatattataggtgccatatgtatgtcgtccggtaaaaaggaggagactgcagcggtctctgctcctgcagctgctcccgcacccgcaccgatagaaaaccgtcaggaaattattgcggcggtatctgccgcccttgcggaggaaatgggaaccgatatttccgcaatcagaattttgtccttcaaaaaaatttaagaaaaaggtgttaaaaatgaaaaaatacaatgtaaccgtaaacggtaccgcatacgaagtaactcttgaggctgttgacgtctccgaggtaaaaacctcccccgctccggctgctgctcccgccgcagcacctgctcctactcccgccgctgctcccgcagcccctgtttcgggtggtaaggaaactgtttcaagcccgatgcccggcaatattttagccgtgaatgttgcaaacggtgccgctgttaaaaagggcgacgtgcttatgattcttgaagctatgaagatggaaaacgagatcatgtccccctgcgacggaacaattctttcggttaatgttacaaagggcgcatcggttgaaaccggcgctgttctctgcgttatcggttaacggttgggagaattgacatatggatagaataattgattttgccaaaacaacaggcttttatatgctgttcggcaatttgaaggagaactggacttcgcttgcgatgattcttatttctctgttccttttgtacctcggcattaaaaagcaatttgagccgctgctgctcgtaggcatagccttcggtatgctgcttacaaaccttaccgcgtttaccggtgcggaaaatgccatgtaccacaccgagctttggacgcagtttatggatgaaagctccgaattttaccacagctacggttatataatgtcaaacggcggcttgctcgattttctgtatatcggcgttaagacctgcatttacccctgccttatatttataggtataggcgcaatgaccgactttgagccgcttatcgcaagcccgaaatcgctgcttttgggcgctgccgcgcaggttggtatattcgttacatttatcggctgcttagcgcttgccttcccggcggaggctgccgcttcgataggcattatcggcggtgctgacggtcctaccgccatttacactacctcaaagctttacccgaaccttttaggcccgatagcggtcgccgcttattcgtatatggcgctggtgcctgttattcagccgcctattatgaagctgctcaccacaaaaaaggagcgcgctatagtgatgaagccgctgcgcagagtaagcaaaacggaaaaaataattttcccgattgcggtaaccgtattcgtggctctgcttgttccctcggctactccgcttgttggctgcttaatgctcggtaacctttggaaggaatcaggcgtttgcgagcgtctttgcaagaccgcgcaaaacgagcttatgaatatcgtaacaatattcctcggaatctccgtaggcgctaccgcaacggcaaaggcgttccttaatatcaaaaccattaaaatacttggcatgggaatagtggctttcgcactcggtactgcgggcggcgttctgcttgcaaagcttatgaacctgttcacaaagaagaacaagataaatccgcttatcggctctgccggcgtttccgccgttcctatggcggcgcgcgtttcgcagtcggtcggtcagaaggagaaccctgccaacttcctgctcatgcacgccatgggaccgaatgttgcgggcgttataggctctgccattgcggcgggtgttcttatttcgattttcggttaatcgggggaaatttaaatggaagaaaagaaattatatataaccgataccattcttcgcgacgcgcaccagtcacaggcggctacgcgtatgcgcattgaggatatgctcccggcgcttgagcagcttgattcggtaggctactggagtcttgaatgttggggcggcgctacattcgacagctgcatgcgatttttgaacgaggacccgtgggagaggcttcgcacccttaaaaagcatatgcccaacaccaagctgcaaatgcttctgcgcgggcagaacctgctcggctacaagcactatgcggacgatgtggttgatatgttcgttaaaaagtcgatcgaaaacggcattgatgtcatccgtattttcgacgcgctcaacgatacgcgcaatatggaacaggcaatgaagagctgtaaaaaatacggcggaatatgcgaggctgccataagctacaccgtaagccccgttcataacgaggaatactttgttgaaatggcaaagacccttgaaaaaatgggtgcggatgttatctgcattaaggatatggctaaccttctgctcccctataatgcgtattcccttgttaaaaagctcaaggaaaatgttaatgttccgattcatctgcacacccacaacaccaccggtaccggcgatatgacctaccttatggctgcgcaggcgggcgttgatatcgtggataccgccctttctccccttgcaaacggtacttcgcagccctctacagaggcgcttgtggcaacgcttcagggcactccgcgcgataccgggcttgaccttatgaagcttagcgaaatagcggcgcacttccgcaaggttgcagataagcttaaagccgagggtatacttgacccgaaggtactgaatgttgataccaagacccttatttatcaggttcccggcggaatgctttcaaaccttttatctcagctcaagcaagccaacgccgaggataaatactatgacgttttggcagaggtaccgagggtaagagaggatttcggctatcccccgcttgtaacccccaccagtcagatagtaggcacacaggctgtgcttaatgtgctttcgggcgagcgctacaagatgattaccaaggaatcaaaaggacttctgcgcggcgaatacggcagactgcccggcaaggtaaacgaagaggttcgcaaaaaggctatcggtgacgataaggttataacctgccgccccgcagatcttttgaagcccgagcttaccgagtacgcaaaggaaatgcgcgataagggcataggcaaatctgaagaggatgtgttaagctacgcattgttcccgcaggttgccgaaaagttctttgcggtaagggataaaaagaacccctcaaatattgatgaaaacggcgttcgtcagcttgttgttgaggacctgtcggtttaaaattataatttttcaaagctgaaattttgttcaaatcaaaaaccaccggttcaaccggtggtttgctccacccctataaggtgtgattactggctcgacccctaaaagagggttgaaagtttaacaccgaattacattctccggcaaccgctcacgtgcggttgtctttttttgcctactttcccttctcacccgtaaacgggtaggtaaattcttttattctaatttggtctgctgcataatctttttctgactgattccttatgtattattcgcttatgtattcgtctgcaaggaggaaaaataggcataaaaaaag

SEQ ID NO: 2320 - DNA, 3542 bp, Unknown
  16S sequences of unknown bacteria
aaacctgcagggtcgctttcatctactgctctactacgccttcatctatccatttctgaacttcctccacactgagcctgactgctttcgcaatcttttcaactggaagccccatctctacaagtgaaagagctgtttctcttgccttcttcagctcaccttgttctatcccttgttctattccttgttctattccttgttctattccttgttcgatcccctttgcaattcctttttcgataccactttcaataccttcgctataaattttctccatttcatggcacataaattccacccccatcttcgtttcttttaactcatgtgtccgatccgccagaaccttgctgtacatatcctttgcatttttacaatgtaagtcatgcattagccttcccaactctgtatcatcctgcctccttgcatttacatagataatatgcgcttcatccataaaatcatccttgacttcttttattgtccggtctatatgataaattggaagttcataaccaagtacatcatctctcgtaataaaaatcatatagctctctggcagttcgtcaaaatcctgacctggatttaaggtattcatatccattaatccactatgataccttgcccgtttcggagacgccccttcgttctcctgctgaatttccacattcatctgccgaccttcagaatctctagccacgcaatccagaattgaggatcgcccctgtaaatttttgtaatctttctgcaacacctgatcgatcacagtaagatcctttttttccataaccacctgaaggacatattccatacattcgcgctttttcaatacatttctcataaacatatcgctcatgattgtaaggtcttttaaaatacccttgtacctttcatagcgcgcttccagtccttctggcactattgtctggttttttgccatatttgtgttcccgcatctgctctccctcagcttctccgcagaacctattatcctgtttccagtttatcagtaaaccattcgctttacaagcctaaaatcatcaccagtgataggccggggcgttttccagatagcgccggatgctgattccaatacaaggagcaacggatgcagtgatccacggcagactttcttccgacagcgtacacagccgcagctccagatcccctctggaccatgcggtataggtatatgcgccacgcgcctgtgccgtctgactctcctccatcgcatccagaatctgtgcggcagaaagcggctgcgtctgcgttgatttcggaagcagaccatccagcagtgcaagtgccagcgagatcgctcgctcccggttcttctcctgcctgggaacgatgcgaagctcatggagctttccattgttgtagtcgtaatcgaggatcagccagatgccgtcttccatctggtagatttcctctacggtaaaatctgtacggataattccgtaatctcccattgtcactatgaactgctccttggaatattccgggctcaggccttctgaaataccgtctgcctgcagaagcccgagtacttcctttggcgtagcgtctatatcgtaatatgcattgccgggaaaagcgagctttcggacagcagatgcatctagcctgtatctgcgcacatcttcgctccgctcctgcctggaatctggaatcctttcagcttctgttgccatatcctcaaccgtgttcagaaattcatccgtctctccttgttcttccacaaattccagaaatgcttcatattcgcggctcccacgatccagatttccggctcgtttttctgtgtgcgtaccgctcagagcaccaaacgcatacagccctgatgcaagcaacaggcctgctgcgagcacgcctccgcaaatggccgccatccgccatccacttcttccataacgtacctcacgcattttttcttccggataaaaatctgaggaaaattcccggacagaagcataacgttcccgctcatccaacgccagccctctttttaaaagatgttcctcctgttccggcgtaatcttcgccccatagacggacggctcgagcagctcatcccggatttgacgctggagtgcatcctccggcatacagccagtgatcatctcataaagtgtcgcagacagcgcatagatatccgtccacggtccctgcacactctttccgtcgtactgctccggcggcgcataaccgcttttcagtaataccgtctgcgtcatctccgaatccttctctctcagatacgaacgcgccgagccaaaatccagcagcttcacagtgccatttgctcccaccatcagattgtccggtgtgatatcgcggtgcagaagcccttttttatggatgctttccagtgccagcacgaccggccgaagcatttcgagcgcctcatcaaaggatggcacctctttgttttgctccagccagcttcgaagagaaattccctgcacatactccatgaccagataggcggtctgattttcctgaaaataattccacgcctttacgacacccggcacatccaaaagagaagtaagaatacgcgcctcccgcaggaagcgattcctgccctctgtaaaagcagcccggtccgtctcctctgtgatccggatacttccatcctcagcccgccttgcaaagcaagccggaaaatattccttaatcacaatcttctgtccgagcagctcatcctccgccagataggtaataccgaacccgccctgtccgagactgcggcacacccgatagcgcccgttcaggcgatatcccacttccaaccgctcttttgtcctcattcaacatatcctcccggctccatcgtcagctgcgcataggcatactcctttcggacactcgtatgcaaccgcagccggaattttgcatgctcagtaatactctgatcctttttcagctcctcatccacagctaaagtctcctgccttgcaaagatgtcctccgtatctgtcagaagccggtctgtctcctcatccgtcaggtaggtctccgggacaagatacggaacaactttctgcaacacggcacgcagcaccgccggcgtcccatttactgtcaaagacttcacccgctcatctgcaggatccagcgccagcgtcagttcgtaacgctgaccgttttctgccgtataatcatagacacaccgcagcgtactcgtattgtaaatctcatccacgccattttctccccgttctttccggacagaggaataataagaggaggtatctgtttccagagaacagttaagtgccctctccagtaattccttcacggtcttctcatccagatagaaacaaccgctgaaatatttgcttcccgcattccggaacctccaccttttgagcatatcctgcggaacatcatagtggatgatttcctcctgccccgaagcatcggtatcctttgcatacggtgtcagttttctgagcatgctcacatactccggcgtttcctccagaagcgcttcatatggatgacggtctgcctctctgcgcgccatggcaagccgaaaa

SEQ ID NO: 2321 - DNA, 7781 bp, Unknown
  16S sequences of unknown bacteria
gatccacatgtcactcgcctctgccgcgcagatgctcatccagcgcattcaccagatccctgatgttgcgcaggcgaacattctctgcccgcttagggaaagcggcgtgaagacggcggcgcgtatgccgaaacgcgctgatgcgctgatgccagttctgctgcatccgggagagcgcctcctgcagccgctcatcggcatccgtctgatccaggatggcctggatccgggcgctcagcggctcatccagggaatacagctggaagcccttgaactggacagccagctccttcaggctgtcctccaccatgcggtaatcgctgttctcccgcagggtggcatggaaagtatggatattgtcccagatgaacaatatcagcagcacggccgccgtgatcaggcgggccagggcggggatctgctcgaacacatcgcagatgaacggatgcaccacatacatcacggccagtcccatgatgccaaacagcagtgagttcaacaggcagacgcgcccgttgatgttgaagggacgctcagaataatcccaccacttgctgtgaaagagcttttccatcagccagctggtcacatattccagcacgctggtaaagatcatcgcgcccagaaacagcagcagcggatgacccttcagcggatcgagcacaaggatcacgatcagcgcgccgcagccgtagatcggacaatatggcccttccaagaagccgcggttgatgaagcgccgcgcagggatcccacaatacaggcattcacatgcccatcccaggatgctgtaagcaaaaaagtaaagaacatgattgatcatcgtatcactccatagtcgtatgttcgcttttatcgtctgatttattcgctttctgctgcgaaaccgccgttttcttcgccgatcatcgcttagcgcgccggtaaccggccgcctgtgcttcttcctccgtatcaaacaagatcagattgtccgaatcggccatatcctcataagccgcctgtcccggacaatgatagatcttcgaacggcggttgccgcggatctttccttccgtctgtggctgttccggttcctcttctgtctcgatggcgcggctttcgccggtcgcataatcgatctcgacgcccggctgcacgttgaacacgaagacgttgaactgcacgccggccccctcatcctcgattgactctgcctgcatatgcacaccgcgcgccaccagatcatcatccgcaaagatcggggtcacttcatataagacatggttgccggtgctcttcacataatccgcgacctcctgctcaaaaggcagcatgccctcggtgttcatataccgggtgccggtgatcaggtttcgcgcattggcattctccgccgtcagctgataagcgatcagatgacagcggttgtacagatattgcccatccacatggtcataacggaccgtatgccagccgctcggcttgatcatgccgatgctgcctcgctcctgcgtaggcatcagatctgatccgacgcaggcaaacgcgcgctgacagcgccccagatcatcaagctcctcatactgctcaaaagaagaggcttcctcccactgcggcagctgcggcacattgccgttcagctccacataaggtcctccttcatattccggtatgtcttctctcagcgctgcttcgctctgcagctgctcgtgcgccgcagagggctgctcgacctgcgcgccgcagccgctgaggcaggcaaacgccaggatcagcgacaacagcgcctgtatccgccgatgcttcttcattcttcatcctcccgtcatttgcattaatgataccttattcccgacagcttctcaaccacccctcgccaataaatatacgcaagacagacacatcatcaaaaagcgcgatgcgcccatcattgctcgatgagcgcaccgcgcctgtgttcagcggtcacgactgcgggtcgctttgcacccgcacgatgccataatagatgcgtgaagtcatgaaatagatcagcacatagatgaacgcaaacaccgcgaagcagatcagcgtgcagcagacaaacagcgatgtgttcgtcagattcagcagcaacagaagcttctctaccatcgggaatgcgaagacgatatggatgccggcagcgatgagcggtaggaagaagaccgtgagcacctgagagcggatgaccttcttcacctcgcggtgatccatgccgaccttctgcatgatctcaaagcgctccttgtcctcatagccctcgctgatctgcttgtaatagaggatcaggatggtcaccatgaggaagaggatgctcaggaatacgccgatgaacaagaatcccccatacatctcctgcagatacgcatagttctcgctgcgcgattccagcaggacaggctgatcgagctgctgcagcgaagcagagagcgacgcggcaagctgttcattctgctgtgtggtgccgtcagtatcaaatgcggcataccactcgatggcagaggcgttcgttccataagctgcgcgctgcgcctcatccagctgctcgacgacctgcatatcggagacgatcacgaaatagctgtccgtgagccctgcagaggagaagccaaaatccatgaatgtatccagatggtctgcgaccttgaagtgctgtcccagtatcgaaaacgtctcttcttcataaggcgcgcgggaagcatagaccagcacctctcccgcatccagcgtgcgtgactccccgctttgggcattgtaatcggaaagcgggatgaaatagacgacggccacctgatcgatgctggacacctgcaccttgctctggtcagtctcaaagaaatcgccctggcggaccgcggagagccccagcgaggtgtagcgcagcggctcatgcgcctgcagcccattctgtttcagcgcggtctcgatgcgcgcatcgatctctgctttgctctgtgcatcatacgcctcgctgctcaccgcgatctctcgcgggtaacgggtcctcgccgcatcatccatgcccacccacagggagatcgtcgtcgacagcatgacgagcaccatcgtggagaggatgcagatgttggccagcgacaccgcattctgcttcatgcggtacatcatcgtggaggtgttgatgaaatgcgtcggcttgtaataataccggcggttcttcttcagcagcttgagcacagcgatgctgccggaggtaaacagcagatacgtgccgatgatgaccagcagcaccgccacgaagaacagcagcagcgcattgagcggattcttcgtcagcacggcgatcgcatagccggcgccaaggctgatgagccccagcagcgccatcagccagcgcgccttcggctcacgttcgccataggagctgccatgcagcagctggatcggattggccagacggatctgccagcgtgagctcaaaaagatcagcaggtggatgatcgcaaacaggatcagcgtcgtgcggatgccttccacagagatgttgaacgtcagcgcgccgcccccggccatcatcgcgcccagcgcataatacagcagccgctccagcacgatgcccaggctgatgccggccagcaggctgaccagcgcggtaaacagcgtctcataagcgatgaccttgctgatatggcgcttttccatccccaggatgttgaagacgccgaattccttcttcctgcgcttcatcaagaagctgttggtataaaacaagaagatgatgacgaaaaagccgacgatccatgttcccatctgcagcagcgtacgcatatagcctccgcccagcatcgtatccagatcaggattgagcgacagcgaacagatcacatagaacatggccgtgctcaagatgcaggtgagcagatatggcacatatgtacgtccgttgttgcgcagattgatcatcgcgatccgagggtaaaacaccttattcatacagcctgcctcccatgctgatgcgggtctgcgcctcgctgatacgctgatacatctcatcattgctgcagttttcacgatacagctgatggaacacggttccatccttgatgaacaataccctgccggcatggctggccgcctggatggaatgggtgaccatcacgatcgtctgtccgctgacattgatgcggtggaacacatcgagcagatcctcggtcgatctagaatccagcgcgccggtgggctcatcagccaaaataagctgaggatcggtaatgatcgccctggcaacggcacagcgctgcttctgtcctccgctcacttcataaggaaacttcggcagcagctcatagatgcccagctccttggcgatcggctgcagccggcggttcatctcttcatatttcatgccggagagcaccagcggcaagaagatgttgtctttgagcgaaaaactgtccagcaggttgaaatcctgaaagacgaagccgagatgttcccggcggaacgccgccagcgtccgttcagggatacgcacgatattctgtccgttaagcagcacttctccttccgtgggcctgtccagcgccgccaggatattgagcagcgtcgtctttcccgatccgctctctcccatcaccgcgacatactctccctgctccacatcgaagctcacatcctgcagcgccgtcactttgcttccgccgaaacgggtcgtatatacttttttcagatggctgacttctaataatttcatgatcatttcctcctgtctttgatcttacaccatcagtataaacttcccttgcttaccgaaccatcgcttttccttacactccggtaaggaaaagcgcagatgaaaagccggcatctctgccggctcactctctcatcggtatacgctgcagatcacgcgcgcacagcggcgagcgtctcatccgcactgacatcggaagatgcggaaaccagcacctcctcatcggcatcggcgcagatctcggccgcatccgtctcatccatggaccggctgagcgtgtacgcctgatcttcccgcggctcctcctgcgccctcatccgcatctgctcatcctcaggatcctgcggatccggatgtgcggtgaggacggtaaatccttccgttatgctctgattccatccccagaagcaataaagcccgacacatagtgccacagcgcagaacagcgccgtccaggcatttcgttttctcatacatgatcaccagcttcattgtaacgatgcgatgagaagaacaagtgaagaaacgctgaacggcggctgaatcagaattcgcgtcgttccatgatccgcacgctgatggtgtaggacaaaagcaagatgaacgcactgaacgcgatcagcagcgccgcgcacagggccatcgacatcggcggaagcgtggcagcgagcacatccagcgaccccccggccgcctgcatcgcaccgctcaccgcgccgatcagcgcaaacacagccgctacggcgatgaccagcgccatcctgctgttctcgctgccgaacttcagcttgaacgggatcatcagcgcaatcagcacagcgagcatcggcagcaccatgaaggacgccgcaaaccaggaaagctgaggcagggcgccatcagagaagatgcagctgcctgcgctcagcagcgtggtcagcacccaggccgcggccccgctgagcaaagcgagcacatacttttcccgcacatacagcttccgggtgatcggcagcgtgaacaagaacggaaagccgttgtcaaactcatcatagctcatcgtcgataagataaacgacgtgaagatgagcgtcatatacatgatcacgaacatcggatcatccatcgccgccaagctcaccagcgccactgctgcaagcatgatcagaaaattcttctgcaccatcatcaggcgcaggtccttgcagatcagtcctctcatcgctgttcacctcggatcatcatcgtgatcagatcatcgataccgccgttttcgatcacgatctgcggcgcattctccgcgtaatactgcttatgcgtgcacagggcgcggtatccatacggctctttgcgcacgcgcaacagataagaacggtccaccttcgcatactgctcttcgctcatcttgagcagcgcgtaatcagacagaagcacatctgtatcctcatgcaggatgatctgcccgtcgcggatcagatagatgtcgtcgcacaagctctccagatcggtcgcgatatgcgagctgatgacgatcgcgcgctgttcatcttcctccataaatgacctgagcagatcgagcagctcatcccgggcaatgacatccagcccggctgtcggttcatctaggatgagcagccgcgcgtgatgcgtgatcgcgcagatgaccttcagcttcgccttcatcccggtcgagaacgagttgatccgcttgttcatgggaacctggaagcgatgacacagcgccatgaactgcgcctcgtcaaattgcgcatacagccgcttcagcacagcgcgcacatccttcacccgcagataaccgctgaatcccgaatccgaaagcacgacgcccagctgctgtctggcctgcacatcacagcgctcgccaaacatccgcactgtcccgctgtccggccggatcaagcccatcgccgccttgaacagcgtgctcttgccggcgccgtttgggccgaccagtgcgctgatcatgcccggacgcacatgcaggcttgcgtcaagcagaaaatctccatacttctttttcacctgttccatttccaacatacgctaatcctccaggatcagttcaaccatttccctgatctcttcatccttcaatccgcagcgtctgcctttctgtatggccatttccagatcagcttccacatctctgcgttgttcctccatcaaagtctcctgattggccgccgtcacatacgtgcccttgccgtgcacgctgaccgtgaacccttccgcttcaagtgtgtcgtacgccttcttgaccgtcagggcgctgatcttcagatcccttgacaaggaacggacagagggcagaatgtcatccggcttcagttcgccgctgacgatcatcgctttgatctgatccacgatctgctcatagatcggcaccatcgatgacccatttacgatcaatttcattcctaacctcctctgttcataaacagtgtataacagtatataactgttgtcaactgttatatgctgtttattcacaaaaaaactgaacgatatgcatcctgtcagacacagaccgttcagtcaatcgtttttctttcctttgcggcagattatttttccttgccgtcaaagcagtatgtgcacagcttgcatttcggcaggccgatggattccaccatgtcgtcaagccgatggaagcgcagagtggtgaaattggaacggcggcggatctcctcacacatgttcgcataacgctcgctgttaggatccgcgtattcctccaggatctcctgcgagatctcgttgccctcttccagatccgcgatcacccgccgggtgatcagatccatctctgagctggagcgggagaaattcagatatttgcagccgaacatgatcggcgggcatgccgggcgcacatgcacttccttggcgccgctgtcatagaggaactgcgtcgtctctcccagctgcgtgccgcgtacgatggaatcatcgatcagcagcaggctcttatcctcgatcagctcctgcaccgggatcagcttcatcttggcgatcatgttgcgctgcttctggctcgtcggcatgaaggaacgcggccatgtcggcg

SEQ ID NO: 2322 - DNA, 12108 bp, Unknown
  16S sequences of unknown bacteria
gtgtagtcccttgtaaactgtactttcccacacttcaaaacgctgaaaatattttaacttttttcgtaaattcgcttgacttaagcaatgaccgaaattgttttaaagggtaccgaatcacgctgcccgctctgaataccaaccaaatcatttatcagcttagaatagactgtatatacctttcccctcatgttccggcttccctgagattctgcatattctactaagtttgctaacatgtctgtttcgcagcggcgaatcaattttccttgctttcgggttaacagccattcagaagatcttcgctcttggataaacgcctccattttgttgaaggcatcaatatatttcagtttccattccagcgtttcttttcctgtaaaacccatgacaagcagagaaaacccgtctcggttcataaggtactctttatatgcccttccgcgttctgtttcaaaatataattgtaaagaacaaattgaatttagttcgtgcagttgggaatatggttggaatgtaaaattcaaaaaatcaggtaagaccttgtgcacgatataccccagagaaaattattttaccgttttagttgttgtaggtaaaaaagaaaaagacgctgtcaaagctatcttgcaagaatttaatccaatattaagagatatttactgccaaaccaaagatggaaatggtcaaagatggctcatgattgatttagaagataaagcgaacatgtattcagatatttttcgccttattgatattcgcagaggttgacagttttaaaataatgaggacgaatataatcctgtggataatgaagcatacatatattccagtttattgagcagttgctatctgtaaatatacctccctttgtcatttcgaagaagggaggttgtttatatcctaaatcagttcaaagggtaaaaggaagtccaaatacggtatgagagttattcctgccttgccttatttgtttggtataaaaagggccttttccgcaaacaatagacaaccaaagggggtcttttaatgctggaaaaaatactgggaatcctccagccggaaaaatccttcgacctggttcgccgggatatggagattgccggccgaccgtgtactcttttatttgtagatggtatgataaaagatgaagtcatggaaaaaatgctggagtatttcctcaagctggaccattccgtttgggaccaaaccccggatatgcaaagcttttcccgcagaattatcccatacgtggaggttgcagatgaggatcagctggatgccgcctgcacagcgattttatcagggaatctgggtctgtttattcaaggcttttcttcctgtacgctgattgatattcgaacctatcctgtccgcagtgtggaagaaccggaaaaagataaggtcctgcgtggaagccgcgatggctttgtggaaacagtggttttcaataccgctttgatccgccgacgcatccgggatccaaaactgactatgtcaatcctttccgcgggtgaaagttcccatacagatatcgtggtttgctatatggagaaccgggcagatctggaattggtacagcgggtcaaggagcggattgggcatatcaaggtacaggggttgattatgagccaggagagcctggcagaagcgctgatttccagcaaatggcgcaatccctttcccaaaacacgttatacagaacggccggatactgccgctgccgccttgctggagggccgcatcatcatcctggtagacaattccccctctgctatgattctgccatctggcatttttgattttttccgggaagcggacgactattattttcctcccattaccggaacgtatttgcggattacccgtatcgccatttttctattaaccctgtttttaaccccgttgtggcttttgttggtggaacatcctcagtggattcctccgtggctgtcctttatcggtgtgtcaaaacccaatggcgtgccgcttttagcacagctgctggtgctggaattcgctgtggatggacttcgtatggcgtctaccaatactcccagcattatgagcaactccttgagtattatcggagcgcttctgctgggagattttgcggtccagtccgggtggtttgtgccggaaaccattctgtatgcagcctttaccgcaatcgctaattatgcccagccaagcctggaattgggattcgcctttaaattcatccgattggggcttctgatcctcactggttgctttggactgtggggctttgcaggtggaatcctcctgtctttgattctcctatgcagtactcgcacgctgtcgggcaaaagctatctttacccgctgattccctttaatgcccgggattttaagcgcacttttgtccgccgtaagctggaaaaccgctaaacgacaaaacaaaaagccgtggaaaaaccacggctttttataaatcgaatcgttatttttttaccggaaaaattttgcctaatacaaccaccgtcagaataatgaccgccacagcgatgaaaattcccagcataccgtagcccatcatgggcagactttccagcaaagcctgtacgttaaacatggtaaaatcctccttttacagtgcgttggaaaccaaggtaatgattaatcccccagcgataaccgaagcaatctggccggacacattagccgccgccgcatgcatcagcaagaagttactggggtcttctgccagccccattttatgtaccacacgagaagacatggggaacgcagaaatgcccgccgcaccaatcatggggttgatcttctttttagagaacaggttgaggaattttgcaaacagcacgccgccggcagtgtcaaagataaaggcgattaaaccaaggcccataatcatcaaagtctgcggattcaggaaagcctgccactgcattttggtggatacggtaagacccaacagcaaggtaatcaggttcgccagttctttttgcgccgactgggaaaggctgcccaatacgccgcattcccgaatcaggttgccgaacatcaaaaagccgaccagtgctaccgagcggggcgcgataattccagcaattacggtaattagaatcgggaacaggatacgaaccggtttggacactgccgaagccgcataatccattttgatctgccgctcttttttggtagtaatcagtttgataaccgccggctgcacaattgggaccagcgccatgtaggaataagcggcgacaatgattgcgccaatataattggagttaaaatactgggacacaaagatagaggtagggccgtctgccgcgccgatgatcgcaacagaagccgcgtcttccaacgagaagcccaaaaaccgcgccaagctcaaggtgaaaaagataccgaactgagctgccgcaccaaaaagcatcattttggggttagcgagcaaaggcccgaaatcgatcattgcaccaatgccgatgaacagcaaaagcgggaacagctcgttggcaatacctgcgttaaacaacacgtcgattgggccgtgttccactccagtaggataggcctgatccaccgcgccggaccagggcaggttaaccaaaattgcaccaaagcccatgggcagcaacagagtaggctccatttcttttttaattgccagccagatcaaaaggccgccgataacccacatgaccaccatctgccattggatctcggtcacgttgctgaaaagatccgccatttgtaaaaactcctttcccgccgcgctgcggcagtgaaaacttcttcgggaaaagcaacaaaaaagacttttattatggacgaaacccataataaaagtcttgcaacttagagtatccgcggaaagtgacttcggattgacgcagaataccacagcacgcatgctgtttgctactcccttttacctattgcattataaaaaaacgcgcaggaaatgtcaagcaaagatcttttaatgcgcgcttttgccggcgtatttttccaaaagtccggccagcatttccacatccacactgttgtccttttgatatttgaccttgtcaagcagctgtttgagttctttgcgcttcaatgtgggaacagaagccttcacatatacctctgtcttttttctggcgccggcaaaaaccaccagatgttccatctggatattataaacattatttttcgcgaaaatacggcgtaccgtatcgatcccctgctccccggcaatcagcgggttgggaagatatgtctttttgccgtctgcgtccactctactccatttttcgtcccgctgctgcccataataggcagcggattccggcaggcaggtgaaaaaagaaattccataaaatccgatcagcacctgatcaaaatgggcggttctgccatccaattccaaatccaggtctgtcagaacccgaaactgccggatcgcagcgtagcgtttaagaattccaacgaccttttttcggcagaccttgggattggtactgcgccggatcatccaaagaatcagcaaaaacaccagcgccaccgccgtaaggcccaacgccagcattgtctcatttgaaaggttccagttcggcaaaacgcatcatcctttgtcaaaaatcttccgtacggcccgacttgcggccgattgtattagtataccattttcccagcagaatctcaagggtcaatacccaaaaggcccctccagcgattcatccttttcaatccattcatccttgacgctgatcactcggaagtgttctttatcgtcccggacaattaccgtatcaattccggcgttgataatcatgcgtttacacatggcgcaggagttggcgttctgcacatatgcgccggttgcacattcccgtcccaccagatacatggtagcgccgatcatatccgcccttgcagcgtggatgatcgcgtttgcctcagcgtgaaccgagcggcacaactcataccgctgtcctctggggatttgcagcctgtcccgggtgcaatagcccagatcggtgcagttggccctcccacgcggcgcgcctacatagccagtggaaataatctgatcgtttttgacgatgatcgccccgtacaaccggcgcatacaggtgccgcgggtcagtacggtttccgcaatatccagataataattggttttgtctcttcttgtcatattgccgatccctccctggaaaaaggttttacctttattttatatcataaaagatttttttcctcatttcaatggagattttgtaaacggaaagagaatgtgataaaatgaaagcagaatcgcaaaattcccaaaaaacggaggggagcgcccttccagaggaggcaacgtatgtcccagctttccaacatcaaaaatgtaaaggagatcttggcccgtcacggctttactttttccaaaaaactcggtcaaaattttattgtcaatccgtcgatttgcccacggattgcagaactgggcggcgccggccccgataccggtgtgctggaaattggccccggacttggagtgctcacctgggaactggctgcccgcgcccggaaggttgtcgccgtcgaactggacgagcgacttttgccggtactgggagaaactttggcaggatttgataacgtcaaggtcatacaggcagatgtgctgaaaatcgacctcgacgcattgctccggcaggaatttcccaacatggaagtggtcatttgcgcaaacctgccttattatattacctctcccattgtcatgcgcctgctcgagacgcggctgccggtcaaagcgattaccgtgatggtgcaaaaagaagcagccgcccgtatctgtgcagcgccgggcagccgcaatgcaggcgcactcagcgcagcagtcagctattatgcagttcctcaaattctgtttccggtctcccgcggcagttttatgcctgcgccggaggtggattcggctgtgattcggctggatattcggccgcagcccgccgtatcccccgtggacgaagcgctgtttttcaaggtgatccgggccggattttcccagcggcggaaaacgctgtccaattctctttcttccggattgggccttgccaaggatcagacctcggctgcgttgcagcaggcgggccttcgcccatccgctcgggcggaggaattgacgctggaagatttttgccggctgacgtcgcaaatttttgaagatcattttgacaaaaaagtttaaaaccatccgatgttttaggcataatttgttcatatttatatgttattctgaaaatacagagaaggaaatctgccggcgttttttcaaatcgccgacaaaggttgggccaaaaggcctgcgggagattgacactggggagcggtttccccggcgttgcggaacggaggtataacaacatgaaccgtctgacgttgtcagaacagacacagcaccccacaaaacgtcacaccatcgtttgcgttaccaaccaatttcactgcgaaaggctgattcgtgccgggcggctgattgccgagctttccaaaacatcgctgttggttatcaatgtttccagccccgacttaagcgaaaatgatgccaaagcgctggaatatttgtttcaagtgtccaaagaaaacggcgcgcagatgacggtgctgtattccgacgaacccatgcgccagctgataaaatttatcaaggagaataaggcggtcaacgtggtaaccggcatggccgcgcagcaaaattctcccttgcctgacctgtggcgtaaatttaccagcgcgcacttttttacggtgacagaggacggctctttttcagaacaggaaagcgctcagtcgtcccatatcgcataaaagtttcggcggcgggcgtcacagcctgccgcttttcgcttacccaggtcatttctgcttttcggaaaggagcgaaccaatatgcatgatgaaaaaaggactttttccttctccagcgccgaccaaattcacaccatccaggcggtcacctggtacccgaccgaacaaccctgccgggcgatcatccaagtatctcatggcatgaccgaatatttcgggcgatatgaggattttgcccacaatatgacccaacacggctttgctgtttccggccacgaccacctgggacataaaaccagcgtgaacagcgacagggaattgggttgcttcgcggaaaaagacggatggaaattggtgattcaggacctgcatactcacaccatggcactgaaaaaggcatatcccaatacaccggtgtttttgctgggacattccatgggatcatttatcgcccgctgttatctggcacagtacagcgatttgctggatggtgggattattgcgggcaccggcggcccgaatcccggtgcaaaggcaggaaaactgctggcccagtgcctgtgccggatcgggaaaggaaaagaacccagcccgcttctgcaaaagctggcgttcagcagctataacagccgttttgaagggcggaccccttatgactggctgacccgcagtacgcagattgtggaccaatatgccgcggatccttactgtactttcctctttaccgcgtcaggctttcaggatttgtttactctttacgggctggccaatgacctgaagacctatcgggcagttcctaaaacctttccgctgctgatcatctccggcggcgacgatccggtgggaaacaacggggagggcccacgcaaggtagcggaaatgtttcagcaaaccgggcatattgacgtaaccctgcgtttatatcccggcggaagacatgaaattctcaatgaaaccaaccgctgtgaggtatacgatggaattgccgcctgggtaaaacggcggatttcataacagaaaaaaacctgcagtggggcggatatccatcctacagcaggtttcttctcgttattttattgcttttttgaagataaaaagcgatctgtttgttaacattgataatttttttacaaattatccagatttacatgttaaagtattgacaattgcagatcaaagtactattctaaagacgaatttaggggattgtgtcctctgtcccttaaagaataactgcattttgcaattgccggcagcaaaatcgcaaagcgcaaccggaaaacaggcctttgcttttcgggctttgtcatgtagttatattttgagaagaggcaattctcagtaaaggagtcctaagacatggacaacaaccaaaccaaaagcagcggtttgaacaaaagcttaaagctgatttttgtttacactgttgcaaccggttccatttttacctttgtaaactattgggattcggtgttttatggctactgcggaagcggtacttttctggcttttgccctgatgacaatcgcgattttaccagttgcactggtatacagtgagctggcctctctgttccacacttcaggcggcgaactgatttataactcgattggcatcaataaacatgtagggtttctggcttcctggttaatcatggcagcttggatctcggttcctccggcagttgtaatggcaattatgacttgggtaaataaaacgtttaacctgaacctgggtgtttggcccattgtcggctgcgcagcggtcttgctggttctgtacttcctgatgagcattcagaacgtacagttcctggtaaaagcgcaggcggtcatgttgttctgcaatattaccgttaccgtcatcaccggctttatcttcctgttctccggccattggcacatttccaactttggaaacatcttttcctctactctggattctgtgaacggcatccctggctggatcatcggtatggcattgctgatcaccccttacttcgggtttgaaaccgttcctcagatggtggaagaaggcgacttcccgatcaaaaactccaaaaaggccatttgcggttccattctgacctgcggctgcatttacgtattctattatttctgtgtcgccgggctggacggcctgcaggatgtttatgtcaattttgcacaggatggatttttgaccattgccaccatgcagcagcagctgggctggacattctggccgctggttgttggtctgctctcctgcctgctgggcatgggcgcttctctgctgggattctggatgtctactgtccgtatgctgtattctatggcaaacaaaaacttcctgccgaaagtttttgccaaggtaaacaaaaaccagcaaccgattctgcccaatgttttcctgctgattctctctttgatttttatcgtactgcagaactcttctgactttatgagtgcattcttcaacctgatgagctttggttgcgcctgtgcctatgcccttaccatgatttcggctgtgtgtattcatcacaaatacccgcattggaagagcgacaatgcagtaaaaggcggagacgctttccgtattctggctatgctcatcgctgttgccattgctttcttctgcactctgggccaggggatagattcctggatctgctttggcgtttatttgggaatcggcgttttactgtggctgtggatggttttggtcaactggaaaaaacacccggttgaaatcgaaacacccgatggcatcaaacagctgtaagccctcttattccatttgttttgagggagatgataaaatatgccgaagcaaaaaactgaaactgcgccttctggcggattgaaaaaaagtttgcggctgatttatgtatatgccattgcagctggcgcaatttttaccttcattggttattgggacaccattttttatgaatactgcggtgccggcacttttctagggttcattctgatgaccctgctgattctgcccattgccatggtatactgcgaactggctcccatgttccccaaagcgggtggcgaactaatttacaatacggtaggaattaacaaacatgtgggctttttctcctcctggttgattatggcggcgtggattgccgttccgccgtcggccgttatggcaattgtgcagtggctgttccgggttctccacattgaaacgaattttctgctgatcgaaattgtagcgttggtctctctgatcgggtattgcattttgagcctgcagaacattgaaatcgccggcaaagtccagctgtatatgctgatgtttgccattggcggctgtattgttgccactatcgcgttcctgttctccggtgtttggagctgggataactttaaaaactttttctatagccaggtagacagccagtggggcattcccggctgggcgattggtatggcgcttttgatcacgccgtttttcggttttgaaacggttcctcagatggtggaggaaggcgatttccccatcaaggattccaacaaggcgattctgggttctattgtttcctgcggtattatttatgcgctgttcttcttcggtctgggcggtatgccggttcaggctttggtagaagaaggcggtgctgctaccggcggatttctggccatcaccatgatggaacagttaggcggcggttggggagtttttgcagtgattttcggtgtcgccgcaattctttgcgccatcggcacctgcctgcttggtttctggctttctactgtacgcttgatgtatgcgatgggagaaaacaatttcctgcccagggcctttaccaaactcaataaacatcatcagccaattttgccgaatattttgctgttggttatctcgttggtgttcttgcttttgcaaaatgccaccacctttatgaacgatttctttaacctgatgagctttggctgtgcttgtgcttacgcgatcaccatgatctcggccatgcggattcacaagcgttatccggaaatggtttctccttataagctgcgcggcggaaacattacccgtgttgcggcgttgattattgcgattgtgatcgctttcttctgtacgttggggcaaagtgccggctcctggaagagctttgcaatttatctggggatcggcatgctgctgtggctgtggatggtgctggtaaactggaaaaagcggaaggtcaccattgaaaccatgaaagggccaatggatttttagctttttgttgctttgaaggcattatcatgccttatacataattttttgcaaaggagacttatcaaatgggtaaactggatggaaaagttgcactgattaccggcgcagccgttggtttgggcgagggtatctccaccgcttacgcaaaatatggtgcaaaactggttatggtagatttggatccgaaagtagaagaaaccgctgcacgcctgcgcaaagaatacggcgctgaaattgtaacggttgttgccaatgtagcagaccgtgagcagatggatgccgccgccaaaaaaggcgccgacactttcggtgaaatcaatgttgcttgctgcaacgccggcgtttgccgtctggctccgtttgaagagatggacgacaaaacccgtgatttccacatcgacgtcaacatcaaaggcgtatggaacacctgtaaagcagtgattccctacatgctcaaacaaggcggcggcaatattgtcatcgcttcttccgtaaccggcgacatcgttgcagatgcgggtgaggctgcttacgcaatgaccaaagccgctttggttggtttgaccaagtgcctggctgttgagtatgcatcccgcaacatccgtgtcaactgcagccagctgggatacgcccgtactcctatggtagagaaaatggcagtggagtccaacccggacgatccggaggcagcaattgccgatatcgctgttggcgtaccgatgaaacgtttggcgaaaccgatcgaagtcggcgaactgttcgctttcctgggaagcgacgagtccagctatctgaccggttctcaaattgtaatcgacggcggcagcaccttgccggaaaccatgtccatcggcaccaactgattgccgacgacaaaagcagaaaaaattaatataaaaatggccggtgatagcatttaccggccatttttatattctttttatcggaagaacttccgcatatatcctcgtaaaagaagggcatttcaaaatcgtgcgaattggtaacgccatacgcatttccaagcggtcatttgac

SEQ ID NO: 2323 - DNA, 13012 bp, Unknown
  16S sequences of unknown bacteria
ccgttagccgatgcgaacgtgactttttgcggaaaaggaggagcaagggagcgggcggatgattttctttgaaaaagaaaatcggagcaaatcgtactttgctccgacgtggtgcgagaaacaggacttgaacctgcacgtccttgcgaacactagcacctgaagctagcgcgtctgccaattccgccattctcgcaaatataaaattgttggtggatgggggtggattcgaaccaccgaagtctgagacggcagatttacagtctgctccctttggccactcgggaacccatccatataagcaatgtaataactggtggagctggtgatgggacttgaacccgcaaccttctgattacaaatcagatgctctgccaattgagctacaccagcaaagtggggaagaagtggcgacccggatgggtttcgaacccacgacctccagcgtgacaggctggcattctaaccagctgaactaccgggccatagaatggtgggccctcagggactcgaaccccggaccaatcggttatgagccgaccgctctgaccaactgagctaagggcccaagggcgaaatggtgacccctaggagactcgaactcctgttaccgccgtgaaagggcggtgtcttaaccgcttgaccaaggggccattactttgtgttggtcggggcggagggattcgaacccgcggcctcctgctcccaaagcaggcgcgctaccaaactgcgccacgccccgtcgtggagccgcaccccgcgcgacaagtgataatatacagcataaaacacttcgtgtcaagcctgaaatcaaaatttttttcatttcatcccgcaaaattatcttgactgcttcctgtttagaaattctgccttttctggtataataaattgttaaatagacataattcgacaggaggattggctgtgcctgaaaataatcaccgtctaacaaaagggacgtataccatatatacgtttggctgccaaatgaatgtaagggaaagccagacagcacagggtattttggagcaggaaggatatgtgcaagccttatctgcagagcaagcggatgttattttgttcaacacctgctgtattcgtgaattggcagagcaaaaagcctggacagccattggtgcaacaaagaagataaaagagaaaaatccgaatgcaatcgttggcgttttcggctgtatgatggcagaggaaggcagcgtaaaggagctcagaaaaagatttccttttgtggattttgcattgggaaccaattctctgcacgatttgccggaggcgctgcataatgcggcccgcggtataaaatccagaaaagcagtaattggcgatgccggccaggaatttgatctaccggcgcaccacaatgaaccgccgctggcctatatcaatatcattcacggttgtaataatttttgcacctattgtatcgtgccttatgttagaggacgggaaaagtcgcgtcctctatcgctgattttgcaggaggcggcgcagcttaaagcacagggatataaggaaattatgctgctggggcaaaacgtaaacagctatggcaacgattggaacaatgggcaggattttgctcatctgctgcgcgaactggatgccatggggatagaccgcattcgatttatgaccagccatcccaaagatctaagcgaggaaatgattttggcgatggcagaatgcaagcatgtatgcaaacagatccatttgccggtgcaaagcggcagcaatgcaatactcaaagcgatgaatcgaaaatatacgcgggagcattatttgatgttggtgaacaagctgagagcagcgatgccggatataggcattacaacagatctgatcgccggttttccgggggaaacggaacaggatcatcgcgatacacttgcactgatggcgcaggtgcgctttgatgcggcatttacctttgcctattctccgcgaaaagggaccccggcagccagcatggaggatgctataccgcaggaggtaaagcagcgtcgattgtctgaactgatcgaacagcaaaaaaatgattctcaaaaaatctatcaggcgttggtcggtacagagcaacaagtcttggtagagggtcacagcaaaaaggatatccaccaggcaacaggaaagattgatcgcggtaggactgtgaacttcaaccaagggacaaagccggcaatgccgggagattttgtgaaggtcagaattacccaggcaaaggcaaataccctgttcggggaacggtgttaggaggatttcatggcaaagctttcacccatgatgcagcagtatttgctgctgaaggagtcctataaagactgtatactgatgtttcgtttgggggatttttatgaaatgttcttcgaagatgcccaaacggccagcaaagagttggaactagttttaacaggacgggattgcggcctggaagagcgggcccccatgtgcggcgtgccctaccacagcgtaaacaactatataaaaaagctggtggaaaatggtcataaggttgccatttgtgaacaaatgacagatccagccacctctaagggcttggtggaaagggagatagtgcgcgtcatcacgcccggtaccgtcattgaggaaaatatgctggagcgagagagctgccggtatatcctatctgtattttggaaaaagcctatcttgggctgtgcttggtgcgatgtctctaccggcgagtttgttgtggatcaaatcaaagcggatggaatcgcgcaggcattagagcaggtcgtagggcagctagaccctgctgaaatcatcacagacgatgcaacctatttggcggcgttgcctacgttatcacaaatcaaagcaatggtaacgacccaaggtgcatggaatttttccaagcaaaatgctgaggagtctctcttaaaacagtttcatcagcccagcatcaaagagttggggttggaaaagctacccgtaggtgtacaggcagcgggagctctcagcacctatttaattcaaacgcagaaggtgtctttgctgcatatcaaccgccttcaaaaggccgatgacgccaacatcatgatgctggacaaaagcaccaaacgtaatttggagcttacgcagcctatgatgggaagcgggaaaaaagggacgctgtttggggttttggataaaacgcgaaccgcgcaaggcagccggctgctcaagcgttggatcgagcagcctttgcaaaatgcccaagccattgaacacaggcagaatgccgtggcatgtttttttgagcactttggtttgcgtgaacagattcgggattgtttggacaaggtatacgatttggaacgcctttgcagcaagatctcgtatcagacgctgaatgcaagggatgccaaggccatttgccagtcgctgtcggccgtacctgaaatcaaaagcatcttggccaaagcgggctgcccggagatcgatgcgattttaaataggctggatcctttggaggacctggtttccttaatagacaacgcattgattgatgatccgcccatttccgtccgggacggtgggatcattaagccgggttataatcaagaggtggatacgctaaaaagcgctgcaacggatggcaagcaatggctggcagagttggaagcgcgtgaaaaagaagaaaccggtattaaaacattgaaaataggctataacaaggtctttggctattatattgaggtgagcaaagggcagattgctcaggtgccgtatcggtatgtgcgcaagcagacgcttgtcaatgcagagcggtatatcacagaagagttaaaaaagatggaggagacgctgcttggcgcgcaggaaaagtgtattcggctggaatatgcgctttttgttgcgcttagggaggagatcacaacacatatccgcaccttgcagacaacctccaaggccttagcagagctagatgtgcttcaggcgttggcgttcgctgcctatgaaaacaaatatgtaagaccgaaaatcaaccaagaaggcagcattcatataaccgagggacggcatcctgtagtggaaaagacagtttccggctttgtgccaaacaacgtaaagatggatcaagaaaccgacaggctcttgattattacaggcccaaatatgtctggaaaaagcacgtatatgaggcaggtggcagtgattgtgctaatggcccatattggttcatttgtgccggcggattctgcagatatttgtttggtagatcagatctttactcgggtgggtgcttcagatgatctggcttccggccgcagtacgttcatggtagagatgacagaaacggccaatatcctaaaccatgcgacaaaaaacagcctggttctgttggatgaaattgggcggggtaccagtacatttgatgggctgtccattgcctgggcggtatcggagtacctatgcagcccgcaaaatgtaggtgcaaaaaccctatttgctacgcattatcatgagctggcagggctggaaggcacaatgcctggcgtaaaaaactattgtgttttggcaagagaaatcggggatgatatcgtatttcttcatagaatctctccaggagcgacagataagagctttggtatagaggtagctaagcttgccggtgtgccgaaacaggtcgtaaaacgtgcaagagaagttttgaataatcttcaggatgtcagcctgaatcctcatctacatacagaggaaaccgatgatgtggaaggccaaatgaaatttgacgcaggaaaagacaattcaaaggaaatcataaaacagctatgcagcatggatatgacgcaagtcacgcctatggaggcgtttgcgatgttgcatgagcttacgttgaaagcaaatggagtaaaataatgcggatacaattattagatgaatccacaagcaaccgtatcgcggcaggggaagtcgtagagcggccctcctccgtggtaaaagagcttatggaaaatgctttggatgcaggggctacctctatatccatagagattgccagcggcggcctttcgctgatccgtatcgcagacaacggttctgggatacatccagacgaccttcccctagcctttatgcgccatgccacagggaagatacgaagcggagactccctgatggccattgaaactatgggattccgaggtgaagcgctttccagcattgccgctgtatccagagttgctttatcctcccggcaaaaaggatgcgatcttggctcttctatttccctggaaggtggaaagattatagaccaggggccggtgggatgtcctgagggaacgagtataacggtaaaggatttgtttttcaatacaccagccagactgaagtttgtaaaatcgcccgctgtggaggctgccaaggtatcggatgtggtacttcgtgccattctttcccatccagaaatatccattcgtctggtaaataaccacaaaacggtatatcacagtccgggtagtgggctaaaggatgcgattgtttcggtatatggtaagcaggtggtgcatcagattctgcctgtttcctatcagcgcgacgcgctaaaaataaaaggctatattggggcgcaggagctttcccgccagacgcatgcggggcaaacgctgatcgtcaacgggcgagtcattcaaagcaagctattgtcggaagccgtacaaaagggatatggacaaacgttgatgattggccggtttccgttttttgttctaaatttggaaatgccgtatgccaatgtggacgtcaatgtacatccacaaaaggtagaggtgcgttttgcagatcctttggccatcagtaatagtatcacagaggcagtacagcaatcagtagctttgcagcaaaaagggcgaaaagagacagaaagcccgttttcctatcaggaaaaagattcctctgcggatgctttttcaggcaccacagcagatggaattggaagaaaaaggccaaacggatgatatggtatcggcttttaaggaggaagacgcacagcatttagactatacaaaacataccttatgggaaaatgagaaacagcgtcctgccagttttacttttcgccttggaagcggcgcttatgagctgcatgaagatgcgagtattatgccagtgcataccactccctttgatacagcaaagaaggaaacatcctccgttgaaatgacggcagagagaagatctttaggagagcatccgattgtattgggacagctttttgaaacttatttgttggttcaatccggacaggtattctatattatcgaccagcatgcggggcacgaacggcttacctatgatgcgtataaggagcagatcttacaaagcgaagtagtttcgcagcccatgctggtgcccgatattttgtctttgactttttctgaaatgacggcctttcaggatcatcaaaatgtgtttgatagattgggatttgacgtctctgttttcggtgaaaaggaagtgattgtgcgcgcctatcctttggttttgggaacggtttctttcgctagattttttacagatgtgttggatcatgtgctcaatggagaaaatgtacaaatgagcgatatggtaatgcataaactgatccgctctgcatgccgccatagcattaaggcaggcgatgcgctaagtcaggaggagatggaagtgttggtggataagctgcgtaatcatgagcatttgacatgcccgcatggaaggcctattgcaattcgcgtttctaaaacagagttggaaaaaaggtttggtagactggtatgaagcagcgaatcccgcttgtggttgtagcagggccaacggcttcagggaagactgatatggcgattcacttagcaaaaatatttgatggggaaatcatcaatgcagactctatgcaggtttataaagaactgaatataggctctgctaagccaagcatggaagagcgccagggcgttccccaccatatgatggacgtcgtatctgtaaccaacgaatatacggtcagtcagtatgagcggcaagcaacaaaagcaatcaaagatgtttacaatagcggaaagctttccatcatatgtgggggtacaggactttacattcgttctttgctctatagaatgtcgttttcaaacgctatttcggatgaaacaattagacgggaattgacagaatatgtcaacaaaaatggaaaattagctttacatatgatgctttctaaagtcgataagaaaactgcaagccgtttacatccaaatgatgttaaacgagtaattcgagctttagaggtatactgcattacagggataccgtttagccagcaggataacagtggcaaattcgaaaaaaaagatatttaccgttttattttaattgggttacaatggcccaggcaagagttggtaaagcgaatcaaaaagagaatcgaaattatggttgacaatggtttgctggaagaggcaaaaaaaatttacaatttgcatttgccatcatccttgccatctatgcagggcttaggatacaaacagctcttttcctattttgatggatcgtgcagtttggaggaagcactagaacaaactttcatacagacaagacagtttgcaaaaagacaaatgacttggttccgtcaccaggagccggaaatgcactggattaaggcagatgaaccgggggctgttattcaggcagaacaattggtttctgaatttatatctaatgattcggcagcaaggagagagaacagatgagattggcttcattattgggcgtatctgaacaggcagaaaatattctgttggaatgtgaaagggaagtagagccgctgtttacaaaggtacaagaaatggcgcaatacaaccaagcaaaggtgctaaaagcttttgctgattgtgggattcaagcggctcattttgtatgcagtagcggatatggatatgatgatattggcagagacacactggaaaaactgtttgccaaaacatttggctgtgaggatgcgatcgttcgccctcaaattgtgtctgggacccatgcgttggcgattgcgctgcaagggcttgttgagcccggacaaacgatatgctatgtgtctggtaagccttatgatacgttagaacaagttattggtatcgaggatacactgggatctttgatgcgtttgggcgttcattataagcaaattgagcttctgccggacggaagcattgattatgaggctatcaagaaagcattaaaagaggatgattccattgcagtggttgctgttcagcgaagtgctggctatgcatggcgtcggagcctgcatattcatgaaattgcactcttggcagatcttgtacatgcacaaaaccctcatacgatggtttttgtagataattgttatggcgagtttacagaggaacaggagccggtaggcgtgggcgttgatgcaatggccggttctttgatcaaaaacccaggcggtggaatagcgccgacgggcggttatattgcaggtacgaagaaagcgattgacagaatcgaacatgccttgacggcaccgggcattggccgagcttgcgggtcctatgaagcatcgtatcggccgttttaccagggattctttttggcgccagcagtcactgcaagtgcagtaaaaacggcaattttgttcgcacaggtattttctaggctgggatacgaagtcaatcctgcgccagaggcaatgcgtagcgatattattcaatccattgcatttcgtgcaccagagccattgctagcgttttgtcggtctattcagaaggcttcccctgtagattccatggctacgcctgagccctgggctatgccgggctatacccatgaggttgtcatggcagcaggggcctttgtacagggggcttctattgaactttccgcagatgcaccgatgatagagccctatatctgttatttccaaggcgggctgacctatgagcacggtagaattggctgtttatatgctttggatggtgttttaaaatccagataaagcaaaaaagaggggcagagcattagcactctgtcccttttttgttactttcaataattgcgcacaaggccgatgaccttgcccaatatttgtacttcatcaaagtacataggctccataagatcattttcgggttgaaggcgaatccggtgcttctctttataaaaacgtttacaagttgcttcattgtcaataagcgctacgataatatctccattttccgcaacattggtttgcctgactatgattttatcgccattgagtatgccggccttcaccatactttcccctttgatttccaaggcaaaggtttccttggtatcatagggaacgatctctttgggcatagccagatattcttcaaaattttcctctgccaaaataggcataccagcagctacctggcccaatagaggcacattgaccgcctgtatctctgcgggggcttcgagctctgcagcatcgttttcgatcagctcaatggcccttgttttggagggatctcttcgtatatatccctgcttttccaaacgtgccaaatatccatgcgccgtagaggttgatttcaggttcaatccttggcagatatcccgaacggcaggcggatagccatgctccttcataaatgaacgaatataatcaagcactttttgttgttttgcactgatacccatcgtgaaacccctttccgtttcgcgttcgttttcttggctctagtataccatacgaacatttgttcttcaatggttttttgaaacctttttttgaatatgatatactatttttcaagataggagggatttttgtgccgaaatgcactctatatgataaggaatgtgatctttgtggggaatgtgatgattattgcccttataaacataagctgtgtgataattgctttgaatgcttagatgagcccaccgaggactatgcaaaaattaccattgatgcgattctgatggatgaaaatgaaataaaaaaagggaagggagagaagagctaaatttatcttcctccttctccttattccctaagctttactttgcctgcagccattctgcgtttttcatcgctcatggcagcatagtgttttctcgttgtatttacatctttatttccaagcacatctgcaacaaggtaaatatctcctgtttcataattaagcattgttccgtaggtagaacggaatttatgcggagaaatctttttcaaaggtgtaacgatcttggcatatttttttaccagcatttgaatggccctttggctcattctttttttctgcatggatagaaacagcgcatgctcagagccctgaaccggaatgatggtttctcgtaccgcaagataatctttcacagctttttcaacttcttcaccaaagtataaaatgaccctggcgccgcctttccgtgtaaccacaaaactatctgccgagaaatcaaaatgctcaatatcaagccctaccaattcagagatacggataccggtgccaagcaacaatgtaaaaatagcaacatctcgaaggcgtgtgatttcgtgatatttttgctgtcgctttgtaagatccgttcctttttctacctcatccatcattttggccacctcatctggctcaagacgaatgataggtttttccttaattttgggcatatcaatcttctcagcgatattggcgggaatgcgttccatcttatatagatatttgaaaaacgatttgagagtagcaattttacgttttttgccggtatttgtgttctcgtattctcggccatcctgtcctttatagtaattcaagtattccaggtaacgctctagaacgataggccgaatggtggccaatacctcatcgttaatctgtgtgaatggcattgcataatacggttcttcattttcaattaaatagtggaaaaacaagcgtaaatcatacgcgtaattcagcctggtaagcaccgttgtagtcggctcaatgcctcgaaagaaatcttggcaacatggaggcagcgtttgtatcagtgtgcgcaaacgttccgttcgctgacgtgctatttttgtatgataagagatagacgtatctttcataagtaaaacctcattgatcgagaaaactattataatcatcatagcaaatatcgaaattttgtcaataacttttcgtaaaacatgagttttgcgcatagttataaattggaaaaaaggagagaatggcacttctctccttttttcctctttattttcgatgtgaagcaattgctccagtggccaatttgtcagcacgattgttatagggattgtctgcatgccccttgaccttgtgaaaacgaactgtgtgataatgtgtaagctccaaaagcttttgccaataatcaatattttccaccggctttttatccgcttttttccatcctctcgcttgccagcttgtcaaccaatttttggtgaaagcattgtaaagatatgcgctgtccgtatagacatccacatcacatggctcttttaagatcgccaagcattctatacaggcttgaagctccatcttattgtttgtggtatgtggatcaaaaccgctcagctcttttttatgggcattgtacataagaatgccaccccagcctcctggaccaggatttccgctgcacgcaccatcacaatagatcgttacttttttcacgcaattgtcccctattccttatagctgattgaatttttccgtgcaacgatctacacaatccatcacagccgcgcggaatccgcgatcctccaaggcctgtacggctactatggttgttcctgcgggcgaacagacggcatccttgagcgctcccggatgctcttttgtctctaaaaccattttagctgcccctaaaacagcctgggctactacacgatagccaatatgccttggcaagccccatttgcaggcggcatccgccaaagcctcaatatacatatacgtataggctgggctacttcctgcaactccggaaaaaatagcgatgtgcttctcttccagcacctctacctggcccatctgcgcaaatacgctttgaatatagatgaattcttcttccgtcaaatcattttctgcacatagacaactcatgccttccccaacaagcaatggcgtgtttggcattacacgcagaacgcgcccttcgttccctaaagaggcttttagttttacattggtccaccctgcaacgatggaaataaacgccttagaagcgtttacagcgggcctaatatcaaccatgacatcgcccaaatactgcggtttaacggcaagaaaaataatatcgctcttttccaccacttctcggttggatttcgctgcaacaaatccgatctcttttgcctttttctctagtttgttgggatccaaagcagaaacgatgatattttcgggctttgaaaggccggaagatagcatgcctttataaatggcacttgccatattgccgttgccaataaatccgattttcttatcaatgctcataccttttgcttcgatactcatttaccccgcttcctttctataggacagaatttacaatgtgcctttattatatctgcttgcagaaggtaaagcaagaaaaggaagaaatgcaaaagtattcttgacgaaatgcaaaaaaaatgataacatattctcgtttgatttaggggtatggtgtaacggtagcacgaaggtctccaaaaccttttgcgagggttcaaatccttctacccctgccaaaaatcccatttttgggatttttcttttttatgcatatgaaaagggtgccaatcagcaaccgctgaacagcaccctttaaatttcttttcttactttgcaaaatccacggcccgggtttcccgaatcacattgattttaatctggcccggataatcaagctcttgctcaattttcttagcaatatcccttgccacaaggatcatcgtttcatcggtaacattctccggcttcaccataatgcgaatctctctgccggcctgaatggcaaa

SEQ ID NO: 2324 - DNA, 6250 bp, Unknown
  16S sequences of unknown bacteria
atttttgcgcttatggattatttttttgcaaatttcttaagttggcagatatggggctgagccccccgggcaaagtcattgttcgtgcctgcgccggatgaagctcctgccacatcagacatagtgcgtcgggaaggttctttcttcgcggagttctgcgcctcgcgcttctcctcgtcctcgtcttccatcgtgtaagcgacctcaggttccgccatcatcatgcggctgtcgtcagcgtatgcgtcgccgtacgctctcgtatcctccggcggctcgtatccgtcgaactcgttcgttacctgtatgccttttctgagtcctgccatttttttcgtgttcctttcagttcaggtagattcaagcttgttcagcttttctgaactctggtaacattatagcacagcagaacgtgtcaccgcttgccaggatgtatcagaaagtgtcaggattttcaacaatgttacaggctatataatactatattttatcagtatgatacattactgtaagaaccgcaccgccggatgacggaagagacagtgattttcgggtgaggaaacaaaagcagggggggtgtattcgccgtgttcactgtgttcagcgtgttcaataaaaagaaaagggaccgctcccgcgatcccacgtttctatcgcttctcagacacataaaccccgacacggcccgcaatcacgtttattgtctcgtcaatactcttggacccctcgaaatacatctccgcttcctcacggattatactgagcaccttccctgtgagatacctttcccgtccggtgaagctcccggcgcttttcacaagctccctcagagcctcggcgtccgactcaccgaatgtgcggcgtattccttcctcaccgcctgtcaccatgtcgatgtactcctgcccggcgtccggcggccagctcgcgtatccgttcccggtcgtgaagaaggtcgtcccgataagcctttcaagcgcgacgtcgaatttctccgtgagcggtgagaagctgtaatcggcactgtcgagcatgaacatcaggaactccgccgcgccctccgcgtgctccgaggacgacatgacagcgaagctcatacccggttctataacagccccgacgctcccgtcagccgtcggatacccggcgacgacagtctcatccccgccgaacggcagctcagacgtcaccatatcgccaggcgaccagatctcacagtcgagaaacacaagcttcccgtcgcggtaaaccgaatcccggtcgtcctgaaggtcagacagagcgtcgccggaaagcgtatcctcataccgccacgagtccgcgaacccagccgcgaacgcgagaatatcacggaaatcatcaaccgcgaaatcacactcgccggtcgaaaagtcaacatattccccgagcgcgcacctgagcgtcatatcaagcacctcgtcccgcccggcgtcgacgaagagatacttcccgtcggaaagaccgtttccgagcgagatgaagtcactcacgctcatcccggcgtgagcctcggatgccttcgaaacaagcgtccgcacaccgaacgaaaccggaagctcatacatttcgccgcctctgaagcagtcgagcagcttctccgcatacccgttcccgtcaagcgccttcccgatgtcaatgagattcccggacagcgcgaggtcgcctgtcagctcaaaatccgacgaacggataatatccggcgcgtcgccgccggagagcgcctttttcagctcctcttcacccgtgaacacgccgttctcgtccctgccggtgtaatatctcagcacaacgcggtatctgccgcccaagcggttgaagcgcacgacgtccgctggaaaatcatagtccgcagccccgacagcgagagtcagcagtatcttctccggtatcttgttctccggcagcttctccatcacgagcacttccccgcccgatgtaaagccgcggtctgtgagagccaccgcgatacgctctttatcaataacaaccgtttctgatatctgagaagcgataacgtccgagtttatccagtcgagaatgatctcaggcggatcgccggcgaaaagcgcctcgttgttcctgagccacacgcccccggctccgggaactcctgtgtagcctgacggcacggcaaatacgtctccgtcagagccttcggggttgatgtagtacacgttcccgacaccgtcgtcgtcatagcctgaagccgcgacgcgcccatcggacagcgtcgtcatccggtcgaccgaaaaaccgcactcaatgtcggataacggagagagcgacctgtcaaacacacggatcagatacccgtcggcaaaatatattctcccgtccccgtccgccgcgatgacagccggaaacatctccccgccgcgcctgtcgtcgagcatccctgagatatcccctgacagagccgtgatcttcccctcgttccagacgagaagcgagaatatgatctcctttgccgcctcgtcacggcgtctggcgagcagaagcgcccgtccgtccggataccccgccgtgctgaggacatagccgtaatcaccggcgccgagcggctctgaatacacgaccttgttctttttatcggtcttgatgatcatgcgcctgccgagtattcccccgtctgtctcctcgaccgtttcgcccgtgatgacaagcccgccgccggttataaatatgccgtcgggaacgaaattgtccggtgtgtcgatactctgcgccgaccagacatgctcgggcttctcccctccgtcaggcttttcgccgcaggaaaagagcgatacgacaagcgcgagcgcgaccgcaagcgccgtaatgcgtgtcagcttcatattctcaccctttcactgtctctccgcgagataagtccccacgcggtcctgaatgatcttctgcacctcctcaagcgtcttgtcgccggagaagtaagcttccgcctcctcgtttattatgccggtcacggtccggtccgccatgtttccgggcgcggcgtccgaaatcagagactcaatcatgctgatatcctgctcgctcacctcgaagtattccccgccgctctcagccgtgattttcttcacgatctccgggtcgacgtgctcgccgaggctcgtgtatccgccggacttcatgatgaagctgcgtttcaggtcctccgccgattcgcgggcaaacgcctctagcattatcgggaagcccatgccgatatctctcccgtcctcgctcatcatgtactttatgaactcccaggcgccgtccttcagagacgatttctcaggtatcccgaagcacgacgtgggtatgaccgaggtcccgccgccggagctctccccgcgcggatagccgatgaacacgcagtcgccggttccgaaatgatactccgcagacagaagctgactgatatcgtatatgctgaacctctcgaatatgagcttcccgtcgagaagcggcttcctgctgtccgccctgtagtcctcgaggtcgtcgccggaaattgactttgaatacctccactcctccggataccgcgccgcgaaggcgagaatcttcccgaactccgcgctgtcaaacgagcactccgcggtctcccaatctatgaagccgctcatcgtgagctctgtcagcacgtcgagcatacccttcctcgaggcgaactcaaacggataggtcccatccggcaggttctccatatagtcgatgaacccgtcaacagtccagctgtccatcccgacgacagagcgcttcgccgcgagcgtcccgagactgaacctgaccggcatcccgtaaagcttcccgcccctcttcacacaatcgacgacgttctcaaacagcagtgagcggtcgaacttgtccctctccatgaccttataaaggtcggtgaatatcccggcggacatccagtcgtcagcccttccgaagccgtagagccagacgatatccggcgtatcggagctcataagccgcttttcgagagtcgtctcgccgacgttcccggtctcctcgtcgtactggtcatagacgctgagcctgacgcggtactcttcgcttgagcggttgaacctcacgatctgctccggaaggctcatgcccgtgtgcgcgaccgcgagctcgagcacatacttctccggcacctcgtcgtccgggacacggtcaaagacaagaagctccgagtgatcaaacccgccgtcctgattcagaacgtcggtcgtcccggcaaagcgcgactcgtcacggacacagaaccgagaaacgctgcttgcgatgacatccgagtttatgaagttcataagctccgacatatccgccgacccgtcgtcagcggcgctcacgccaaaaaccgagttccagtcgttgtagtagaactcatagccgccgccgaacaggatatccggagtcctgccgctcttcgacggaaggtcaatgccgccggtcagctcccatgtatccgtcccgatatatgacactgtagccccgcccctgcgcgaggagacaagcactccgacccgcccgtcagaagcggtcccgaagccgctgatactcccctcagcctgaatcgccgttatgaaaccaaggtcagagtctagaatgatgatgtccgagtcggcaaagagatacacgcgcccgtcagagtcaatcgcgattccgctcgggaacaaaccgaaccttccgccgtcggggagctcagcgccggatttttcgaggtcgccgaggatatctccggtcaggatatctgtcttcccgtccttcagggacgctatgccgagcagtgtctccccgctctcctcgtcgtatctgtccgtcagtatcagcgccgagccgtccggtctgagcgccgtcccgcgcagtgaaccgcaatcgctcccgacatctgtccgcgacgtcacgctgagattgtccgcaacagtcagcactacaggtgtaacaccatcacccgagctgtcgcttccggcgagtatgaacccgccatccgggcacgcgagcagctcatccggcataaacccgtccggcagtgacaataacgttgtcccgtagacatggtcgaccctcaccttttccggcgctttcccgccgcaggatgagagagccgtgagcgacagcgccgccgtcaggagaaaaacgaatctgcttgttttcatggttgacacttcccttcccgatattgttttgtattctgttttcttactgtttctccgcgagataaatcccgactctgctctggataatcttcactgtctcgtcaaggctcttgtcgccggcgaaatagacctgtacttcctccattatcatttccgccgccttctggtctatgtcgggcatcgcggacgcgccgtctataagcgacagcacgcggtctatgtcagcctgcgtcacgtccctgagaacgccggatttgtcgcctgtgtagccctgatatctgtcttctcccgaccagccgctgtagcctccgtcgtagtagaagaagaaatgctgatccgcgtacgccgacatcaccctgtcaaacgccccgcgcgagaccgggaagccgctcctgtcgtgcctgctctgcccggagtctgtcaccgcgaacttcacgaactcccaagcgccgtccctcagcgccgaacccttgaacaccgagtagctctccgcgacctgcagaaccgccccgttgccctcatagcacggatagccgacatagacgacctcctcacccgcgccgacgttcacctcacggctcagcatattcgccatgtcatggatatacgacgagtttaaaataatccggttgtcgcggtacatcttgccgctgtccctctgatagtccgtccggtcgtccgcgctcagcgtgtcgtagaaattgaagctctccggctgcgacgccgcgaactcgagcatctcccggaaatcgtcgttgtcaaagtcgcaggttcccccggcacgatccacaaagcgcggaagcgagttgttcagaagcatcgagagagtctgaagcttcccgccgtacggcagcatatactgcccgtctccgagccccttcgcgtaagcgatatactcggacggagtccagccgtcgaacgggatattctctcttttcgccacatatgtcattatatagtagttgacaggcatcatgtagagcttcccgccgctctcgaacttcgggatgacgttcatgaacaccttcgactgatcgaagcccttgtccttcttcatcatctcgttcaggtcgacaaagctgcccgcgccc

SEQ ID NO: 2325 - DNA, 6792 bp, Unknown
  16S sequences of unknown bacteria
cccagcttgggtgagcgggttttttgcatagaggcagccggttgctgcatagatttgattcaaaagggggcatgcgtatgcgaccgtggcaatgtggcggcggcgcgatcatctgcttttgcctgggcgtagggctgctgctgtcgctgctgttttcctcgccgtttttgaccggggtgatcggcgtctttctgctcctgtgcggcattgtgctgacgcagcggaaataattcggtatgttttgggactggcccgcgtatataacagtagaacatacaaggggtgagtacaaatggagtttgcgtttgaagaaaagacggtttctcatttacagctgctggccgaggagtggctgcgccaggaggagacggcggagctcatcgtgccggattcggagccggacgcggcggaggttctcgactgctttgccagctgcgtcgtgcgcagcaaggagtgccaggcgggcagcgtcctgatctccggcggcatccaggccagcctgctctatctggccggggaggagacgacgccccggctgctggagacgtatctgccgttctccatcaaaaaggagatctcggactgcgaggtgtcggacttggcacagctgcaatgccgcgtgacccacgccgatggccgtgtcctcaactcccggaagctgctggtgcgggtcgagatcgggtgcgacctgcatctctaccgtccggcggcggagacgatctacgtgccagatgcgtcggacccgcatttgcagctgcaccgccgccaatacccgctgctgctggacctggaggcaggggagaagctctttgccatggaggaggagccggagctgcccgccgggcggccggacccgatccgcatcgtgttcgcccgggcccagcccagcgtgacggagacgcgcctggccggcagccgcatggtctgcaagggtgtcgtcagcctgcaggtcctctatgaagcggcggaggggcaggtgacccgatgggactgccagctgcccttctcccaattcatcgacctggccgggagctacgaggaggagacctgcgccctgcagctccagctggccggatgcgaggtgacgttaaacggcgagcgccgcctgtcctgcgacctgatgctcctggcccagtgcatggtccggggctaccggacgctggagatcgtcgacgacgcctactggctgggcggcagtatgcaggcgaaggtctcgccctgcagcatccgctgccagctggaccagcagcagctgagtcagacggtctatctcgaggtcccggcccagatgtatctcgtccacgacgcccaggtcctggtgggcaggcccgaggtcagtcagcgcgacgggcgcacggagattcgggtgccggtggccgtcagcttgtgtggggcagatgccgccgggcatctgtgcggcggcaccgcccaaggtgcggcggagttttcccaggcggcatcgaacctgagccactgcagctgcgccgcctacgtcaccggcgaggtcttcgcgacccccggagccgaccgggtacaggtccgctttgatttgacactgcagtgccagtggcacgccctttgcagcttcgagtccatctccggcggcgtcgtgcaggcgcaggaggagacgccggaccgcccgtctgtcattctccggaccatagagcgggacaccagcgtctgggacatcgccaaggcctgcaacacgacccaggagcggctgacgaaggccaacgagctgcaggagaacgtcgtacccgctgggacgctgctgctcctgcccttggcctgaatagaggaggcacactatgacaagcgcaacgatttatcaggagatcgcccagcgcaccggcggcgatatttatctcggcgtcgtcggcccggtgcggacgggaaaatccaccctcatcaagcgatttttagagcagctggttctgcccaatatcgacgacccctatcgacgccagcgggcccaggatgagctgccccagagcggctccggcaagacgatcatgaccgctgagccgaaatttatccccgaggaggccgtcaccgtcagcccagacggcacggcgcagctttccgtccgcatgatcgacagcgtgggctatctcatccccaacgccgccggggcgacggaggacggccagacccgcatggtcacgaccccctgggcggaccacgagatccccctgacggaggccgccgagctagggacaaagaaggtcatcgccgagcactgcaccgccggaatcgtcgtcacgaccgacggcagcgtcacggagttcaaccgagccgattatctggaggccgagcgccgcgccatcacggacctgcaggccacgggcaagcccttcgtcgtcgtcatcaactccgccgcgccggaggggagcgaggcccaggccctgtgccagagcctgacggcggagtaccacgccgtctgcctgtgcatgaactgcatgacgatggagctgccgcaaattcaaacgctgctgcagacgctgctctacgccttcccggtctcggagctgcaattcttcctgcccggctggttcaacgctctggagctggagcacggcatgaagcgcaccctgtacgacgccatgcggggtcttgccggggaaatcagccgcatcagccaggccgagcctgctctgcaggagctgctgcagctgccgtccgtccaggcctgccgcatccgatccatcgacctggggcggggcgtcgtcacctgtgagcttcaatgccccgaggcgctgttttaccaggtcctgggggagaaatccggctttcccatcgaaaacgacgcccagctgatgcagcttttggaggaccttgccaagacgaaggccgcctatgacaaggtcgccgacgccctggagcaggtccaggccacgggctacggtgtcgtcatgccgacggcggaggagatggagctgcagccgccggagattgtccgcaagggcggcagctacgccgtccgcatcaaggccagcgcgccatcgattcatatgctgcgggccgatctgcaggcggagatcaaccccatggtcggcgatgaaaagcagtcgcaagacctggtgcagtacctcctggacgcctgtgatggcgacccgaaaaagctctggcagagcaatctcttcggccgctcggtctacgacctcgtctccgacggtctgcagaccaagctgcgccacatgccggagacggcccgctacaaatttaaatccgccctcacccgcatcctcaacgacggcagcggggggttaatctgtatactactctgagcttgtcaaaaagagtttttgacaagctctcaaacgagacccgcttcgctgggctctcgtttgaggggactgcagcccgctgcagcgcactcgctgtgcgctagggcgcacaactcgcacgtttgcgggctgagaagagtttttcccgacgtacacgccgccggaaaaaacagattgaaccctatttgcgccgtgcgcggcgcaaactctgcgaggctttctaaataatgtatcgcgccgcggattttaattgttttatacggcttattccgttcccttcagggcttcgaccatgtcgatcttgcggtttttccgggcgaccaacaggctgaccaggacggagacgccgcaggtgaggaggaggctcacgcagtaggtgacggggccgatgaccaggtgcatctcgtattccccggctatggacaggtagtccagcgccgcgacgcccccggccaggccgatgacgccgaccatcgcggcatagccagcgtagtgccggatgatctgccgatcccggaagcccagggccttgagggtgccaatctgggccttcgcctttgccatcatcttcttgttagttagcgaaaactaaccgtttgccataaagaaaacgccgcgcagtttgctggcgctaactcattccgtgtcagtatagcccgcacgccccggcgtgtcaatcccattgcctaccggttcggcatgttttttgaagtttttttaaattctgcgggaaacaattgcattttcctgtcgttaatggtacactaatagcaattatgcgggatcgcatggaagaatgaccggggcggcgatgccccgaaaaaatggagcgaatgtattatgataaatgtgatcggattgggatatatcggcttgccgaccgcgctgatgttcgcggcccacggcaacgaggtcgtcgggacggactacaacgccgccatcgtggaaaagctgcaggcgggggagctctcctttgaggagaagggcctgccggagctgttccaaagcgccgtcgccagcggcatccagtttacgacggcctatcaaaagacggatctttacattgttgccgtcccgaccccgtacgacaaagccagcaagcggattgatccgcgctatgtcgtcggcgccgtgcaggacgtgatgcaggtctgccccaagggcgcgacggtcgtcgtcgaatcgacgatcagccccggcaccattgaccggttcgtccgccctgtcgtcgaagccgccggcttcaccatcggcgaggatattcacctggtccacgcaccggagcgcatcatccccggcaatatggtctatgagctgcagcacaactcccggaccatcggcgccgacgagcccgccatcggcgaaaaggtcaaggccgcctacgcgaccttctgccagggcgagatcgtcgtgacggatatccgcacggcggagatgacaaaggtcgtggagaatacattccgcgatatcaacattgcctatgccaacgagctggccaagatctgccgcagcgacgggatggatgtctacgagatcatccgcatcgccaataagcacccccgggtcaatatcctgaaccccggccccggcgtcggcggccattgcatcagcgtcgacccgtggttcctggtgggggattaccccatgctggccaagctgatcaaatgcgcccgcctgacgaatgactccatgccggaattcgtcctgggtcgcatcgcagacgtcatgcgtgagcgcggcatcacagatgcccgccgcgtcggcctgtacggcctgacgtataaagaagacgtcgacgatgtccgcgagagcccgaccctgcaaatgctggagaatctggagcgccatctggccgccggtcaggtcaagatctatgacccgatggtcaagcgcgaccttgtccccaaccagtatcacgattttgacgccttcctgcgggatgtcgaccttgtcgtcatcctggtcggccattcggagctcaaggcgcagatggacaagctgcgagataaggtcgtcctcgatacccgccacatctgcacgctgccgggggtctataccctgtgagtgaagcattttccggcttccggcccgaagccatcgactttctctggcagctgcggttcaataacaaccgcgattggttttccgcccataagcagacatatcttgaggcgctctatcgcccgctggtcgccttcagtgaggaaattttcacgccgtttgcaggcagaagcgggtactgcatgaaggtctcccgcatctatcgcgacgcacggtttgcccacgccgcgccgtataaagagagcctgtggctctgcatccgccgcggcgagacgtattggggtgaggagccgtccctgttttttgagatcacgccagagggctataactacggcttcgtcctctggggcccccgcgccgcctggatgcaggccttccgcgcaaggctggcggcaaagccggaagaatttcttgccctgtgcgaggacctgcgccgcaaaaccggcctcgccctcaccggcgaccgctataagcgccaaaagccgtgccccgatgcccggcttgccccctggtggaatctaaaaaacctgatggcaatctctcgccacccggttgacgacgggctctatgacacgtcccttcccgcccgcgtccgcgagaccttatcggcccttgacccgctttacgcatggtgccagggcatttctgccaatttatcccagacctgagtttttctgtcagtccagcagccagacgcatcgccgtctggctgttttccgtttttgggcagggaaatctgcttgatttttctagccacgctccctgcttgaaaccgggaaaagcggccacattagtagggggaaacggaaaggaatgacgcgatgagaaatgggatgtatcaaaccgcgcgaaaaattttgatcgcctttgcgctgctggcggccttgacggcccaggcgcttggcctggagctgatccctgggggcgaggccgtcggcctagaggtcgaggcccagggcatcctgatcgccagcgtgagtgaccgctgcgcggcgaagctgaagcccggggaccgtatttttgccgtcgatcaaatcccggtgcatacctgccagcagctgcaggaccgcatcgcccaggcagacggcgccgtggccctgtccatggaccggaacggcaagcgcctggacctgctggcgcccctgcagccggatagcggccagctgggaatcaccgtccgcgacagcctggctggcgtcgggaccgtcacgtatattgacccatccaccggcgcgttcggtgcgctgggccacggcatcagtgacccgcagaccggcaagctcctgcctgctgccggcgggacggtcctgcccgcccaaatcgttgccgtgcagaaaggggagcggggcaagccgggccagctccagggcgctgccacagacctgatgcccatcggcgagatcgcaaaaaacacgccctgcggcgtcttcggcacgctgacgca

SEQ ID NO: 2326 - DNA, 1897 bp, Unknown
  16S sequences of unknown bacteria
cgcccccgcttgcccttggcgggccgccgcgccggcgcggcggccgatgcgtcctctgccgcgttggcttcttcctctgcgtcatccgcgtcgggcgcatcgtctgcgtccgccgcaggctctgcgccgggcgcatcacccgcgcctacggccgcctgcagcgtctgcacctgggccgtcagcgccgtcagcgcctgcagcagctggctgttctggctgacccgctggcgcacgcgatccttgcctttaaaatccatcaggtccagcatgacgaggacctggtcggcaagctgcggctggaaggcccccagctggaagagctgcagggccagctcgttgtagctctccttcgtgtaggggttttcccgctgggccgtgacctcaatatcaaactggggcgcgtccaggggcccgcggggggccagggcgtggttgtcgaattggacgtacgccgtctgcccctgggggccggtgatgcggaaggagcgctgggcggagtaaaactgccggatgagctcaatgcacaggtagacgatctgctcgaacgcccggtagctggtcttttccgcgtcccgggagagcttgcccgccgcctcctgcagcgatgcgatgcccgaggccgaggtgacggacgccgtcacgccgccggaggccgcgtcccggttgccgagggtctccttcagctctgtgatgcggctttggaggatggtcatgtaaagatcatccaggggcgaggccacgatctgccggaccgagtcctccccaagattgccgccgacgtggacgaagggccgggtcaggtcggcgtactcggcttcgttcacgccgccgtcggagcgaataaaccaccaggggaccgacgccgccatggcgttttgcatgatggcgtggttcattttgtcgatgtagtgctgggtctgcttgccaaaatcaatgtagccgtagccgcagcagctgccctccgtggggaagaggacgtccaggacgaaggggtagcgcccgtggtcgtagagggggcggccctcgttctccgtggcgtagagaatctcgctgccgacgtatttgcagtagtgcagctgcccgcggcgcttgtagtagacatcgacgaccagggatttgtccccggtgtcgacggtgtcgtcgtagagaaatttggcgatctggaccgggtcaccccggagcttgcccgtcagctggggccagcgatcgcacaggcgctcgttgtcccagagctcgacgtggaagacgtaggggctctgctgcaggtcctccacgccgggggcccagaagaggttgaggagattcaccttgcagatggcgatatctccctgcccgcccagcttgccgccgtcccagaaaaccttgtagcacccggtgccggatttgagcttgtaccaccagacatccgaatagaccttttcaaactggcactgccgcaggacgaccggcaaaatcgcccccagggactcggcctggccgacgtccgatggctcctgggccagcagcgagcaggtggggtaggcgtccatggcgtcggcatgcttggacatgatgacgttgcacagccacgccgacaccgcgtcattcggcgccgccgcgtcattgtgccgcagcttccaccactgctcattttcaatgatccgccgctccaaattcgccttgccggtcttgtatttttgcaggatccgatgaaaccgcgccacctgcgccgcatccaccggcaaaaccgccgccagatcctggacctgtttttcttccataggttcctcctgtttgggatgataattagatgatgcaccaaagcgctgctgtgcagcagcggcttgatggctttttttggaagccgctgcgccttatttttttccatgcaagcgggctaacgccctccgggggccat

SEQ ID NO: 2327 - DNA, 13374 bp, Unknown
  16S sequences of unknown bacteria
tgagaattgaggaagcgcacgaaggccgccgccagtggcggaaacaggccgtagtcgtcgaagccccgaaggggtggaggggcgaggacagcgcgaagcgctccgcagccccggaataccgggccagcgaagcgcaggccggtacgaagactccaatgaagcagggagggccacaagcgagcttgcgagcgtccgaaggcccgaagggctgaagtggcgagcacacggagcgaagcgcagtgcgcaatcgaaggacgcgaagcgattggaggggcgaggacacgcccaaagggcgtccgcagcgccggaacaccgcgcaagcgttagcgcaaagcggtgcgtagacaagcgaccgggtaatccctcgttgacaaacctttggtttgtcaacgatcaaaaaaggtggacgcgggagcctgctccccgtccacccttttgcgttgctatttagccagcgttgtaggccttgagaatcatcttctggtgatccggatccaccttatcggaaccgtgcgtgcgcgaattcacaaagtgtacgcacaggtggccggaatagccgttgtcgtcgatctggccctcgccatgcggttccgtatagatggaggccgcgtaccgttgcccatcgatggtgacccatacggcgtggcgcacatacgtccagttgccgttgctatccgcgcaggcttgacgcatggcctcggtgtccgccaaggtgaggggttccacgtcggcatggttggtgctgttgcggcgaatgacgttccaggaaataccggaatccacatccgtgatcaccgcgtaggtgcccggcgagaagatggactggatatcgctggtgaaccaatcgaccatcaacacgctgccgctgcccggaacgcccgtgctgccgccgccgccggagaaaatgggcgaattgctcaggttcgagcacagggcaaagcctgtgtggccgttgtattcaaaccgcgcccaagcgccgtccgcggagatttgcagcacttgcacctgcgtgccgtaagaaagcgtagccagcacattcgcgctggtggaagcgctctcgtacaccttcatcatttccacgctcacatagccgggctggttcacatcctgcgggccgctttcttccgcatcttgctgcgaggtggaaagctgcgatttgcgcatgtaaccaatcacgccgttgttggaaacgcggcaccaatcgccgttggtggcgtacaccttgatcgatttgcccgcggaaagcgtggcataacggccggaactggtggacgcctccttatagacgtacgcatcctccgtcgcgtaagcggttatgggatcgcccggcggggtcttggacatcccctcgattttggcaaagcccttgtgggagccatactggattttggcccagtcgccgcgcgtttccactacggtcacttcccggccaaaatcgatggtcgtcaccttgctagaagaggtggaagcggacttgtacaccggcagggagtccacagccacgtaggcggggaaggtttccttggaaacctcttcttcctgctcctgatcctcttcttcctgggcggggggctcgtccttgctatcctcgtcctccgcgacatagcgctccttcacataggcggtcacgccattggaagggttctcgatgcgcacccaaccatcgtaggatcccttgccgtattccacgatgatcacttctgttcccttgggcacgacgatgctcacggagttggtccggggctgctgatagatcttggtcttcgatgtaatatatcctgtttctgccagcgcgctgggggccatgctggtgatcaggagcgccgataccgttaaccccgtgagccatttcgctcttggcatatcctcactcccttcggaattttgcaacgcggccgcggcctgcgcgcaaggcgcgcttctccagcctgcggtatacagccattatatggcaaacaccggaaattatcaagcaaatgggcggatttgttccgggaaaattcgatttttaacaattgtgtttctttttagcggcttcttcgatggcattgattgcattttcaagaccgttgggcaatgcttcgtgttccatgcgctcgatgagcatgccccggtcgcgatacacatccaccacctgctggctgagcgtttctgccgaaaggttctcctgcaggagcacgcggcacaggccgcgcttttcaaacgccgccgcgttggcgagctgatcgccccggctggcggccttgggatagggaatcagcagcgcgggcttgcgcagagccaggatttcgcacagcgcgttcgcccccgcgcgcgaaacgatcacgtccgccatttgataggcgtggggcaattcgtcgttgaggtattcgcgctggcaatagtttttggcgccctcgtgcggctccgagaggtgccctgcgccgcaaacgtgcagcacctgaaagctctctgtgagcctgggcagggcttcgcgcacggccttgttgatggccaccgcgccggaggaaccgcccaccaccatcagcactggcatatcgggctggaagccgaacaggcgcagcccctcttcccggctgccggaaaaaatttccggccggatgggcaggcccgaatagcgcgccttgcggcccgcgtgttccgccgtttccgggaaggcgcacagcacaattttggcaaaaggcgtgctcagccggttggccaagccgggggtcatatcggattcgtggatcaccacgggcacgcggttgagatgcgcgccatacaccacgggcaccgaaacaaagccgcccttagaaaataccacatcgggccgcagcttgtgtaccagcgccgccgcctgcgccgcgcccttgatcacgcggaacggatcggtaaagtttttcagatcaaaatagcggcgcagcttcccgctggcgacagcgtggtactgtacgccaggcgtctgctccaccagccgcctttcgatgccgttttccgtgccgacatagtgcacttcccagcccgcggcctgcaggcgcggcaccagggccaaattgggcgtgacatgccctgccgtgcccccgccggtgaggataatacgcttcatgaaccacagcctccggacgttttcgattggaatcgcgttgagagccaactgtattatagcactcaaagagggctattggattgatatttggtaaaacaacgcggaccacgggttattctatgcgcgaaaatgtggtataatgccagatgggaaccgccagcgcggcggttctgatcgttgacaaaccttcggtttgccaacgaaaattcccggtcgcttgtctacgcaccgctccgcgctaacgcttgcgcggtgttctgtggctgcgcactgcgcttcgctccgtgtgctcgccacttcagcccttcgggcctccgacggccagcgaccgggacgggaatgcatttttcccgcaaacgcaagcgtttgctctgcgaaaaatgccagaaatgacgtacacgccgtcatttctgattagagcctttttctttagagactttgtcaatagtctgggaaccgccagcgcggcggtttagcggatgcgatgggaggcgcggatatgccatatcaaaccctataccgggcgtttcgcccgcaaagcctggaggaagtgtgcggacaacagaccgtcacgcgtgttttaagccggcagctagaaactgggcgcatttcgcacgcttacttgttctgcggcagccgcggcacgggcaaaaccagcacggccaaggcgttcgcccgcgtgctcagttgcctgcatcccgagggcagccgggcttgtggcgcgtgcgaggcctgccgccagagcaacaacatggacattgtggagatcgacgcggcctccaacaacggcgtggacgaaatccgcgatttgcgcgagcgcgtaaagtatccgccggtgaatggccgctacaaggtctatatcatcgacgaggtacacatgctctccaccgccgcgttcaatgcgctgctcaagacgctggaagagccgcccgagcacgtggtgttcattctggccacgacggagccccgccgcctgcccgccaccatcctttcccgctgccaacggtacgatttccgccgcatcagcgcgcaggtgatcgtggcccgcatgcgcgagattttggcgcaaatcggcgctagcgccgaggacgaggcgctggagttgatcgcgcaaagcgccgaaggcggcatgcgcgacgcgctgagcttgctcgatatgtgcctttcctacgcggaaggcgcgctcacggcccaggccgtgcgggatgtgacgggcagcgcggggcgttcctttctatttgaatatacccaggcgctggccaatatggacgcggcggcggcgctgcagttgatcgatcgcctggtgcgcgatgggcgggatctggcttcttttgccagtgaagagggcgatcatctgcgtgcgctgctgctggccaagttcgcgcccgaggcggtggcggaactgctggaggtttccgaggaaaccgcgcagcgctaccgggaacagagcgcgcccatcggcgaaaaccgcctggcccagctcacagagctgtttttggaggcgcaatcgcgcatgaagtatctttccagcgcacgcgccgcgttggaactgtgtaccgtgcgcgcgtgccgccccgcggagggcgtcgatatggaaagcgtgctcgcgcgcctcgaggcgctggaggccatgccgcgcgccgccgcgccccgggcagaagaatcccccaaaaaggcggaaccgcgcgcggccaaagcagccccccaggagacggaggcggcgcgcccgagcgcgcccgctaccgcgcccgaacccgcgccggaggaatacggccgggcgctggaagcgctggtggccgccaagcccatgctgcgcccgcagctttccgccatgaaattcgagcgccgcgagggcaattgcatcttcaccaccttcgccaaaagcgcggccatgcagatgaccctgctcgagcgcttccggccgcagattgaggaagcgctcgcggaagcgttcggcgaacccatgagcctgcgcatgcgccgcgaggacgagcgccccaagggactggatcgccccgtgcgccagatcatcacccaggcgcaggacctcttcggcatggaaaatgtggaattgggggatgaataggcgttggcgcggcagcgcagattggcttgccaattcctccgtcacgggaggttttacgaaggctttggggagtgctgcttcacgcggttgcaccgctttccaaaatagggctgtgaaagaacggcaaaagctctttcacagccctattgttttgcgatttttatattattctgcggtcttgccataatagcggtccagcgctgcctggcggatttccatcaggcgttccagacccatctggttgagctgcgccacataatcgtcccattcttcctcgatgccgccttcatacacccaacgcgcgccagtggtttccacataggagatgatgtccgtggcgagcatggtcatctcatccagctcttcgctggtgtgcagcaccgtgggatagggcggcacggcgtattcctcggccaccttggccagttccagcttttgcgcgtcgctggtggaggcgggcaggatgatcttatcgctgaagccctcgggaatgtacttggggccaaagtcgcgcgtggacatatcccaggcgtggtcgtccgcgctcacgccctccggcggctcgagcagggtgtaggtgccgtcatcgttcttctggatgcagccatcggcgatgggaccccagaaattctggatgctggcctcgggcgtgtagaactggtcggcccagcgcgccgccacctcgggatattcgcagaacacggtgatggcgaactcgttgcgcgaggtgctggtcatgcccgccgcgtagcggttgccgtcgggcgcgagcacgggcggcagcacttcatactgctcgtggaaattgggcacgtcggcgtccggcgtccaggaatagatcatgcccacgatggggatttccgggttttgctgcttggccatgcgcatggtatcgtccatggtgaaggcttcctggtcaatgatgccctcggcgaacagctcgcgcagccagattacgccctgcttgaattcctcggtaacgggcatgaaggtggccacgccgtttttatccatggtgtagctgttcgtgctggtggcgttcgcgtcgcccatgatgcccatgtgctgcaaaagcgtgtatacgccgccgaaatctgtgaaggaaacggggatttcatcgtttgggtcgccgttgccgttggcgtcctcattcttaaaggcgcgcagcacctcggtgagctcgtcgagcgtgtccggcatttccaggcccaaccggtcgagccaatcgcggttgaggaagaactgcaggcccacgttcgggcggcagggcaggtttttgggcagggtgtagatcttgccatccgcggccaggcagatgttgcggaaatccggatcggcctcaaaggctgccttcaggttgggcatgtactggtcgatcaaatcgtccagtggcaggaagaattccgcgtggttggaatattccgaatcgccgaacacgttgctgccgtagatcacgtccggcaggttgcggctggcgagcaggatgggcttttgctcctcccaatcggtggtgtactcgatctgccaatcgatgatcacgttggtgccctcttccagctgcgtgaagaacgcgttctgggtgaaggaatcgtccatgtgcccccagcgcacggcgagcacgctcaggtggattggttcatccgcaatgggcaggccttcggcgtgaaagcccggggccgtttccgccagcgcggacgcgctcaatagcagcgcaagcgcaagcaacagggtcagccattttttcatttggggttcctccttcttcagccccgcaaaacgcggagcggattgataaagcgttgcggggatggcggcgctatcccttcaccgcgccgagcatgaatccctggttgaagtatttttgcacaaagggatacgcgcacagaatcggcacggtggaaacgatgattaccacatacttaagcaggttcgtgagccgcatggcgcgaatcacggtttcgttgttgcccagcatgttcgcctgcgactggttgatgatgaggatgttgcgcagcaccagctgcaggggcaccaggttgtcgttgcggatgtaaatcagcgcgttgtaatacgagttccactgcgtcacggccgtccacaggccgatcaccgccagcatggccttggagagcggcagcgcgatttggaagaaatagcgcaggttgccgcagccgtcgatgcaggccgcgtcccacaagtcggcgggcaggttggtggagaagaacatgcgcgccacgatgatgttgtacaccgaaacggaaaatggcaaaatcagcacccagaacgaatcgtacagcccaaagttcaaaatcaccgtgtaggtggggatcaggcccccattaaagaacatggtgaacatgtaatacgcgttgagcaggcggcggcccaccagatccttgcgcgaaaacgcgtaagccacgggcacgttcaccgccaggcccaccagcacgcccagcaccgtgtaggcgatggtgttgcggtagccaatccagaaatccgcgcgcttgcccagctcgatgtagccgtccacgttcagccccttgggccagaggagcacttcgccgttggtcaccagcgtggggtcgctgaacgaggcgatcaaaatgaaatacagcggatagagcacgatcagcagcgttatcccggcgaacgcgtagaggaaagcgttgaaggcgatatcccccgcgcgcacgccttttttctttttgcgcatgtccttttcccccttttacaggatgctggtgtcgcccagatgcctggtgatctggttcaccagcagcaaaagcgccaggttcaccagcgtgttgaataggttcaccgcggcggacaggctgtactggctgttgatgatgcccagcttgtacacgtaggtggaaatcatctcgctcacggagaggttgaggtcgttctgcatcaggtaggccttttcaaagctcacgttcatgatgccgcctgcgcgcagaatcagcatcacgcaggacatgggcagcagcatgggcaaatcgatatagagcatcttttgccgcttgcccgcgccgtccaccgtggcggcctcgtagaggttgggatccacgctggccagtgccgccaggtatacaatggcgtcccagcccgcgttctgccacacgtccgaccagacgtacaggctggggaatagcctggggctggccagcaggttgggcgcctgcgcgccaaacagcttatagatcgcgccgatcagcccgctcgagggcgaaagcatgatgttcagcatgcccaccagcaccaccgtggaaataaagtgcggaatgtaagtgaccgtttgatacacgcggcggaatttgcccggccgcatctggttgatgagcaaccccagcaggatggggattggataccccgccgcgatggaatacaggcccaacagcagcgtatttttgatcaccagctccgattggtaggaattgaaaaaacgctggaaatacttataccatggatccgcccacgggctgcgcgtgatgcccgccatcaggttgtaatccttgaaggcgatttgcacgccgtacatggggaaatacgtgaaaaacagcaagaggatgaacgatggggcgatcagcagatacagcccccagtttttcgcgatggcccgccacagccgcgaggcgcgatgcgcattttgcacggggattcctcctttccgcctatgaatattataaaacggccagcgctgcgcggataggcaaaaatcggacgttttcctttcgaaaaccgcactttaaccatctttcatgcaaaaactttgtatatcaaaccgtgaaaatatcctatgtgtatagaagaattcggactttgcgcccgcgaaacgcccattttttgctattccctcaccctggaatatggtataatggaaacaaaggaggggtgaacatgcaccgggaagcgcgtgcgcattccatgaaaaaatactatcgcctgctgctgtgctcgttgattcccctggtggccgccgcgctgctggccagcctgttcatcgtgttcacgctgcggcggcaggccttcgagcaatttcacgaagtggcggagatttatctggattccatcgatctttcgctctccaccatccagcggcaaatccgctggtccgccatgcgcgatgagagctttcaggccatcgcgaatccccatagcctcgccgagctgacggattcgctgaaaaccatgcgcggccagttcaacacgctgcaacagagcacgggttcgcactttcaattcttcggctatgtgcccgcggacggtttcttcttcaattgcgcggcgctggaagtggattatggcgcgtatctggggctaaaggagcggcttgcgcagctgatcgccgcgcccaatcccgtatacgactggagcctgctgagcagccggggcgtggattatctctattgcatcggccccgcgcaaaaccgctatatcatctgcgccacgcggctggacgcgctgattgagccgttgagcgcgctaaacctggggccggaaggctatgtggcgctcaccgacgcggaagggcgcgcgctcctggggcgcggcgcgggcgcgcacagcgcctatggcggcgcgctcctgggcgggaaaatccgcgtattccctgtgctggacggttacggggcctatggccagatcgcgctgccccaaatcctcaccgtgctgctggcgctgatcgtggtggggtatttcggcgcgagcacgttgttccttcagcgccgggtgctgcgccccatccagcgctttgccgataacctggccgcgctgaacgagagcgccgggcccatcgacctgggcagcagcgaaatcttggagttggagcaggccaacgaccgctttcagcgcctgatcgcgcaaatccgcaagctgaaaatcgacgcctacgagcgcgagcggcaacggcagcgcgtgcagctggaatacctgcaactacagatcaagccgcactttttcctcaattgcatgaccagcatccactccatggcccaactgcacctggacgaggaaatccagcgcatggcggcggccaccgccgagtatttccgctatatcttccagagcgggcgggcctgcgtgccgctttcgggcgagctggcgcacgcgcgcaattatctggaaatccagaaaatgcgctacggtgaggcgctgcgctatgaaatccgcgcggaagacggcgcgcgagacgtgctgattccgccgctcacgctgcaaacctttctggaaaacaccatcaagcacgccatgtccctggacgagggcctgcgcatcaccatccgtgcgcggcgggaaggcgatttcgcgcgggtggaaatcgccgacacggggcgcggcttcccgccggaagtgctcgcggcgctgcaaagcggcgcgccctttggcgaggacggccagcacatcggcatccgcaatacgctttcccgcctggaaatcctctttggcgggcgggcaagcgtgcaatttcgcaacgcgccggaaggcggcgcgcaaatcatcctgcgcattcccgcgatgcgcgcggcggaggaaggaggcggcggcgcgtgaacgccctgctcgtggacgacgaccgctatttcgtggcggcgctgcgcgaaaaaatcgattggcacagcctcggcattgaggaggtgtattccgcctacaacatccgcggcgcgagagagatcatcgagcggcacgccatccgcgtgatgctgtgcgatatcgaaatgccccagggatcgggcctggagctgctggcctggatccgcgagagcgcctatcccgtgcaggcgatcttcctcaccaattacgcggatttccactatgcgcaaaaggcgctggagctacagagcctggactattatttaaagcccgtggcgctggataagctgtatccgggcatcgccaaggcggttggccgcgcgcgggaggaagaagcccggcagatggccgccagcggcgtgagccgcgcggaattgctggaatggttcgtgcagcgcgtggcgagcggcgcgctgcgcggtgaagaggcgttgcgccgggcggaagagttgcgcctgcccttgctcggccgcccgctattgtgcgtgctggccgcctttctgcccgatccgctcgcgagcacgcccggcgctctgccctcgccccgcccggcgctggaaagctggcaaatgccgggaacgcaatttttgtgcgccgtgccgctgccgggccgcaacctctggctgtatctggcagcctgcgaaagcgctccaccgccggaatcgttcgccagcctgctcagcgcactgcgcgcgcaaaccgggcacgatgtgaccctgtgcatggggcgaccctgcgcgctcgacgcgctggaagccgagaccgttcgcctgcgcgaagcgcttgcgcagcgtgctgacatccgcaaccgggttttgcagccggacgtggcaggcgatccgtcctcccccgcttacgcgccgcccaacctcgccaaaatgcgcgaggcgctcgagcgcatggacgcggagggcttccggcgcatggtggacgcctacctggacgcgttgggagagcacgtcaccgcggaaaccctgcgcctgtttcgcctggatctgatgcagctggtgtacgcccttttgcaaagccacaatctcgaagcccgccgcctgttcgctagcgcggaaagcgaccgctttttcgccggcgccacccattccctggaggatatgagcgcctacgcgggctatttggcctgggtgctggtgaacgccgtgcggctcaacgagcaacccgcgacgctgatcgataccgtgcgcgaatacatcgacgcgcacctggagcaggatcttacgcgcgcgcacctttcgcgcattgtgtatctcaaccccgattatctggcgcgcttgtttaagaaagaactgggcgtttcgctgggccagtatatcaaggaccggcgcatggaaaaagcctgccatgcgctggtagaaacgcgcatggcagtgagccgcatcgccggcatggtcggttacgacaattattcctatttcatcaagctctttcgcgagcagttcggcatgacgcccgtggaataccgcaaggcgcacgccacgcgaccatagcggatgcgcttaagatgccggaggaaccggcggttgcgcggcgttttccgcgccgtcctttttgcaccatttcatcagcgcgtttttgatttcgcacatcagctgcggcgcgagttcgatcatgcggtccaccggcgcgtaatactgcgcgggcagcaggcgcacgctctctttgcccaccaccaaaaaacccatcggctgcacggtgacgcccgcgcccgtgccgcccgcaaatgggagcgtgggggctgcgggctgcgccttttgcgcgtattcgccgccgcccgccacaaagccgaaactcacgcgcgaaagtgggatgatggtcgaaccctcgctggtgggaatcggctcgccgatcacggtgttcacgtccaccatgtcgcggatgttttccagcgtcgcggccataatgttctcaatcggatgcttttccattttccttcttcctttcccatgggcgggcacgcaagcccgccgccgccattgcgcgaataatattccccgcgcgaatctctacgatacccgaggcttccagcgcttttgcctcaaacgccggcgcaatgtccgcccggcccagacaggaaaaaatcccctgcagcgcgccgcacagcagcgcggtggaagccgcgtcgcccgtgcccagccgcgcgcgcacgcgcacggcctctatgcgccgcaaaagttccagcgccgcaaaaaaccaaaatttggcgggtagccgcaccgcactcttgcccggcgaaggcttgggcatttcccccgcccgcgcacgcgccagcgccgcgccgcgcaaaaaaggccgaagtcctaagcctacccgcacgccgccttccgcgcgcacaaaaaacgcgaagcacagcggcacattcgccgcataaaatagcgtcgccgcaaccgccgccgcatataccatatcgccgcctcccgcgcctattgtgccccaaaatggcatagaaattcccagaaatccacccatttcgccagcgctttttgctggaggattgccccgcgcgcgaaaacatggtataataaaaacgaggaaagccgatcgcaaaggagggccgcggaatggcggaaggaaattggggaagcgcgggcat

SEQ ID NO: 2328 - DNA, 7513 bp, Unknown
  16S sequences of unknown bacteria
gataacctgccgggttttattcgagtgcgcggtcgactttttaacggagttctgcggctgcactgtggttctgtgcacagcgactcagcctgtaacagacctcgataacaagccggaggagataacaggcgacgttgagcggctgttttcttcaatgaagcgggtgaatatccatgacgagacacaaaaaatgctctcagcagaagacgccgccgaacggctctccggacttatcggaaagtatggttcgttgctgatgatagtcaacacaaagccgatggcaagaaagctctacgagctaatgaaagaccgtgtcacgagcgttcatctgagtaccggaatgtacccggaacatcgtctgcggcttatcgacctgataaaatcccgcgacaaatcgaagccgttcttctgtgtctcgacttcactaattgaagccggaataaacatcagttttccatgcgtcgtaagaagtctcgccggactcgggagcatattgcaggcagctgggcgctgcaaccggaacggtgaaagtgaacgcggagaggtcttcgtctggcagctcgatgaaaatttaagaaatctcccggagataaaagccgccgccgagataacacgcggacttctggttgatgaagaaaatatcggttcgcttgagaatataaacatatattttgagcgagagagagacaagcttcctgaaatgatctcgaaattctctgacaagcgaataggagatttcaagaagcttgttaaattcccgctgcctgcgataaactctgagacgacgattttcgatctgctcagcacaggtttcaaaaggaactctgcaaaaagtgaatttgctttgagcgccgctttccggacggcgggcgagaatttccatgtgatcgacagtctgactcgcggagttcttgtgcctgaagggcgcggagcggagatactcgcggagctctgcggcgaattatcctacgacaagacaaaacttctgctgcgtgaagcggcacagtacagcgtgtcgatttacagcggaatgttcaactatctcagagaacagaaggcactgatatacctcgagaatgtcggtctgtacgcgcttcgcgacggatggtatgacgatgagaccggaattatgacggcagcgggcgaaatgagctttcttggattctgaaaatggaggagaaaaaatgaaatatcccaacagggtgtcatatctgctctacggcagatacgcgctgttcacagacccatcaacacgcgtcggcggagaaaaatccactctttctgtcccgacctatcaagcactgaagggcataaccgagagcatctactggaaaccgactataacctggataatcgaccgcgtacggattataaatccgatcgtcaccgagtcaaagcatatccgaccgataaatttcacggattccggcaacacgctttcagtatacaattatctgaaatcgccgcgctatcaggtagaggcgcatttcatattcaatgagttccgaccggaatatgaaaacgaccgtaacgaggacaagcatttcaagatagccgaacgcatgatagagcgtggaggcagacgcgatattttcctcggtacgcgcgagtgtcagggatatgttgagccctgccgcttcggcgcgggagaaggcgcgtatgacaaaaccggaagcataaatctcggactaatgctgcacggcttcgattatccggatgagacgggacgcgatatgctcggcgtcaggttctggcgtccgacgatgaccgacggagtgatagacttcataaagccatcggagtgtgatcgtcggctctgccgcgacatacgaccgatgagaaagaaaaatttcaaggagttttcggggcttgaggaagaagcgctgagaaagatttacgaggaggtggaggaagatgagctggctcgcgtcattgagcgagacctatgataatttctacggcggcgcgtatgaacagaccggtgaccgcatagtcccggtgggatttaccacaaaagatgtgctttttacggtgcttcttgacgctgatggaaatttccgcggcgcgatcaggaatgagaagaagacggtgcggattccgtcatcgcctgaggccgccggacgcaccggaccgcctacaccgtttccgctttatgatgagctcaggtatatggctggcgatttgtcagaaatgatcgggctttcgtttgaatcgtatttcgaaagctatattgccgcgctgcgtgattggagtcaggcggaaggcgctccgtcagcactcggacttctgctcggctatctcgagcgaaaaacgcttgcaaacgatcttaaaactgccgggcaaataacctacaagaaggatttcgggtcaaaaagcgcgcttgaaaagctgtacaagggtatggtcgaattccgtatctatgacggcagtgaacatgattatatcggaatagccgatatgcctgatgtacagaaaaactggtcgaagcggctggtcgactctatgggaaacttcgggctttgctgcgcgagcggcgatgtgactgcaatagctgacaagcaccctaagctgttcggaaacacaaagctgatctcatccaaggacgcgcagagggtattccagtacagagggcggttcacttcatccgaagacgcgtgcatgatcggatatgaaacctccgaaaaggcgcataatactctgagatggcttattggcagacagggctgccggaaattcagccttaatttcgtcgcgtggagcaaggaatgctatgacgtcattcagccggatgctgaccttgaatttcttggtattgaaccagagacaaggattgacacggcggaggattactcgaaattcatctccgcgagactcgcggggtatcagaaaaagccggcgtatgaaccggcaaaccatgtcattttgatgggacttgaggcggcgacacccggcagaatgtcgataaattattacgaggagctcggcggcagggaatatctcgaccggctcggaaggtggtacgaaaactgcttctggcggataagctggtttgacaatgacaaaaaacggcgcaccggcgtgctcacgccgagccttgaggcaatcggtaacgcggtattcggccgtgatgagatgatgtcagcaaaacgtgacgttcgagacgaaaaatccggcacaaaacaagtcaggcacttctacctgaatatgctcgcctgtatttcaggtggtcgtcacgcgccggtcggatatacaatgacggcgtatcaccgcgtcctgaacccgcagagcttcaggaatagaaacggcagctggcagagaacggattggattgattgcatgggagtcacactcgccatgctcaaaagcgcggatacaaaggaggaatataacgtggcattaaacgaaaaagagaccgaccggagctatctctatgggagactgaccgcggtcgctgatattatcgagtcaagagccttgcgtgaggcggacagtgatcgcatgacgaacgcggtacggctcttcactgtgatgcagcagcgtcccgcgacaacatggcagaatctcgaacagaaactgtcgccgtacttcgggaagctcagcgcggcatcacgcgcgtggtataagaggatgattgactcgataattgagcttggcgacgatcttatgggggataactcgcccctttcgccgcgctttattgaaggctatcacaaccaacgatatgttttgctaagcaaaaagaaggagaactgaaatggagaatatcagaaacaaaatcgacttcgcgctcgtatttaccgcgacaaaatgcaatccgaacggcgacccgctcgacggcaaccgcccgcgcaccgacatcgacggcttcggagaggtatcggatgtctgcctgaaacgcaagatcagaaatcgcgtgctcgacatgggcgggaatatcttcgttcagtcggacgacaatcgcagcgacgatttccgctcactcagagacagagctgacggctgtgagaagctcgtggaagccgcaaagtcaggaaacagagataattacgcgaaagtggcatgcaaggaatggtttgacgtcagagcctttggtcaggtgttcgcgttcaaggacagcaagaaggcaaagaagaagtccgacgaggatcaggacgatggtgagaattccgattcggtatcaatcggaatccgcggaccggtcagtatgcagatggctgtgagtgccgatccggttgatataaacatgatgcagatcactaagtcggtaaaccttgagactggcgacgatcctgacaagcgcggcaaagacacgatgggaacgaaatatttcgtggacttcggagtatacacgaccttcggatcgataaatgtcaaaatggctgagaagaccggcttcaccgccgaggacgcggatacgctcaaagaagctcttcgcacgctctttgtcaacgacgagaccgcggcacgcccgtcaggctcaatggaggtcgtgaagctgatctggtggacgcacaataacgagatcggtcagtattccccggcaaaggtgcacaagctgctgaatgtcgaaaagaagccgggcgtgaccacaccgcgaagcattgaggattacgatatagcggtcggcgagctccccggactcgcttatgaagatgtcgctgtcaactgacgattatctacagatttcagggataaagcacttcagattctgccggaggcgctgggcgctcgttcatattgaacagcagtgggacgaaaacgcgctcactgtctccggacatctgatgcacgagagggtgcacgacgacggattcacagaaaagcgcgggaggatcatcctttcgcgcggaatgccggtaaggtctgaccggctcggaattactggcgtctgtgacatggtcgagctgatacgtgacgatgaaaacggtatatcaatacatgggcgcgagggaaaatacctcgtgaatccggtcgaatacaagcacggaaagcctgacgacgctgatctgtggcaattatgcgcgcaggttatctgccttgaggagatgcttgtgaccgatattccgcgcgcggacatatattacggcgggcttcacgcgcgaaggacctatgagatcactcctgagctcagatccgaggtggaaaaagccgttgaggagatgaattcacttatgaagcgcggctatacgccaaaggtcagaccacagaagttctgccggagctgctcgatgtacgagatctgccagcctgggctgtcaaagcgaggttcggcgtcggaatatgtgaaaggggtgcttgccgaagaatgaaaaaactgctcaatacactctatgtcacgatccccgacacttatctgcggcttgacggcgagtctgtcgtgatttgcggcgaagaggatgtgatcggcagaatcccacttatcaacctgcaatcaatagtctgtttttcatataagggcgtgagtccggcactgctcggagcttgtgccgagcgcgggatagaggtctgctttctcagcaatcacggaagatttctcgcacgggtatgcggaccggttcacgggaatgtgctgctccgcgaggcgcagatgacgctgtcggtcgacgacgggagatcacttgaggcggcgaagaccttcatcgaggcgaagatatacaattgccgctgggtcatcgaacggacgctgcgcgatcatccgcagcgagttgacgaggacgcgctgcgggacgcgatagagcagcataagaagtgccttgaacaggtgccgtcagcggttgatagcggtgaactcatggggatcgagggagcggcggctaaggcgtatttcggagtgttcgatcagatgatcctgagaaataaggacgctttcagattcgacgagcggaacagacgaccgccgactgaccgtgtgaacgcattgctgtccttcacatacacgcttctgacaaatgagatctgcggagcgcttgagagcgttggacttgacccttatgtcggatatctgcacaagaagcgtcccgggagatgttcgctcgcgcttgacattctcgaagaattaagagccgcttttgcggataggtttgttttgtcacagataaatctcggcgcggtgaacggtgatgattttgatactaaagaaaacggcgcggtgtttctgaaggatgacgcgagaaagagatatctgaccgcgtggcagattcggaagcaggagatgatgacgcatccttttctcggcgagaagatacagtgggggcttgtgccatatagtcaggcgatgcttttcgcgagatggctcagaggcgaccttgacgcatatccgccgtttttctggaagtgaggagaaaagatgttgattcttgtgacatatgatgtgtcgcttacagacgccggagggcagaaaagacttcgccgagtcgcaaaagtatgtcagaattatggagtcagagtgcaaaattctgtgtttgagtgtgttgtcgacgaagcgcagtttgtactcctgagggacagactgaaaaaagagatagctccggagcaggacagtctgaggttctaccgactcgggaacaattataaggataaggtcgagcactacggagtaaagcgggagataagtgtagatgaaccgctgatcctatgaagtgcgaaccacaggtgtacaggatattgccaatgagttcgcaccgggaatttacgcgttgaagaggtttggagaaaggatggtgggtgaagaaaagatataatttgtgcaataccgccatgaacatgtgtgaatatttgcatgatactgtgaggtattgctgtcactccccgcgaggggagtgtggattgaaattttgcgataaaagagcttatgtcgatcatcagtcgtcactccccgcgaggggagtgtggattgaaatatccttgaccggtgcttgtaatttcctcggcattggtcactccccgcgaggggagtgtggattgaaattggttgttggttttgccaatggcggtttctgctggtcactccccgcgaggggagtgtggattgaaataagttcaaaatcagttatgccaagaccaagtatgtcactccccgcgaggggagtgtggattgaaatataagtggatccttaaataacagccgcgggagaggtcactccccgcgaggggagtgtggattgaaatctgagcgtgcggcgcccagtaacaaacgtgaatgccgtcactccccgcgaggggagtgtggattgaaatgataaaaagcgccgcgagttcgggctttcctgctgtcactccccgcgaggggagtgtggattgaaattttccgtttttgtatttgaattatagccgtcagcgtcactccccgcgaggggagtgtggattgaaatgtccttcaactgcgagcgtgtccgcgtcggtgatgtcactccccgcgaggggagtgtggattgaaatagaagagaccgcctgagccctacctcggaaaaggtcactccccgcgaggggagtgtggattgaaatatcgatggac

SEQ ID NO: 2329 - DNA, 2479 bp, Unknown
  16S sequences of unknown bacteria
ttgttcggcaatgttcaaggtttcggcccgtcctttccgccctcatacttcgcggccaggaagagcgccgatgacggcgctgccgccgcgctccttgacgcgccgcagcaaataattgtagcggcactgcagggaagagatctcgtatacgcaggattcgatcaaatccgggtcgctggtaaagttaaaatgattgtaggcaagatcaatttcccgctgcgtgcgggaaagggagcgcagcagttcgtcaagctccatgtcttctgccgtccgttttttgaaacgcaccagtttgtcacccacttttatccactccttgtaccttgtaccattaacctatgttcagtttggacaaatatgcgccgggatatacaaatgttccaaaaatttgcaggatgtggtaaaatggcagcagaaagcagcgccgatgaaaggagcaaaagggaacgatatgagatgggaagaacgctatatgcgccgggcactggagctggcgcaagaggcggcggagtgcggcgaagtgccagtgggctgtgtgatcgtgctccacggggaaatcgtgggagaagggcgcaaccggcgggaggagcggcaacgcacatcttcccacgcggaaatggaggccatcgaggcggccaacgcccgcctgggcagctggcggctgagtgaggccgaactgtatgtcacgctggagccgtgccccatgtgcgccggtgccattttaaatgcccgcattggccgggtgtattacggcgcgcgggatcgcgccatgggcgcggtgggtggtgtgagcaacctttttatggaggattatccaaactgtcctgctgtggtgggcggcatcctggcggaggagtgtgccgctgtccttcagcggtttttcagtgagctgcgtaccggggaataacaggcgctctgcgacagaaagaaacttttttcgaaatttcataattttgtaacaattcatgctttgttttgtaataatccaaaggtatcctgtgtacatgaagcaattgaacattcttcttttcatcaaaatcttccatccaaataaaaaacgggaacggcagcgccgtccccgttttttattgtgctccggcgaggtgtcagccggggtgtgcagcttgtcgcggtacggaaaagcggggcgcccaaaaagggcggccccgcagagggagtatttcagatggagcgatgcgtcgtttgcggggtggacgaaaagagaagacagaatgcaccatgcagctgccacagggcggcggccaaatatgcaaaaaaacggggcgaaaaagtcactgcgcaacagtcggccaaggcgatgagacacagggtgccgcctgcgagcaatgcgaacatggtacgccgaagcttgggccatccgcaggctgcgctggtgagaaagcaagcgctcaacgaagtggcgcacagggccagcagcggaggccaaaaatccggcagaaccggatcggaagcgtggcggctgaacagcactgccagccatccggtggagcagcaggtgatttctgccagcgccaaggcggcatgtgatggagaggatgacaacagcagaaggcagagtgcagtcagcaggcagaaagcgacagccagcaggcggaacgatccgtcggactgatcgaagtacagaagcgcaaagccccacagcgcgatcagcgcggcacacaaacgaagcagtatccgatggggagaactatacagcgtatggtgaaaggaacgggcatcctgcggcgggggcagctgtgccagcaacgcggcaagaatcagcattgcggcagttaaaacggccagcgctgccgcgggaggaaagtcggttctgggcagtgccgccgctgtgaacccaagacgcagctgcgctgcccgtaaaaaaaagccgcaaacgcccaggataggaaaaagcgcatagagtatgcgccatttggtttggtgtgccataagaacgctcctgtacaacccggcgcagcagcgcctgctgtcaatgtatcgaaataaagtaataataagtatagcatggcatctgcagatttgcaatgtgcctgctggagcatttctgcaagaagtagagaaaagggaccgcccgccgggcagtcccttgtatttttataaaggtcaggtcagtgcgtcctgctgggttgtccattcgatgaaactgcgcaccagttccaactgctggggcgacaaagtgcgcagctgttcggccacgctgcgccattcgtccttctctgggcgggcagcgcccaccagaaactcatctggtgtggtatccaatgcggcagccagacgcataatcgtttcaagtgagggaacggacgtggcacgttcaatattggataaatactggttggtaatatcgcataactctgcgacttttgcttgggtcaaccggagcttttttctgcgccgggcgattcgccgcccgatcatgtgataatccagagccaaatgacgccacccttccaatgtt

SEQ ID NO: 2330 - DNA, 4116 bp, Unknown
  16S sequences of unknown bacteria
cggccggcagctggactatcagtttgagccggaccgggaggagattctcgcgaagaccgtcgagctctatctcagcagcacagtctatgcggcgctgctggaagcaaaatctggcgaacacagcgcgagaattacagcgatgagtgccgcttcggataacacggaagagttgatcgaaaagctgagcttggagctcaaccgggcgcggcaggcgcagatcacgacagaaatttccgaaattgtcggcggcgcatcagcgctggagcataagaaataacaagcaatcacgcaggaggattctatgaaaaacggtatcgtcagaaaagtaatcggccctgtcgtggatgtgcagtttcccaatgggcatctgccggagatttataacgccattgaggtgacggtcgagggcagaaagattgtgatggaggccgtgcagcatctggggcaggacagtgtacgttgtatctccctgttttcgaccgacggcatgtcccgcggctgccaggcgacggacacgggccacccagtcacgatgcccgtcggcgaggcgacgctggggcggatgttcaacgtcgttggcgagcccattgacgggaagggcgcgcttggcgatgtgccccgtctgccgatccaccggcaggccccggcctttaccgatatcgtcccctcgacggaagttttggagacgggcatcaaggtcgttgatctgctggcaccatatgccaagggcggtaagatcggcctgtttggcggcgcgggcgtcggcaaaacggtccttattatggagctgattcgcaacatcgcctatgagcacggcggctattccgtcttcgcgggcgtcggcgagcgttcccgtgagggtaatgatctttggaatgaaatgaatgagtccggtgtcatcaaaaagacggcactggtctttggccagatgaacgagcctcccggagcgagactccgggtgccgctgtccgggctgaccatcgcggagaacttccgcgataacagcggccaggacgtgctgctctttattgataatattttccgtttcacccaggcgggcagcgaggtctctgcgctgctgggcagaatgccctccgccgtcggctaccagccgacgctggcaacggaaatgggcgcgctgcaggagcgcatcacgtccacaagagagggctccgttacctcggttcaggctatctacgtcccagcggacgatctgacagacccggctccggctacaacgtttgcacatctggatgccacgacggtcctttcccgcagcatcgcggagcttggcatttacccggcggtcgacccgctggattctacttcgcggatcctcgagccgggtaccgtgggcaagaagcactataaaacggcgcaggctgtccagcaggtgctggaaaagtaccgggagctgcaggatatcatcgccgtcctgggcatggatgagctgagcagcgaggataaaaagacggtcgccagagcgcgccgcatccagcgcttcctctctcagcccttccatgtggcggaggtctataccggcctgcccggctgttatgtccccctgaaggagacgatccgcagctttgaagcgattctgggcggcgagtgcgacagcctgccggagcaggcgttcctgaactgcggcaccatcgacgatgcctaccaaaagagcaagcagctctaatgccgcgctgaatttggaaaaggaggcttctatgcagcaggagcaattgcattttcaagtcgtgacagccgctggcaccgctgtggatgagatgacccgctatgtctcgctgccactggttggtggcagtgtcgggattctgccgggccatgcgcctttgctggctgccgtggcggccggtacggcgatctgcgacgatggcgtagaccggaaaaccttccagatttcagacgggatcgtggaagtgagcgataaccacgtgctcgtcctctcccagccggtgtaacgcagggcgggcagcggcatacgatcgtgtcatcgcatcaattggataataaaactgccatgcctgctgccgtctggcatggcagattttttacatgtacgcctggcgggcatgggggttgcctgccagattattccgtggtatactaaaattcgagaaaaacctccgccggtgcgcccggcgtaagggacggagatgccatgaaggttttactgatcattcctgcctacaacgaggaagaaaatattggcgccttgctggatgagctggattccggctatagcgcctatgattacatcgtcgtcaacgacggctcccgggacgcgacccgggacatcctgcgggctaggcatgccccgtatttggacctgccggtcaatctgggcattggcggcggcgtgcaggccgggtatctgtatgcccaagcgcatgactatgatatcgcagtgcagatggatggcgacgggcagcatttgccagcctatcttgactgcctgatcgcgccgctgctggcggacaaggcagattttgtcgtcggctcccggtatttggagcacgagggctttcaatcctcctggctgcgccgggcggggggatcgcttttaagccgttggctgcggatgctgacgggcattaccgtccgtgatgtcaccagcggctttcgcgccgtgaaccggaagggaatcgcgctgtttgcggcggagtatgcccaggattatccggagccggaagcgctgacccttgcagcgctgcgcaacctgcggattctggaggtgcccgtccgaatgcgggagcgcagcggcgggcactcttcgatctcgggcgttcgctcggtgtattatatgatcaaggtgacattggccctgcttgtgaccaaaatggcgaataaaaggaagtgaacgtgttggagattcgactgcggatcgcattgcttgcagctttggcgctctatttttgcagtatttttgtgcttttgaagaaaaaacggctggaacttcgctacacgctgctgtggatttttggcgggattcttatgctgctgctcctggcattcccgggagcatttggtgcgctgctgcgcttgatcggcgttgtggaggtcacaaacggcctgtttggcatcgtgctattcctgctgctaattatcttgatctcgatgacctccgtcctctcgcagctgagcaacaagctccgaacactcacgcagatctgcgcgcaatacgaaaaacggatcagggatttggaagatgaaaaagatgaaaccatccgccgcgatacggcgggagcttcttagctatctcttttggggcattttaacgacagtcgtcagctggggcagctatacgctctttgcctggctgttaggcaaaggcgtcgctgtcgggcagacgaagctggtcttttgggccaatttctgctcctggctctgcgcggtgctcttctcctttgtgacaaataagatttgggtgttccagagccgcagctgggcgctgcggggaacggcggcggagtttttgaaattctttttctcccgtctggcgaccggtctgctggaaattgccgcggtgccgctgttggtgcacgcagggttggactggtcgatcttcggcatcgcggggttcgcggccaaggtgatcgtcagcttgaccatcgtggtgctcaactattttgccagcaaattcctggtgttttaccggaagaaaagctgagccgaggtacctgggaggaaacgacatgaagcgtttaaacgggaagcagctgctgcgggaaaactgggcgctttgccttgcgttgctcgtggtctttgcgctgcacatgtgggccctgcgcacgctgggcgtgcaccatgggctgcagaatgatgatctgagctatttggagagtggtctgacgtttgcgaaaaccggtgtggtctccatgcattcgacgtacccctccgcgcagatcatgccggggatgacgtatctgatcgcatttgcgtctttgatttttggtgatggcatctggctctgggcggcgttgaaaatgctctgggctatttttgggacgtgtacggcgctgttcgtctatcgcagcgtgcatctgtttgcgccgaagtggtgtgggatcgcggccatgctgccgctgctgcgggcggatatga

SEQ ID NO: 2331 - DNA, 8088 bp, Unknown
  16S sequences of unknown bacteria
cggtcgtgctcgagggcggcgcgccgggcgggcaggtctcgtcgaccggcgcgattgacaatgtccccggcttcgagtcgatcgagggctgggagctcgcgatgaagctcgaggcgcaggttaagcgctccggcgcgaaaattgtctacaaaaaagttacaaacgcgatcctcgacgaaaaaaccaaactgattgtcaccgacaaatcactgataaccgcgaaagccgtcataatctgcgccggcgcgaaacgccgtacactcggtctcccaaacgagcggaagctgaccggccgcggcgtatcttactgcgcggtctgcgacggaagtttctacaaaaacaaacaggtagcggtggtcggcggcggggaaaccgcggtctcggacgccatttacctctcgaatctcgccgaaaaggtgacgataattcaccgccgcgacgccttccgcgcctcgaaaagcaagctcgaagccctcgccgcgcacggaaatatcgaggtgattctgaacgaaaacgtgatagaattgtccgaaaccgacggcaaattgtcgtcgataaccctcacgtccggcaggaaaatcccggtagacggactcttcgtcgcgataggtcttgaacctgattctacactgttcaaaggtcaaattcagacaaccgaaaacggatacatcgtgaccgacgacaagatgcggacaagcctgaaaaatgtctacgccgccggagatatccgtgagaaatcactgagacagatcgtcacggcggcggcggacggcgcgatagccgcggtgactgccgcggacgaaatacagtaaaaagcgcaataaaaaaacatggaaaacacagcgaaaaccaagaaaatttacgcggtcatgggagcgattctcgcggcgataatcgtcgcgggcgtcctcgtcatcctcatcagaaacacgggcaacagcgcggcgatagccgaccgcgacgcgcagatcgggagcctcagcgcggacaactccgaaaagtcaaaaaccatcgacgagctgggatccgaaaagtcaaaattggaagccgagatatcgaccctgaatcagaaaatctccgacctcgaggcgtccgcccgcgacaatgaggcgaaccggtccgagctcgacagtctcagagaacagctgaagctctacagcgaccagatcacagcccttgaagagcagatcgccgccggaaaagagaccgaaaagccgggagcgaagggcattatcgacctcaccgagcaggcgcgcctgatcgacgagctgaccgactatataaacaacgaatgcccgtatgtgcggaagctcgacggaactgacgacgccggaaacccggtctacaaatgggtcaggtcggaggatgtcaaaaaagaatttgtgcagaacgccgaaaagaacggcgtcgggtacagcgaggacgactggaaaaatcaggaaggaatcatctacccgaagatcagcttctattatgaggacatcgcgaacggctggacgatgggcgtcgcgccggacgaggtctacgaggcggcgagcgtcataaaagcgccgtacatcctctcggtcctcgagacgatagcccgcgacgagcagagctaccgcgacaaaatgaaagcagaaaacaagccgatagaaaagatcgacaaggacggcgacggcgtcgcggaatcggacgacataaaattttccgacccgtcctacgacatctcggaagaaatcgtctacgacaaggcaacaatgtacaaatccggctccggcaagatacagtcgatggacgacggcacggtcttcacgataaaggacttcttcgagtacacgctcctctacagcgataacgtcgcctaccagcagctcagaaaacgctacggctactcgacaatgaccgcgctggcgtcgaagctcggcacgcgcaccctcctcctcggcggcaacagcatgtcggcgcgcgacgctggaacgctcttcaaggaaatctaccgctttgtgcagaatgacgaagaattcgacaacgcctcctacggcaatctgatgaaaaacgcgatgctacagggaaatcacacggtgataatcccgtccggcgtcagtccgacccgcgcgatgcataagtacggctgggacaccggttcgtatcacgacgcggcggtggtgctcgacgaggacccgtatgtgctcgcggtcttctctgagctcgacgtcggcggggacgaggtgaacctgttcctccgcggcatcgtgaagcgtgtgaacgagatacataagaaccttaacaagtgaaaaattgagcgaaaatcaactctgttccgggaagaacggggttgattttttctgctttttatgatataattattgacagaaaaataaaaaatgtgaaagagaatgagaaaatgatacgggaatttctgaaaaaatacgggtatctgtacattccggggctgatatttctcgccctgaactcgtacatacagtcgctcgctccgggggcgctcggggaggcgatagatctccttgccgtgctgtctccgtcgcgcgacgcggttctcagacaagcagggatcatcgcgctgatcggcgtcggaatcttcgcggcgcgcttcatctggcggcttttcataatcggcaacgcgcggaggatggagatatttctccgcgaaaaattgtacctgaagctccaggcgatgccggtgaactacctccagagccacaactccggcgacctgatggcgtacgcgataaacgacgtcggcgcagtgcgcataaccttcggaccggtgctggcgcagagcgtgaacggcatcgttatcgccctcctgtcgatcttcggcatggcgcgggagacggacctcggcgtgacgcttctcgcgctcgctccggtgcctttcgcggcggcggcgacgataattctcgggggcaaggtgcagcagcgcttcggcaaggtgcagaagctcttctcgggtctctcaggtttcgtgaacgagtcgatcgccggcataaaggtgacgaaagcgttcgcgaaggaggacgtgcgcgaggcggagttcggcgaaatttccggaaaaatgcgcgacgcgaacgtgtcgctcgtaaacgcctcgtcgctgatttccccggcggtgacggtgtcgttcgggctgtcctacgcgctcgcgctgattttcggcggcggggcggtggaagccgggaaaatgggcgtcggctcgctcgtcagcttcctcggctacctgacgctcgtccagcagccgatagttcagctcggcacgataatcaaccgtgtacagcgcggtctcgcgagctacaagcgcctgaaggcggtcttcgacgagccgtcggtcccggctttcgaccgggtgctcaacgagagcgtcgcgcgcggccttgtgacgtcggtagaggtcgaaaacgtcgtcgcggcgtatgaggacccgaagctcgacgaggacggcttcactctgaccgagaacaccggaaacgacgaccacccggcgctgaacggcgtctccatgtctgtcccggcgggcggcagtctcggaatcgcgggcgcgaccggaagcggaaagacgacgcttttccagctgataatgaagctccgcccgatgctgtccggaaaaataaaaatcggcggcgtcgacataaacgacctcccggcggcgacgctcaggagcgtgaccggctacgttccgcaggacggcttcctgttctcagcgacgatagcggagaacatcgcgctcggaaaagaggtcgacacagaccgcgtgaaggagtgcgcgcgcctcgcctgcatagcggacgagtgtgaggcgtttccagatggctacgagacgcaggtcggcgagggcggcacacacctgtcgggcggtcagaaacagcgcgtggcgctcgcgagagccctctacggcgcgccgaagctgctgctcctcgacgacaccctctcggcggtcgacagccgcaccgagggacggctgaacgcgaacctgttcgattcgccggagttacagaatgtcacgaagatagtgataagccaccgcctgtcctcgctcgagcgctgcgacaaaatagttgtcttcgacaacggaagaatagcggagagcggcacgcacgcggagcttttagccctgaacggtctctacgccgcggcgtggaaaaagcaggaagaaaccgccggaggtgaggacgaaagatgagcgcgaaaaataaaatcaaagagatgaacgacgaaaagaagcggatgctcggcgaggcggacaagcagacgtcgaaggacacgacgaacgtccgcgcggagttcaaaaacctcgacaagcgctcgaacctcctgcgcctcgcgtcgatgatgaagccctacgccgggaagatgcttttctgcgcgattctcgtgctgatgataaatctcgcggagctcgtgaagccgctcgcggcggcggctgtcatcgaccgtttcaccgggacgacgccggagaacgcgctgaccgggctgatggagaatctgccggtcgcggcgctgggaatcggctatttcgccctcgttctgttcggcgcgctgttctcggtgacgcaggcgcggacgataagcggggtttcgcagtcgatactcgacgagatgcgaagaaaggtcttccgcaagatacagagcctgaccatccgcgacctcgacaagtacggaacgggtcgactgataacccgctcgacaaacgacgtcgagacgataaacgagttctactcggacgtgttcttaaatctcttccgcgacgtgtttctgctcgccggtatagtcgtgatgatgctgacgctcgactggcggctcgcgctgctttctttcctcgcgataccggtgatagcgctgctgtccttctcgataaagcgggtgatcaaggagaatttccggttcatcaagctggtgacgggaaaaatcaacggcttcttctcggagaacatccgcggaatgcgcatgatacgcgcgttcaacgcggaggagaagaagctcggcgagttccgcgagctgaaccgtcagtacttcaagggcacgatgacgcaggtgttcctcaacacgatcctgcgcccgtcgatggagctgataaacacgctcgtgatagcgcttctggtcgccgccggattcaaccggatagcgggcggcggagcgggcgcgctcgaggtcggcgtgctctacgctttcacgaattatgtaaagcagttttttaacccgataaacgacctcgcggagaagtacacgacggtacagtcggcgttcgtctcgaccgaccgcatatacgagctgctcgacgagccctcagagccgcgagaaggcggcaggacgagcgaaaggttcgccggagacatagagttcagggacgtgtggttcgcgtacacagagcgttctggcgggcttgtgagcgatccgacggaattttcctccgcggaaaaagattccgttaaaaataacagtgagcctgaccgggactgggtgctccgcggagtgagcttccatctgaccccggggacgcgcgcggcgttcatcgggcggacgggcgccgggaaatcgaccataatcagcctgataacgcggaactacgacccgcagagaggacaggtgctggtcgacggcatcgacgtgcgcgagtggaacctgcatgagctgcggagccgcgtcgcggtggtgcttcaggacgtgtttctgttcacgggtcatatcagggagaatatcgcgatgggcggcgacatacccgacaaaaagctgcttgagtcgctgaaaaacgcggacgcgctgtccttcctcgagaagacggcggacgcggagagctgcgcggtgcttgactgcgcggtggcggagcaggggctgaatttctcgaccggcgagcggcagctgctgtccttcgcgagggcgatggcgtccgacccgggcgtgctggtgctcgacgaggcgacggcgcacatcgacaccgagacagagcgccgcgtgcagcgtgcgatagacgccgcgacgcgcgggcggacgtcgatatgtatcgcgcacaggctgtcgacgataaggaactgcgacgtgatcttcagtctgaaggacggagtgatcgtggagcagggaacgcatgaggagcttctcgcggcgggcgggatgtacgctgagatggtgagaggcggtctgaggaagtgagcgggcatatccgtttatatccggaacgatatcacgacaaatccaacacgacaacaaaaaacggcggaagccgttttttgcttccgccatttcttttgcttttcactttgcaaaatccaaggctctacgcttgtaggggcgaccattggtcgcccgctcatgaacggcgccgcttaaccttccggcttgccgtctgggaattaaagcatggacttgtaaagagcgacgatatctgccttcgtcggaaccttcgggttacccggagtgcaggcgtctgccattgcgctgtccgctaagaagtcgatgtcttcttccttaacgccgacctcggtgaggtttgcggggattccgacgtccttcgagagctggcggactgcggcgactgctgccttgcgggcttcttcggtggtcatcttttcggtgccttcaacgcccattgccttcgcgatgtcgcggtacttgtcgccggtcgcgtctgcgttgtactccatgacggtcgggagaatgatcgcgttggcgacgccgtgcggggtgtcgtagacggcgccgagcgggtgagccatcgagtggacgattccgagaccgacgttcgagaagcccatgccggcgacgtactggccgagagccatgccttctctgccttccttttcgcccttgactgcggagcggaggctcttcgagatgatttcgattgccttgagctcgaacatatcggacatttcccaagcgcccgcggttatgtagccttcgattgcgtgggtgagggcgtccatgccggttgcggcggtgaggccggcgggcatcgaggacatgagttcggagtcgatgacggcgacgacggggatgtcgtgcgggtcgacgcagacgaatttgcgcttcttttcgacgtcggtgatgacgtagttgatggtgacttcagcggcggttccggcggtggtcggagcggcgatgatctggactgccttgttctttgtctggacggcgccttcgagggagcggacgtcggcgtgttcggggttgttgatgatgatgccgattgctttggcggtgtccattacggagccgccgccgacggcgatgaggtagtcggcgcctgccttcttgaacatttcgacgccgttcttgacgttttcgatggtggggttgggcttgacgtcgtcgaggatctcgtatgcgagaccggcgttgtcgaggacgtcggtgactttctttgcgacgccgaacttcatcagcgacttgtcggtgacgaggagggctttcttgaagccgcggtttttggcttcgagcgcgatgttttcgcgagctccggcgccgaaatatgaggtttcgttaaggactattctgttggacatggtggtgttttcctttcccgcggaacgtgtctgtccgcgataacagatatattttaactctttttggtgattttgtcaatgacaaaattgttaatttgaatgcgatttcgttggcgggagcacaaatagcaacgtatcactgtaggggcgaccattggtcgcccgcaccgatggcatcccgcaaaacaaaatccgatccgcgccgatggcgcaccgcaaaacaatatccccgccgaacctcgcacagagtgagtcgacgtaggagacgcggacgcgggcatcaaagaaagacactcatatcagaaaatgcgcgagtatcagtccagggcatgccctggtcgacgtaggagacgcgaacgcgggcatcaaagaaagacactcatgtcagaaaatgcgcgagtatcagtccagggcttgccctggtcgacgcaggagacgcgagcgcggggaaaaacaaaaaacacgcgcatcagaagatgcgcgtgtatgtccgcggcgactcgccgctggtgggagcgggtggattcggaccaccgaagctaaaagcagcagatttacagtctgtcccctttggccactcgggaacgctccc

SEQ ID NO: 2332 - DNA, 5442 bp, Unknown
  16S sequences of unknown bacteria
cagcgatcgaagctgcacaggccatagcgatcaatgacgatgcgatgacggcagaagtcacggaagccatcacgaacctgagcagcgcgatcgccggactggaaagcatcagactggataagagcgcgctcgaacacgagatcgatctcgtgaatgagatgctcgcgaaccttgataactatgtgccgagcagcgtagaaggcttagcagacaagctggctgacgcgcagaacgtgctggagaacgcaacgacgcaggcagagatcgacgaagcgacgaagacgctgagagaagcacgcctgaacgcgcgtacgaaggctgacacgagcgctctggaagagctgatcgcgtatgcgaagagccttgacctgagcggctacacgacggaaagcgcacaggctgtcatccagaacctcgcacgtgcagagaacctgatcactgaccctgagatcacacaggaagaagtgaacaacatggtcgaaacactgcaggcatctgtagacaacctggttgaggtcaataacagcacaagcgctgaagatacgacaaacaccgctgcagcgatgcagacgggactgtttgccggactgctggcagtatctgccggactcgttctcatgatgagaagacgccgtacagagagataagcggtcaactgactgcggggagtgaatgctcctcgcagtttttttttcgtctggtccgcagatttcgccaaattttgaacgagatgaaaatttcggtgttgcaaaggcctctttttgttataataagaatatcggatttgagaggaagggggacacgcatgcgtcagaaagactattacgaggcttatatcgacgattatgacaaagtggtcgtgtatctgtcgaaacagagctatgaaggcaagagtgatcgtttttacatgaaggacagccaggaccacttcatcaagctgaagatccattccgtcgaggatacccaggcgaattacaccaagtatatcctcggactgaacgatgagctgaccatcggcgaagagtattctgtatatcatgagcatgcccgcaagaccgtggcggagtatgcctgtatcgtgaagaccgatcgttttgatgaggaatttgattatgcgggaaatgatctggggtatgtttatgcccgcaggcatacacggtttgcgctgtgggcgccgacggcgtttcgcgtcatcttggagctgaagcgcaaagatggcgtggtggaagcgttcgagatgaagcggaccgaaaaaggcgtatggcgcacagacgtggccggggacctgaatgggatcgcgtatacttatcatgtcagagtgaatggcagctggcgggagacgctcgatccatacgcgttggccggtacggccaacagtgaggccagtgtcgtcgtggatcaagagagcatacgattccgtacatattcactgccgcgaatgaacagctattgcgacgcgatcatctatgaggccagcgttcgcgattttacgatgcattctggcatcggcatccagcatccaggtactttccgcggatttgtggaggaaaataaagtgacgaaggcgatggagaccggattttcctacttaaagtcgcttgggatcacccatgtgcagctgatgccggtctttgattttgggtcggtggatgagatctatccgcgcatcttctataactggggctatgatccggtacagtacagggtgctggaaggaagcttcagcacagatgtcctttctccgtctgcgcgtatgcgggaattcggacagctcgtcgaaaagtgccatgaaaacggcatccgggtcaacctggatgtggtcttcaatcacgtgtatgacaaaaacacattctcactggaaaacatcgttcccaactattatttcctgatgaatgatcagggcgatttttccaatggttcctggtgcggcaatgacatcgacacgtcgcggcgcatgagcgcccgctatttcgtggacacttgcgtatggatgacgcggttctatcacatcgacggcctgcgcttcgacctgatgggcatcttggacatcgccacgatcaacgagatctacttgcgctgccgtgcgatcaatccggatttcatggtatatggagaagggtggaacatgccttcgttcatgccggaagagcagcgggccagcatgcagaacaatggccgcatgccttttgtcgcacatttttcggaccgtttccgcgatgtggtgaagggcagcacttcggcgtatgagatcgcggcaaaagggtattgcaccggcaatacggagctcatcgatgtcgtgaagaactgtctgtgcgccagctgcgtcgatttcggcgcaggaaggatgttcgtcaatccgcgcaatgtcatcaattatgtggaatgtcatgacaatcacacatcctgggacaagatgcgggaatgctgccgcggcgaggaacgatggatccgccgccgcagacaagaaatgatgatcgccatggtgttgcttgcacaaggcgttccgttcctgcacagcggacaggaattcgggcgcacgaagcatggcatcgggaattcttacaattcaggggatgacatcaacgcgctggattatgaccgccgcaacaacaatcgagaaatggtcggtcatgtgaaacagctgatccgtatccgccgcgatcattcctgtttccgctacagcatcacggagtcgctgtatcatcgggttgccttcgatgatatcgagcgcaaggtgctgatctataaggccagcgacggggaagagtcgatctggacattcttcaatccgaccgggtcgccattccactatcatctggatacgcctgcggagatcttgtattacaatggtgaggaaggatatcgggagcaggacctggagatcaggccgtattctacgatcgtctgtctgctggattgattgaaagaaatgaaaagaaccgcagatcatgtaattttttgcggttctttttacagaaagaacattcagaaattgcagtgttgatttttgccataaaagcgattataatgagtaaaatttcaaagagaaggagtgtgaaagtgtggcaactttttttaccgaaccgtcacgtacatttagcgagtatctgctggtgcctggatattcttccagcgaatgcacaccggcaaatgtttccctgaaaacaccgatcgtgaaattccgcaagggggaggaagaatccccgctgagcatgaatatccctatggtatctgcgatcatgcagtcggtatccggcgagcgcatggcgtgtgccctggcgcgtgagggaggcatctccttcatctatggttcacagagcgtggaaaatgaggcagccatggtgcgtcgtgtcaaggcgaccaaggcaggctttgtccgcagcgattctaatctgccggctgacgcgaccctggctgatgtgctggccaagaaagctgagaccggccattccacgatggccgttactgaagatggcagcgcggagggaaagctgctgggtatcctgaccagccgcgattatcgtgtctcccggatggatccctccacaaaggtgaccgatttcatgaccccttttgacaagctgatctgcggaaaggatggctgcacgctgtctgaggccaacgatctgatctgggagcataagctgaatcagctgccgatcgtggatgaagaaggacggctgaaggcgttcgtcttccgcaaggactatgattcccacaaagagcatcccaacgaactgctggacaaggataagcgctatgtcgtcggcgcaggcatcaacacgcgcgattatgctgagcgtgtgccggcgctggtagaagccggcgcagatgtgctgtgcatcgattccagcgagggattcagcgaatggcaggcaatcacgctgaaatggatccgtgatcactatggcgacagtgtgaaggtcggtgccggcaacgtggtcgatgcggaaggcttccgcttcctggctgaggccggcgcggattttgtcaagatcggcatcggcggcggttcgatctgcatcacccgtgagcagaagggcatcggacgcggacaggcgacagcgaccatcgaagtagccaaggcccgcgatgagtatttcagggaaaccggcatctatgtgccgatctgctcagacggcggcatcgtacatgattaccacatcacgctcgccctggcgatgggggcagactttgtcatgctgggacgttatttctcccggttcgaagagtctccgaccaagaaggtcaccatcaacgggacatacatgaaggaatattggggcgaaggcagtgcccgcgcgcgcaactggcagcgttatgacatgggcggcgccaacaagctttctttcgtagagggcgtggactcctatgtaccatatgccggcgcgctgaaggataatgtcgatctgacgctcagcaaggtcaagcacacgatgtgcaactgcggtgcgctgaccatcgaggaactgcagcagaaagcgaagatcacgctggtctcttcaacgagcatcgtggaaggcggcgcgcatgatgtcgtggtcaaagacaatacacttgacgcaaaggtacagtaaagtgaagatatggggagcgatctagatggatcgttcctttttttactgaatgaaagtttctttcaaaaacaattgatcatatttttcagaaagggttgacaatccggatcaaaaggaataaagtaaaagcaaccagtgagagagagataacacttgcaacgcgcttacagagagctgatgatgatggaaattcagcagagatgcgggcaggcaaatggactcttgagggcgaaaggaaagggcatgttcccgagtatgtgagacggttgtccccgttatcggactagagattggttaggatcttgaagagcgggttttttatggaaaaaaaccaaatcaggtggtaccgcagaggtgattgaacacatctgtcctgaagccggaaggcttttgggcaggtgtttttttatgagaaggggtgatcggcacatgagtgcgcaggaatgggatgactggcaggaagtcaggaacaacacaggagaaaaatagtcggaatcgacaaggaggaaaatgagatgaaacagatgaagaaactgatgatgagcgccattctggcagctggaatgttaagcgggtgcggaagcagcacaggagaggagatgccaaaggtcagcgtcgcacagatcatggcacataagtcgctggacacgatccgcgacagctttgacgcagagatgaaggagctgggctatgtggacggagaaaatatcgacctggactatcaggatgccggcggcaacacgtccacgctggagagcatcctctccacctttgctggtgacggtacagatgtgatcgtggccattgcgaccccgacggcacagggggcggcccgctatgccgcggactccttgaaaacgggcaa

SEQ ID NO: 2333 - DNA, 13688 bp, Unknown
  16S sequences of unknown bacteria
ccagaccggcgagccgtggcacctgtcgtgccacggcggtaaaaccccggccaacccgcgtgtcttcctacacccctgcgcgccaaaggcgcacagtccggggtgcagggcggcgagaggaagcgcgcatccagtggatgcaaccgccgtaggcggttagcgaccggcagccgtcaaccgaaacgaggatttggcacggcagtgccaaagacgatgattgaggttgcgaatcactgcccctgctagttgacggtgatgccggtgagctctttccactttttgcggatggcgttctgattctggacaccatagttggggtcgttcttctgacattcgtccatgtcgcgcagaaagtgaacgcagaggtggccgtcaaaaccgttgttggaaatgctgccgctcaggtgaggtacgttgtgggtgctggccagcgtccatacgccgctgggaagctgaacgtataccggcttgggcgtccaggtgtttttgttgccgaaggccttgtacatgatctgcgtgtccgtctcggtgagaggttcgctgtcgcagtggcggcccagactgtagaccttcagcgtccattgcagattggtggccggatcaaaaacgatcagcttgtttccgtttttcagggagggcttcacgtcgttgtaccagtgcagaagcttgacgctgctgacactggggccgttggccttgccggtgctgtcgtcgatggtcgggatgttgtcactcggatccgcttctttggcgctgccgctgtagagcagcttcagcgtggcacttccggcaacaccgtccgccgtgagcccgttgcgtttctggaactgggtgacggccatctgggtcagcgcgccgtaggaaccgtcggcgctgacgttgtagcccagcgctttgagcgcctgctgcattttcttcacctcggagccggtggaaccatagctcaaggtgccttcggcataggtctgatcggaagaagagtcagaggaagaattgcccgagccgctgtttgacgtgctgccggacgtggcggacatcagcaccgcatgggtgcggtaaccgaccagaccgtcggcggtcagcccgttctgtcgctggaaagccttgaccgcagccatggagccggtgccgtaaacgccgtccacactgccggtgtagaagccgaggtcttttaacttctgctggacggagatgacgtccgtcccggtgtagcccttgcgcagggtgcgggtaaagccggacgcagagctggaggaggaagaactggacgaggaggaattgtccccggaaatgccgctgttcacctgagaatagagcagctgctgagtcttggtgcccgcaaggccgtcggcggtcaggccgttggcccgctgaaactgaatgacggccgccctggtgccgctgccgaatttcccgtccacgccgccggtgtagaaccccagcagcttcagggcgttctgcaactgggtgactttgctgccactgtcgccggattgcagggtattgggattcgtagcggtgtagttcccggaagaagtgccgctggaaacgccgctgttaacggcatagagctgcgccagcgtcttcacgccggccttgccgtcggcggtgaggccgttggcctgctgataggctttgacggcctgctcggtgcctttgccgaatttgccgtccgcccccttggtgtcgtagcccagcgcgatcaacgcctgctgcagctgcagaaccgccgtgccgcgggagccaagcttcaaagtggtggaagcggccagaccgggcagggaagcggtcaaaagaacgcaggtcagcagcgcggcgcaaaaacgccggtgtctccgaactgaatgcatgtgtttcatcctcctttggtacccgcgaaaaggcccatcggcggcgggcataaatttagtatagtcatttgtttcgaaaaatcaaatgatattacgactttgttacgaaaacgtaatatttgcagagcaaaaaaagggagatcctgatttcacaggggtttcgccataaaggctgaaatggttgcaaattgagccaaatatgctataatgaatgcggtgggctgcggcccgaaagattcgcaacagaatacacacccggtcgatccatcaaggaaaaggaggaaactcacccatgaaaaagtttcttgcatttctcctcgctctgaccatgctgctgggcgtcggtgctctggcagaagaagacgcgccgctgttccagcaggatgtgatggtgctcttcaccagtgacgtgcattgcggcattgagagcaacttcggctacgccggtctggccatggtaagggacgcgtacaaaaacgctggctatcatgtgctgctggtggacaacggcgactccattcagggcgaaccggtcgggaccatgaccaccggcgaagcgaacatcaagctgatgaacgccgtgggctacgatatcgccaccatgggcaaccatgagttcgactacggcatggagcgcttcttcgaactgtccaagatggccaatttcccctatgtcagctgcaacttcaacaagggcggcgaattgcagttcgctccttatgttatcaaggagttcgacggcgtgaagatcgccttcgtgggcatcagcactcccaagaccctgacctcctccacccccaagtacttccaggatgaaaacggcaacttcatctacggcttcttcgaggacgagaccggcgagggcctgtacaacgcggtgcagaaggccgtggacgacgcccgcgccgagggcgcgactttcgtggtggcgctggcccatctgggcaacgaggacgaatgccgtcccttcacctatgcggacgtgatcgccaacaccaccggcatcaacgccctgctggacggccacagccacgacaccaatcatgtggaaatgcgcaacaaggcccgtgaaaccgttctgcgtcagggctgcggcaccaagatggaaggcatcggctatttgaagatcgctgccaaggacggcgcgatggaggccggcgtcatgatgtggaacaacgacgatttcaacgccacgcagctctatcagctggacaccgacgtgaccaaggccgtggccgaagccaccgaaaccctgaacgtcaagctggcggaggtggtagccaagaccgatgtggagctgaccatcaacgatcccgtggccaagaccgaggacggcaaggcggtccgcatcatccgcaacgcggagaccaatctgggcgacctgtgcgccgacgcgtaccgctatgtttccggcgcggacatcgccttcgtcaacggcggcggcatccgtgtcagcatcaaggagggagatattaccctgaacgacatcctgaaggtgcatcccttcggcaatgcgctgtgcgtgtgcgaggccaccggccagcagattctggacgcgttggagttcggcgccaaggacgtgcccggcgaatttggcggcttcctgcaggtgtccggcctgacctatgagatccacacctatctgccctccaccgtcaagatggatgaaaagcggatgtttgtgggcgtggaaggcgaataccgcgtgaagaacgtcatggtgggcggcgaaccgctggacctggaaaagatctacacgctggcttcccacaactacatgctgcagggtcagggcgacggctacaccatattcgaggacaacgtctatacgcaggaaagcgtgatgctggacaatcaggtgctgatcacctacatcaccgaaggcctgaacggcgtggtcggcgcggattatgccaacccctatggtcagggccgtatcgtagccgtcgagtaagccggcaggggcagggctcctgcaccccggactgcgctggaaaagcgcggcgaaggcttctttgcaggaaggcctcgagggcctcggcaagctgcaacgattcaaccaaaagaagggctgtccccacatgggggcagtcctttttgcatgaaaaaacgacccccgcgcgggggccgttggcttgtcaaaaaagctcgcctgcagcgatctttttcgccagagactgtcggtactgtttgcgccgaaggcgcaaactccccgcccgaccgggtgctgcgcacggcgaagccttacggggccatttgccgaccgcaggtcagccggtcgatacgaatacagtcagaggggctgtgacccccctctgacagctcccccaaaggagtttttcgacagtctgacgcccccgcgcgggggtcgtgatgggctttcattcccggattacagaacgtgggcgcactcttgatcgaagctgataaaagcgtcctcgcctacggcgaacacccgcttgttgatggggcagttatcgctgatcttcaccagcgtatcccccacccgcacatggtagttctggtagctgcccatgaagcagctcagttccaccttgcaggggagcattcccgtttcgccgatgcggatggcttcggggcgcaggacaatctcgcactcccggcccgcttcgaacgcgccgtccgtggctacgaggcattcccgaccgtccacatccacaacgcaggcgttgtcccgcattcccttcgagagccccttgaggaagttggcctcgccgatgaagtccgccacgaattcgtccaccgggtggtagtagatatccatggggctgcccatctgcgcgatgacgccttttttcatgatgatgatctggtcggagatggccatggcctcgctctggtcatgggtgacgtagatggccgtgatgcccagcttttgctggatgcggcgaatttcggtgcgcatactgacgcggagctttgcgtccagattggacagcggctcgtcgaacagcagcacgccgggctctaccaccagcgcccgggccagcgccacgcgctgctgctggccgccggaaagctggttggtcatgcggctttccatgccgcccatttccaccagctccagtatttccttcacccggcgctcgatctcgggcttgggtaccttgcgcagacgcagaccgtaggccacgttgtcgaacacgttgtagtgggggaacagggcgtagctttggaacaccatggcggtgtcgcgcttgttaggggtcagggcgttgatgggttcgccgcccagatagatttcaccctcatccgggctttcgaagccggccaccatgcgcagggtggtagtcttgccgcagccagagggacccagcagggtcacgaagctgcccggctgaatatccagcgaaacgtcatgcacggcataaaaatccttgccggtcttgggatccttgtaaattttggaaatatggtcaaggcgaacgcctttgctctctttaggcattttcgctgtccccctttagctttttgctggttccgaaatgcttgatgacgaagttcatcaccacgatggacgcatagacgatggcgatcaggatggtggcgtaagcgcaggccacgccgtacttgcccttctcggcaaattcgttgatctgagtggtaatgagcaggtattgaggcgttaccaacaggatgatggcgctgatggcagtgatggagcgcacgaaggtggtcaccagaccgctgaggaagctgtccttgatgaggggcagggtgacggaggtgaagaccttgccgctgcctgcgcccagatcgtaggcactttcctcaatggatttgtcgatctgccgcaacgccgagataccgctgcgggtgcccaccggcagactgcgcacgatgaacacgatgaccagaatcgcgccggtgccatacaggccctgcaggaagcccgtcttgaacacgccgttggcaaagccgcggatgtagcccacgcccagcaccgtgccgggcacggccatggccagcatgctgacgaactcgataaagcccttggagtggaatttcttcttgaccaccagatagctgatgatcatggaaaacagcgccgtaatgggcgaggcgatcaggctgagcacgaaggagtcccggaaggccttcaggccgctgtatttgaacatgtactggaagtgcttcagggtgagggagtagtcacggccccaaagcttgaacagcgcgccgaagggaatgctgatatacatcagcaccacaaaggcggagaaaagcccgcacagaatggacaggggacgggtcacgctcttgtcagcgatgagcatccgctcccggctggccttgccggtcagggtggcgtaggtgcgcttttccagatagtatttctggatcaggaacagcaccagcgtcaggcacagcagcaccacggccatggcactggcgcccgccttgtcgtaagcgccggtgacctgcaggtagatggtggtggccagcgtgtcatagctgccgccgatcatcatggggttggcgaagtcggccaccgattcgatgaacgtgaccagaaacgcattgcccagacccggcagcatcaggggcagcgtcacggtggtaaagaccttccaacggctggcccccatgtcccggctggcttcttccagcgaagggtcgatgtttttcagcagacccttgagcatcatgtagcacacagggaagaaggtcaaaatttgcacgatggcaataccgtgcaggccgtagatgtcgctgtcatagatgtgcagcaggctgcgggtgatgaggccgccgcggccgaagagcaggatcatgctcaggctcagcacgaagggcggggaaaccacgggcagcatactgaccacgttgaaaagcttgcgcacgaaacgggagcggatgtctacatacacgtccacataggcgaacagaagtcccagcaccgtggagccgatgcccacgatgaagcccaagcggagggtattggtaaaggccgtgcggaaggtgcccatttccagcacccgcccgaacacggacagggtcagaccgttgtcgccccagatgctgtcgatgagcagcatgctcaggggatagagaatgaataaggtcagaagaatgacaaggatcacgatggtggtaatcaaaacggggtcgccgaacagcttcttgcgatccagcttcgcactttgcgccttgagcaatggagtccccccttatggaagtgccggcggtcaggccgccggagggtcgtcaggatactaaggaaggggcggcgtgcgccgccccttcacgaaagttttgcggggtgagattactcggtcttgaaacgatcgtcggcggcagcgcccagagcgttgaagaagtcctcaacgtacttggaggtgttggccttggcgtccgcaaagtcgtacttcatcacgttgtcgggatccagaccgaattcggccgcttccttaggctgctcggcgttgtcgatcaccaggaactgatagctctcgttttccttggcgatgttgacgcactcggggctcagagcgaactcgatccacagcttggcggcgttctggtgcttcgcgcccttgaagatggcggtagcgccgatctcaaagctggtgccgctcttggggatcaccagagagatgttgtcatacccgtccagaatctgagtgatgccgtcatgcaggaagccgataccgatggtgcattcgccgatgccgacctttttggaggggccggagccggacttggtgtactgggcaatgttcttgtccagttccacaaagtacttcatggcttcgtcatggcccttcatctgcaccatggtgttgatgaccagcttggcggtgccggcggtgttggggttggacatccagatcaggcccttatattcgggcttgagcagatcgtcccaatcctgaggcgcttccagacccaggcgctggagttcttcggtgttgaccatgaagcccaggattcccttgtagatgccgtaccagtagccgtccgcgtcgcggtacatgctgtccagcaggtgggaggcgttcttggcttcgtaggcttccagcagacctttggcagcggtctcgttgtaggggtcggtggtgccgccgaaccatacgtcggcggaagggttgccgttttcttcttcgatcttggcggccacttcgccggtggacaggcgctggcggttcaccttgatgccgtacagttcttcgaacttatcgcaggcggcgttcaggtaggcttcttcgcagctgccgtaaacggtcagctcgccctcttccttggcggcggcgatcagcgcttcgtcaatgccctcggcaccggcaaagctgcacagacccaataccatggtcagagccagcagaatggcaaacagctttttcatggatagatacacgtcctttcccaatgttccgatttgattttttccgtacgtcttatcggtttgagtatcataacacaatcgtttgcatttgtcaaatcagcatcaaaattttctgaaaaggacaaaagaaaggccgagatgtcaatttgcatcccggttctctgatggggaaaccaaagaagtgcgtttgcactttgaaaaaagaacaatgcagtggaatgttttatgaacaaaccatcaccggcggcacaatagaagcaaaaccgtaacggctttggagccctgtaccgaccaaccggaaaaatacatgattagaccggcgagtcgcagtcgacctgcatgtcgctctgggctcctgcacgcagctcgggggcagggacgctgcacttggcacccgccgatcttttgattcaactggcgggaaaccacactaaacccgcgagccgcgaggcctgttgccgagcggcggtaaaacctcggccaatccgcatgtccccctacgctcctgcgcgcaaagcgcgcagtccgaaaggggctcagccccaaaagaggcgggtcgctcaccacaacgacccgcctccggcaagggaaaaggaggaattgggggaaaagccgctgcgggcctcctcaagcctgcgcggtgcgtggaaggagaagaccgccgagggggcgccacaaacggctttccttgaacgcagatacagcataccaaaggaatatggattttgtgtgaacaaaccgtaacactgcggaaaaggtttgtgactgcctaaagaagcttagttccccttcatcaccacgccgcccgcaccgaaaagagaacggaaaacggaaagcagctcttcgctgccatcgcaccagtagctttcgtctaagagaaaggcgatgccttcgtcctgaattttgacagtgacgggcacggggccggggtgggactggcagagggacttgatctcctccatgcgggcgcgagtatccgccagcaggtaaagcttccgttgggactgagccgccaacttcggggcggaaaggggacgggcgggagcatccgccctgccccgggaggtcgggacggttttttcgggcgaagcggctttgatggctgcgttggcggcgttcaggggacgaaccgcgtccaccagcagcttgggttcttcttcttcccggaagctgagcttgccgtccaccaccaccagactgtccgaggaaagcatgggcgcatatttctcataaaccttggggaaaaccagcccttcgatggagccggtcaggtcctccagaaccagaaagcccatcatggagccctttttggtcactttgccccggcactgggtcaggatgcccgccatgctgacggaaaggccgtcgtactcctgcccccggctctcgctgtccgcgtcctccatgacctgcgcaacggtggtgaagccgctgcccagcaggtcgcgcacctcgtccagcgggtggccggtgatgtaaacgccggtcatttccttctccatgctgagaagcaccttgcggggatgctccggcagggaggggatccggaagggcggctgaggcgcgctgccgccgtccggccccgccagatcgaacaggctcagctggccggtcaggttctggcgcttcttttgagcggcgtcgtccatcagctgctcgtaaacgctgagcagctccgcccggttatggcccagcccgtccagcgccccggccttgatgaggctttccaccgtgcgcttgttcacgctttcgccgcaagcgcgagtggcaaaatcaaaaatgtcggtaaaggggccgtgactgcgctctttcacgatcagctccactgcgccctgtcccacgtttttcacgccgcccagaccgaaacggataccgggcgtaccccggctgtcccggcccacgctgtatttccagacgctctggttcacgtccggcggcaggatcgggatgccgtgggcgcggcagtactggatgtagcccgccgccttgggcagattgtccatgacgctgttgagaatggcggccataaagggcacgggatgatgcagcttgagccaggccgtctgcacggcgaccagcccgtaggccgccgcgtggctcttgttgaaggcatagctggcaaaggaggacatttcgtcgtaaatatgctcggccacctgccggggcacgccccggcggacgcagccgtcgatgaccacgttgccgttttcgtccaccatgccgtccacgaaatactcccgctccttggccatcacgtcctttttcttcttggccatggcccggcgcatcaggtcgctgcggcccagactgtagcccgccagatcccgcacgatctgcatgacctgctcctgatagaccatgcagccgtaggtgacctccaaaatgggcttgagcaggggcgtttcatagtggacggtctccgggtcgttcttgcccgcaatgtagcggggaatggactccatggggccgggccggtagagggagatggcggcgatgatgtcctcgaagcaggagggcttcatgttttgcaggaacaggcgcatcccgccggattccagctggaacacgccgtccgtgtccccggaggagatcatgcggtacacggtggggtcgtcggtggggatgtcctcgggcttcatgtccaccccttcctgacgcatcatgtccagcgtgtcccggatgacggtcagagtacgcagacccagaaagtccattttcagaaggcccagccgttccagcgtgcccatggggtactgggtggtgatgacgttgtcgttggtctgcaaaggcacgtactcggtgacgggcttggcggtgatgagcacgcctgccgcgtgggtgctggcgtggcggggcattccttccaatagaagggaggtgtcgtaaagctggcggacccgcgggtcgctgtgaaccagttcggccagctgagggctgacctccagcgccttggagagggtcatgtccagcgagaaggggatggccttggccacctgatctacggcggcgtagctcatgcccatgacccgtcccacgtcccggacgacggccttggccttcatggtgccgaaggtgatgatctggctgacgtggtcgctgccgtacttccgggccacatagtcgatgacctcctgacggcgttcgtagcagaagtcaatgtccagatcgggcatactgacccgctccgggttcagaaaacgctcgaacagcagactgtatttcaggggatccagcatggtgatgcgcagggtgtaggccacgatgctgcctgcgccgctgccacggcctggccctaccatgatgccgtggctcttggcatagttgatgaagtcccatacgatgagaaagtagtccacatagcccatgtgggagatgacggaaagctcatattccagccgctggcagggctcggaggccgggtcgtcccattcgtccgggtacagggccttcagcccctcgccgcacaggcggcggagcatttcctcggcggtttcgccgtcgtcgatggggtaacggggcaggtgcagatggccgaagtcgaaggtgacctgacagcgctgggcgatcttctggctgttttcaatggcctcggggaagttgggaaacacggcgcgcatttccgcttcgctcttgacatagagctcctcggtgttcatgcgcatccggctttcgtcctgcagggtcttgccggtctggatgcacagaagcacctcctgcgcctttgaatcttctcggttcagatagtgacagtcgttggtgaccaccatggggatgcccgtttcctgcgcgacgcgcaccagccggggcagcacggtcttttcctcggggatgccgtgatccatcagctcgatgtagtagtgatccctgccgaaaagctcctgcatttgcagggcgtaagccttcgcgtcgtcgtagcggccctccagcagcattttgggcaggtcgccgctcagacaggcggacaggcagatcaggccctcggtgtgctgcttcagcagttcgtagtcaatgcggggcttataatagaagccctcggtaaacccggcgctgaccagcttgatcaggttctgatagccggcgttgttctcgcacaggaggatcatatggctgtattcccgggccgcgccgcttttttcgaagcggttgcggcagatatagacctcgcagccgatgacgggggtaatgcccgcgtcccgacaggcgttataaaaatccaccgcgccgtacatcacgccgtggtcggtgatggcggcgtgggtaaagcccagttctttcaggcggctgaccagcgggccgatgcggttggcgccgtccagcaggctgtattcggtatgcagatgcagatgggcaaaggccatgagcgttctccttttctttcttttccgggtttattgtatcacccggagacggcttcacacaacattttcagggaaaatgtcgggaaaacggaaattttccttgccaaatgggaaaaagcgtgctaaaatagttaagctgttatgaatccaaacatcccgttaggaggtgtaatgatgggcaagttttgcgaagtgtgcgaaaagggcgcgatgagcggccacaacgtcagccactcgaaccgcaagagcaatcgcgtttgggctcccaacgtgcagaatgtgcgcgttctggtgaatggtcagccgaagcggatgaacgtgtgtacccgttgcctgcgcagcggtaatgtgcagcgtgcgctgcccacgaaatccaacgtggaagcctgatggggttcgaaattgtgataaaaagacaccgcttttccatacagctggaagagcggtctttttatatttcgataaagagttgaaaagcaaaggcatatacgttttttcaggggaataagggcaatagcattttccaggctaaaacagcatccctgcggaagcagctccgcagggatgttgttgattggccttagtacagcttggctccggcggggatgtgatcgtccaccatgagcaggtggagcttttcctcgccagcttcctgatggacggcggagatcagcattccgcaggactcgatgcccatcatgggacggggcggcaggttgacgatggcgatgcaggtcttgcccaccagctcctccggttcgtaataggcgtgaatgccactgagaatggtgcggtcggtgccggtgccgtcgtccagcgtaaactgaagcagcttcttggacttcttcaccgcttcgcaggccttgaccttcacggcgcggaagtcgctcttggagaaggtctcaaagtccacataatccttgaacagcggctcgatctccaccttagagaagtcgataggctcggccacggtttccgcagcgggagccgccgtctcgggagccatttcttccgccgccttggcggagggagcgggcatgccgatgggtttcatggtggggacgatttaggacatcgtttcaattcttgctataacccaacatagttcaaaat

SEQ ID NO: 2334 - DNA, 9975 bp, Unknown
  16S sequences of unknown bacteria
tcaagaatcagttattacttttttcagcacacgctgcgcatgccagcttgcgcagcgccgaggcgctgcgcaaggggcgtttcagttgtgcaaaattacatcagcggttccatctccagcacggggtggcccttttccgtcaggaagttcagcagctcctcgcagtcggtgcagatggtctcgtcggcgatatagtccgcgaagttttcaatgccatagagctccatggccgtcttgttcagcttttcggcaacgtcgtccttcagctccttcggcatccagacgatgcgcttgataccgccctcggcgtggataaacttcttcgaggagatgaagtgccgcccatggcccatgtagcccggcgtctgaacgccgccgccggtgcaggaggccagctcgccgaaggtcatgcccgccggggtcatgcccttgaattcgcggttgacgacgataaagccgttggacatcggctcgatgccgcagatgcattcgaagcagccgcaggaggtcatcgggtcttccagaatggagtacagcgtcacagaatcgacggcgccgtgggtcgcctcgttgaccatcttgttgaccgtctcataccggcccgtccgctcgtccaggcagccctccttcataatgggctggcaggggccgttggggttgagctcgtgggtcgccttggcgtccagccaagagacagcaccgcacaggcccagccgctccggggtgacgacgcagcagtgcgccggggcgaaggactggcacaggatgcaggtataaaagcggtccaccgcctcatctgtcatggaagccaggcggtcgtctcgcttgttataccgcggcatagcctcttcgttcaaaatcttttcgacctgggcgcgatccgtcaccagggtcacctgacacttatcgacgacggcatcaaattcatccatgatcatatggtacagcacctcggcaaagtccttcagccgcaggcccttttccagcgcgtcgttactgacgcggatgcggatctggttgcgctggccagtgtgcatgacgccttccatgtagttgaaccaggtgtggatcttccgctcgatgacggattcgaagtccacctgcatcttcttgcccgcgacctcgacatacgtcgccagggcaaattccttctcgccgctgtccagatcgctgccgatgatggtgatcttatggtcctccagatcggccatgtcccgcatcgtgaccagctcgcaggtcggattcttgccggaccagaactgggccgccatatcgctcttgcggatgatctcgccctcaaacgcagcggcgaaggccaccgggatgggcaactccttggacttgatcttgatattgcgcagctccagagacttcttgaccgtctcggcatggtcgcagacagactccagcgcgccggggacttggttctccgccagatcaatatccacgacgaccgggaagcccagtgcaatggcccccgcgcccgcagagacgacgacggcgtcgatggcgccaaaggtattgacaaatgccgggacgcgttccttcgtataggtcagcaaaccggccaggtcgccaggctggacattgccgaagatcagcgccgcccggatggcgacggtgacgacatggatgaccgccgtgacatcatgccccagaggcacgacacgcagctccagacccatcttgacgccgcccgcggcacactggtcgatgacctcgccgatgaggaatgtcaaaatgcccttggactggtagtccttgacgacggagacgacatcggccggatcgtctgccttgcccaggacgacagccacgccagggatatcccccgtgaccagcgggacacccagagaacgaatgaccgggtccgggacaaagccgatgcccgcttcgttttcatagggggcagcgccgtccacatatttcaggccctccagaatttccgcgccgacggcggtggcaaggccggcatttagggcctggcccaggtcctcctggttcgtgatcaggctcttcaggacgcctacgcacgcgggcaggtcgcccagggtcttgaccttcacgccggtggctgcgtagatcgtggggaaaaagtacgccgtatccgggaaggcgatctctttttccgcgccgtacttggcgatcgcgtcgttgaccgcgccttcggtcagcccggcgacggcgttggagccaccatagataagatcggttaatgcactcataatatcctcctcaagtttttgtcaatcgtcaccggcgccgcccaaggctacggccggtctatcaaatgcaaaggcataagaatcacgatgcaagtaagaatgcgaaaggaccatgcccggcccccgggcatggtgtttcgcaaagctttagaagtccagataggaatcggaatacagctcgttgtttttaaagatgtcgcaggatttgatcgtctccatcaggcgacggtcattggggttaacgatggcggaggtcaggccctgcatcatcgccatggcgaccagcgccgaatccatcaccgggcgcaccgccttcggcgcgccgttggagttgttggagaggccgccggtggacttcaggccctcgtcgctgaacatcttgatggcctccaggacctccatctgcttgtcctgcatgcccttgacgacgaggaacagcgggtcgaaccacaggtccgtcgcctccatacccagctgcaggccgcgctcgagcattgtatggcagtgggccatacgctcgtcattgtccttggcgatgccgtcggcagagcacagggcgatgacaatggcgtcgttatccgcggccaggtcgatgttggaaattctggaaccggcgtcggcagagttgataatgggcttgccgttggaccggttatagacgcggatgcccgcctcaatagcccgcttgttggccgtatccagggccagcgggacgttattgaagttctcctgcagcagcttgacagcccaggtcatcagctgcgggccgttggactcggcagggccgatgttgacatccagatacgtcgcgcccgccttaatctgctcggctgcccgcttcaaaatgggctccggatccatattctccatcgccttgtggatgaccggggagatgcagtggatgcgctcgccgatggtgacgaatttcttcgaagccgggtcatgatgcccataggtcacgcccatgtcgacgaccttaatctcggggatgacaatcttgtcgaaatccaccggggcttcggccttggccgcctgcttctccgttgccgcggccttggccgccgcgacagctgccgccgccttcaaatgctcgccgtccttcaaatagcggaccagctcgaccgcctcgcgggtgccgacgacaacattccaatccggcagcttatcctgaatctcgcccttcatgacggcgaccttgcccggcaggaccagggtccgggagttgatcttattggcaacgtcaaattcgtccataaactttttgacggtgctggaagagaatttgcccgccgcccaagccgtcaggacggacatgccggaggcgtcggtgatgagcaggttgaccggcaccttcgaccgctccagctcgccggagacaaggaagtacgtcagcgcgaagtcgaccgtcagcaggcacggcgaatccgccgtcgcgccgttcatcggataaatgccgggggcgaccttcatgggcttctgcgggtcagtatagatgttctggcgcaggccgaacagcggcagcgcctgggcataggacatatgctccatcaccaggatggagccgtatttgacggtgaacagcgacgccagcgccgtctgcagatgcgcgtctccccaggccaggcgggcgatgttcacgatggagggatagcccagcgtccggacgccgtccagaattgcgccgcggcgggcttcgacggcgttggcaaacgtttccttgaccgtcttaccggtgacatcgaggagcaaattcttgttgcccgccttctccagcttttcaaccgtgtcgtaaatctccgacaggctctcgccgccgacggccaagatggccttgccgccaaccgcagcctgcatggcctcccagttctgcgcgttgacgccgtcaatgacggcctcggggcacgctgcgatgacagccgccgcggcgtccgggtccgtcgtctcgacgatgacgccccggccggtggccgccgccttctgagcaaagcgcaccagcgtctccgtatcgcgcccggcgtcgtgcacaaagacaaattctacatattcccgctcgccgatgcgctcgtaatcaacttttttcagctgcgccagcgctgcatctgccgccgcgtcgtccagacagtcgcccacctgcacggcgtagacattccggttgaccagcgtcttctcatgccggaacaggacggtctccccgcccagcttatggcccgcagccgtgatggtcttcatcggcggcgccgtcgcctcggacagcagcgcgatggcctcttcggacatatacgggcactttgtaatcggcagtgcgccctgggctaccttcatgcagaaggccatacaggtcggcacgccgcattccttacagtttttcttcggagacagcttaaaaatatccaatcccttgacagccatagctacaacctccccctcagaccaatgcgtcgatcattttgccgatggcggtgatggatgccggatgccgcaggatgacagcgtccgacccacaggccagacaggccgccgccgtggcgacctccatgtcgatgccgcggttttccgcgtcgccccactcgggcatctccgcttcgggcatgaccgattccttcacgccccaggtctccggcgagatgggcgtcatgatcggcatctgcagctgggcatcgttctggcccagagccgccgcacggatgcggtccagcgtcgaggcgacgtattcaaagccatagcccgccgccgcgctgcccgcctgcatgacgatggagccggggttgacacccaactgggtcatgacggtattgagctgctttgccaggttgatatccaccgccgactccgcgccgaccttctggccataggccaaggccgccgaagcgccgactgccttatagttctcctcccgggcggagaggaccagaatattcttgcccgccagcgcctcagaaaccttggcaaagatctcagcgtccttttccacattcttgcagcccaggacgaccaacggcagcgcaatgcgatcggccacttccttgcacagggcgacgcattcatcgaccgaccgattcgcaccgttggggtcggccccctctaggtgcagggcgatgaacgaaacatgcgccatcgtctgggcccgctcggccatatcggcgacggtggcgcatcctgcgtaaaactcctgcaggcccgactgcgggtaggccgccagaccgaggtccgtcacctccatgccgatcttcggcgcgttggcagtctcggcgtcgaaggtgtaaaacggaagcgtgctgccgccgccgatggtcacagccttgtcgcccgtcccgatggtgacttcgttgatcttggcgttacttgtgtgttttttggaaacgaaagccattttgtttccccctattctaactctaaatatttaacgatttgaaaatttcccgcagcgcctgcttgcttttggcgtccgccgcgatgtgcgcgctgggctgcccggcgcagtcggcgtcatagaccgcctcgtcctggggcacgacgcctgccagctccaggccgttggcctcgatctcctccagcacgccggggttcagcttcccctccggcgcccggttgacaatcaagcggacccgccccggtgtcaggtgcaggtcctgggccagctgagcgatgcggcccacggcctggatgccccggcgggagcagtcagagaccagcagcagcgtatccacatggggcagcgtgccccgggcgatgtactccatcccggcttcgttgtcgatgacggtatagcggtactggccggtgtatttttccagctgggcctgcaaaatgccgttgacaaagcagtagcagcccttgccttgggtccggcccatgacgagcatgtcaaagtcgtcctcctccgccagcgcttcgctgaagcggaattcggcatactccgactttgtcatgcccccggggatgacgtcccctcgcttttccgcctgggccatatcctcccggatctcgcccagggtcgtccccgcttcgacgcccaggacctcattgaggttggagttggcgtctgcgtccacgacgagcacgggcgtcttccgctggctgaccagatagtcgactagcatcccgcagatcgtcgtctttcccacaccgccttttccggcgatggcaatcgtttgtgtcatagcttgtgctccttgcaccgggcgcacccggcagtttttacagatcgacgatgccggactccttgaccagccgcgtcacatcctcatatttattcagcgcatacagatggatgccgtcaatgccgcaggctctgtattcgtcgatgaggccgatggtatattccatgcccgcctccttgaagtccgccttcttctgggcgatggactcctccgattcattcggggcaaaggggttcgggaagatccagtgcttggagatgatctccgcaagctttctgggcatgacgcaaccgttacggctcagcgccatattgatcgtcgcgcccatatccaggaccggcatgatgcccacgtccaccggcagccagacacccgcgttgcggatggcctcgagccagtagcggaactggtccatatcccagcacagctgggtcataatataatccgcgccctcgtcctgcttctgcttcaggaaggagatatccgcctccaggctccgacaggcgatgtgcccctccggagagcccgccacggcgatacagaatttgtccccaaattcctggcgaacgaacttgaccagctccgtcgcgtagtgcaggtccccgccggtgccggtccagccatagggcaggtcgccccgcagggccagcatatggtcaataccatggtccagatacttctgcagctgctccttgatgcccgcacgggtattgccaatgcaggtgaaatgcgtcacgggcgtgcatttgccgtcggtcttgatcttggaaagtacatccagattccgcccaacgttcgtgccgcccgcgccataagtgcaagagatataatccgggtgcagtgcatacagatgatccagcacgccgttttctccacaaagcttttccatgccccggtccgtcttcggcgggaacacttcaaaagaaaacgccgcccgtttttccatgatctctgaaaccttcatgctaaacgcctcctaaataatatacaatgggataattgatcattgcactttgcatatcgagaaaaccttatcggtataatttgatcgtatcacaatcacacgcgaattgcaacctaaataacttttcgctttgctcaattatttttatccccggtatactgccggaacgcgccggttcctgcccagcgcggcgttattgcagcggctcggtccgctccttgacgacggcgtagccgtccaccagcgatgccatgaccagctccccctgcagggccatctggcggtccagcaggtcggtcagtacgaccatgccgtcatgacaggcgatctctttgacatttttcatcaggatgttctgctctgtcaccgcatcccgatagatcgtggaaaggcacatgcttgcaacctcctttgcctctctttttacgcctgcagcgccgccagagcttcctccagcttgcgattgccgcgctcaaaatccgccaccgcctgcaaaaccgtctcggagactggctgcttgtctgcctcggccagctgccgggccaggcccgccagctccttggcgtgggcttcgttgtggtgcaccatatagtgtagcagcgccgtcagctcctcctggggcgtcgcgccgtggtcgtgggaatgggtatgttcgtgcattgacctgcacctcgtttctttacttttttcggcctcattatactgcacacagctggacttgtcaaatggctactaaaccggtaggcacatttattttttccgtttctgcttgcaagcaggcgtgtttgctggtatgataatgatagacagcaactgcctggctgtaatttgtcaaaagaagtcaggacccccgcgaaaggagcctgcccatggagcatttccacagcaccgcggcgcatccggagcctcccgggcacgccgcagcccacggcccgcatgggcacgtgcacgaaagccaaaaagccgttgtcaaccggctggcccgggcaatcgggcatctggaaaaggtcaagcgtatggtcgaatccggcgttgattgctcggaggttcttatccagctggccgccgtccgcagcgcgatcgacaataccggcaagattatcttgcaggatcacctgcgccactgcatcgtcgacgccgtcgagcgtgacgatcgccaggccatcgacgacctctgcaacgccattgataaatatatgaaataatcctataatatatgaaataatcctattattaaaggaggcccttttatgcatccacgtgccaaacagctgcggcagatcgcccgcagcaatcaaaacaagcacttctggtgggccgtgctcatcaccctgcttgccacacttctggcaggcgaccttgcatccggtgttaatctgagtttcaatctaggagacagctcctttgacctctacaacggcgcctacgcagtggacgacgccatgttgggtctgcgcgactttctctcaaacccactggtctccgccctggccaccctgagcaccctgctgggcctggccgccatggtcatcggcggtgcggtccattggggctttgcccggtacctcctgcagacgcatgacgctgactgcaaacgcccctgcgccacgctgttttccggcttttcctacttcggcaagcttctcggcctgtactggctgcttgcactgaaggttttcctctgggcgctcatccccatcggcgtcgttgtacttggcatggtcctcatcggcctccttgccatcgccggcatgggatggttctccctggcgtttcttcccctcgtcgtggtggccatgctggccgccagcatcccggccatctgtgcagaataccgctacagcatggcctatttcctcatggtcgaaaatccggacctcggcgtcagcgagtgcatccagtgctccatcaacctgatgcgcgggcataaaaaccgcctgttctgcctggatctgagcttcatcggctggtatctgctcagcggcctaacctgcggcatccttgcggtgctgtatgtgctgccgtaccacgcctttgcccacacggcgttctaccgcgaccttgtcccggcccagccggtgagcaagctctggtgcgacgccgccccggccccgcagaccgccccccggtcctctgccgcctggcagcagagtgctccgcagcagcaggctccgcagcaggacgtgggctttgcccccctttcccccgcgccccaggcccaggaaccgcaaacgcctgaccaggcgccgcagcctgaccagccgcagcagcctgaccagtcgtctgaccaggcgccgcaaatttaatgcatcgaacgcagctttcccgcccgtgctggcccacgggcgggaattattttcaaaaaaacgaaaaaccctcttgctatttgcgaaaaaaagactacaataaggctatccaatatcgcagggagtaggaataagcgcgttaagtaccggtcggatgggaggttgccgccgggcgaaggagcttcggctccgcgatacggttaccgcaaccgcctgagcaagatccccgtgcattccggggatagcatcgcatattgaacctcctccattttatcggggggtgcattcgccacgctccggagagtggcggatcttttttt

SEQ ID NO: 2335 - DNA, 3601 bp, Unknown
  16S sequences of unknown bacteria
tacacctctctattcgtcggcagcgtcagatgtgtataagagacagtctatatactacacttgtcgtaatattttatcaactccttttacactacactgccttttcgaaaaagctctgtaaatcactctgtttttgagtaaacccgcagaaaaagaggcggaaatcttctatttccgcctctttttgatagctgccgcattttttcgaaaagctgctatttttcttctgcttttaccctccagatttctgacgcatattctgcaatcgcccggtcgctggaaaaaacacctgcacccgccgtattcatcaggcatttgcgagtaaacgccgtccgctgccgggcgtaatcctgattggcccgacactttgcatcgcaatagggtaaaaaatccagcaacagaaaatattgatccggtttgtgccaggaggcgccgacagtcagggaatcatacagttcccggaacataccggtgccgccgtcagaaaaggttccgtcaatcagagtttccactacccgtctaattcgggcgttctcctgtaaaatccgggacgggtcgtattcccggagcgcagccagctgctccaccgtcgcgccgaagatgtagttattttctatccctgcctgttccacaatttcaatgttggcgccatccattgtccccagcgtcactgctccgttgagcatgaatttcatattgctggtgccggaggcttctgtcccggcggtggaaatctgctcggatatgtctgctgcgggaatgagcttttccgcataagaaacgttgtaattctgcacaaacaacacctgcagccggtctttggtatctggatcctggtttacgcgttttgcaatttcattgatatatttgatgattcctttggcccgatcataaccgggggcagctttggctccgaagaaaaagaccgtcggataccaattcgtcaggctgccgtctttcagtgcgaaatagatgtctaggatggaaaacgcattcaaaagctgccgcttatactcatgcaggcgtttgatctgcacatcgaataaaaagtccggctgcaaaatcaccccttctttttctcggatatactcgcacagctgctgctttttttcccgcttaactgcggcgaactgttccagtacagcggtatcgtccgcatactgcgccaggcctttaatcaaaaaaagattggtttgccagccgctgccgcacagcgaggtgaccagcgccgacagttcgggattgcacaaagccagccaacgacgttgggtaataccgttggtcttgttctgaaaacgctcgggatacagccggtaccactctttcagcgcgctgtttttgagaatttccgtgtggattttagctacgccgttgactgcatgtccggcaaagatagccatgcgcgccatatggatggtaccctcgtcgatgatgcgatactcttttcgctcctgggtggaaaggctgctggccgccagatggcgcatcagggcgttttgcagcatcaccacatagggatagactgcgggaatcaccgaacagaacagcgggacgctccatttttccagcgcctccgccatgatggtatggttggtataggaaaaggtcttttgcaccacgtcaaatgcctgttcaaaagaaagcaggtggtcttccatcaaaaggcgcagaagctccggaatcgccactgtgggatgggtgtcgttcagctgaatggcatattgatccgggaaccgggaaaagtcctccccaaattcacagacataccgggccgtcagcgtctgcatggtggcgctggtgaaaaaatactgctgctttaaccgcagccgccggccttcgtcggtatcgtcattgggatacagcacggcggaaatatcctcagcccggtttttctctttcaccgcttcatcgtactgctggcggttgaagcggtcgaaatcaaaagcctccaccgcctcggcctgccacaggcgcagggtattgactgttccatccccatacccgattaccggcatatcgtagggcaccgcttttacggtttgatctgcaaaacgcaccaacacagtttcgctctcccggcgcacgctccacggatcgccaaagcgcagccagtcgtccgcttcttctttttgaaacccgtcttcaaaccgctggcgaaacagaccgtagcggtagcggatgccaaacccgtccagcggaatccgcagcgccgcggcagaatccagaaaacaagcggccagcctccccagaccaccgttgcccaaagcgtcgtcttcaatttgctcgaatacagccgggtcaacgccatggctacgcaaaagaacattgcagcgctccaaaaggcccagattcagcagattgctgtaaataagccggccgagcaaaaactccgccgaaagataacaagcccgtttttgtcccgtttcttttttccaccggggggacgcctgggccatggcggcttttgaaaccgcatgataaagcgctttgacgtcggccgtttcgattgtactaccaaattccagcgccaagattgtctgcacattcttctcaaaatcctgcaaacagggttcctcctctctatctgccgtaaagctcggtcaaatcccggattttcacagccaagtcatcgctcagctgacctttgaccaaacgccagcaccaatttccgcccaaggtagacggcgtattgatccgcgcccggttatccagccccaaaaaatcctgcagctggaacaccaccgtatccgcacagctggcataacctgcccggatcaacgcccaggggatctgcacgttttgggacacatccagataacgcctggcaaaccgcagcatccgccggctttgacccgggccaaaaaagccggccaacgtttcattgtcatgggtaccgccgtaaacaaccatatttttttcaaaatgacagggcagattttcgttggtgctgtcgctgtcaaaggcaaactccatcagcttcatacccggatagccgcttttttccaaaaggcggcgcacctgcggggtaactacccccagatcctctgcgatgatttttttgccggccagagtggggccgatcgcctccagcagcttttcccccggaccggtaagccagcgaccgtttatggccgtatcctcccctgccggaatcgcataataatggaccacgccaataaaatggtcaattcggaccaaatcgtacagcgccgcacaggacgccatccgtgctctccaccaagaaaatccatcctgctccatagcctgccaatcgtatagcgggtttccccaaagctgcccggtagcggaaaacagatctggcggaacgcctgccactgcggtgggctgtcggttttcatccagctgaaaccggctgccgcctgtccaaacatcggcgctgtccatcgccacatagatgggaatatcgccgatcatccagattcctttttgattggcataatccttgagccgctcccattgggaaaagaacaggtactggacatatttccaaaaaattgtctcctgccgcagccgcttttgccagtctgctagagccgcgggcctacgcaggcggatttcttccggccaggcctgccattcc

SEQ ID NO: 2336 - DNA, 2170 bp, Unknown
  16S sequences of unknown bacteria
atcccttacagctggggcaccgcggtcaacgtgcagatgatggcgttcggcaacatgggcgacacgtcgggcacgggagtcgcgttcacgcgcgatcccgccacgggcgaaaagaagctgatgggcgaatttttgatgaacgcgcagggcgaggacgtcgtcgcgggcgtgcgcaccccgatgcccatcgcaaagatggcggaagtcatgcccgaagtttacgagcagttcaagggcatctgcaacaccctcgaaaatcactaccgcgatatgcaggatatggagttcaccatcgaggacaaaaagctgtatatgctgcaaacccgtaacggcaagcgcaccgcgcaggccgctatcaagatcgcgtgcgacctcatcgacgagggaatgatctccgagaaagaagcgctgatgcagatcgatccgaagacgctcgacgcgcttttgcaccctcagttcgattccaaggctttaaaagcggcgaaacccgtcgcttccgctctgcccgcttcgcccggcgctgcctgcggcggcatcgtgttcacggcggaggacgccgtggaagagggcaagaaaggcaaaaaggtcgtccttgtgagattggaaacttcccccgaagacatcgagggtatgcactacgcgcagggcatcctcaccgtccgcggcggcatgacctcccacgcggcagtcgttgcccgcggcatgggcacctgctgcgtttccggctgcggcgacatcaagatggacgaagcgaacaagcagttcaccctcaaaggcaaagtatataaagaaggggacgtcatttccctcgacggttccacgggaaacatttacggcgaagcgatccccaccgtggcggcggatacgtccagcggttacttcggacgcatcatgcagctcgcggacaagtataaggcgctcggcgtaaggacgaacgcggatactcccaaggacgcgaagcaggcggcttccttcggcgcgcagggcatcgggctttgccgcaccgagcatatgttcttcgatcccgaaagaatcggcgcgttccgcgaaatgatctgttcggatacggtggaagagagagaaacggcgctcgccaagatcgagcccatgcagcaggcggactttgaaggcttgttcgaggcgctcggcggctatcccgtcaccattcgtttcctcgatcctccccttcacgagttcgttcccacggacgaagcggacatcgcggctctcgccaaaacgcagggcaaaacggtggcgcagatcaaacagatcatcgccgatttgcacgagttcaacccgatgatgggacacaggggatgccgtctttgcgtcacctatcccgaaatcgcggtgatgcagacgaaagctatcatcaaggcagccatcaatatcaagaagaagcatcaggattggaacatcgttcccgaaatcatgatccctctgacgggcgaagtcaaagaaatgaagttcgtcaaagacatcgtggtgaaaacggcggacgaagtcatcaaagccgcgaaagcagacctcaaatatgaagtcggcaccatgatcgaaattccgagagcggctttgaccgcggacgagatcgccaaggaagccgagttcttctgcttcggcaccaacgatctgacgcagatgacgtttggattctcccgcgacgacgcaggcaaattcctgcccgcctactatgaaaataagatctatgaatccgatccgttcgcgcgtcttgacacggtcggcgtaggcaagctgatggaaatggcggtagaactgggcagaaaaacccgtccgggtatgtcctgcggcatctgcggcgagcacggcggcgatccttcctccgtggaattctgccacaagatcggtctttcttacgtttcctgctcgcctttccgcgttcccatcgcgcgccttgcggcggctcaggcgaatatccgtaatccgagggcgaccaaataaggtcaaaaacggcttaaaaactcatattttatactaaaacaagcaaaaagcagtcattcttgagaaagagcgactgctttttttcttctccaagtttcgcaaaaaccgaaaaataggcctcaaaatcgggggtggccaataaaaatgaacactttcccgtatctacggatatgggtaaaagagggcgataaaatggagtgtttttatggta

SEQ ID NO: 2337 - DNA, 7674 bp, Unknown
  16S sequences of unknown bacteria
tgctggtcgccgccacccacaacgaccccgccaacgcgctcatcgcagagactgccagcgagatctttggcgttgagcgtgtctacgcccggatcgaggacgactcgatcctcaagatgctcgcggataccaatatcgggctcatctgcccccacctcatctgcatcaacgagttctaccggctgtccggcatcaagccggcggaaaggcgcatgtcatgaaggtcatcgtcgtgggcggccgcacgcgggccgattacatcatcgagtcgctccatgcaaatggcgaggacgtcgtcgccgtgaactccgaccgggaatactgcgagtatctctccgcgcgtcacgacatcgagacgttttgcggcgacggaacgaagcaccaggtgctcgatgacgcgggagcggcacgctgcgatgtgctcattgcgctgaccagcgtcgacgccgacaacctcatcatctgccagctcggcgagcacttcttcggcataggctcgcgcatgtgcgtcgtctcgaacccgcgcaatatcaagatcttccgcaggctcggggtcaccgcggtcatcagcgagacatccatcctggcccagacgatccaccagctgatatcgcaggatgcagaagatgcgtttgccagccaaaaagacccgcatctgaccagctcgtttgccgcgttgccggataccgatgtcatcgcgaagttcagcaagcgccagacgggcagattccaccgaataggctcgaggtaggcgatgttcggcatcgagcagaatgcgcatgacagcctcgcgcacgcgatggcgcgctacacggggttgtccgcgatattcgtcggggccatcgagctcatcccgctcgcgatgattccgttcgaccccgatgaccaggtgctcgccccgtgcttcatcttcccggggctgtgcacgatggcattcgggtacctcgtctactttgcccgcggcaagggcaagatcgagcagtcgctcgacaagcgctcgtcgggcgcgtgcatgctgggagtgtggcttctcgcaatcgtcgtctatgccgtgccgtttgtcaccgcggggatactcgacccgttccaggcgctgttcgagtcgacgagcgggctcacgaccacgggcctgagcatcgtcgacgtcgactcctgcccgcgcatcttcctgctgcaccgcagcctgatgcactacttcgggggcgtcggactcgttctcgtgctcaccgtcgtgctgaaccagggaaagagcctgcaggcatataacctcgagggacacaccgaccgccttatgcctggcgccgtcagcaccgcgcgcatcatcctcgtcctctacacctcgtttatcgccgtaggcgccctcgcctaccatctctgcggcatgtcgtggttcgattccgtcaactactcgatctccgcgatctcgaccgggggtttcaccacgcatgcgacgagcgtcgcgtacttcgacagcgtccccgtccaggtggtgtcgatcgtgctcatgttgatcggcgcgaccaacttctacctgaacttcctgctgatcaagggcaagttccgcaacgtgctcacccacgtggagacgcgcttcttctacctgttcatcgccgcttctacggcggtagtcacgctcgccgtcgtggcggccggcgattcgacaggaccggcaagcgccctgttcaccgttttgttccaggtcgtctcggtcatcacgacgacggggttccagacggtcccggcctttacggtctttccaccatcggcgctgttcgtcttcatgttcttgatgttcacgggttccgaggcgggttcgaccgccggcggcatcaagatctaccgcatcgtcgtgacgacggcgtccatcatccgctcgctcaagtccatccacgggcacggcatcagcacccgagccgtcaaaatcaacaaattcggaaagcggatggcgctttctcgcgaggagatggacggggccctctcgtttgtcatcgtctacaccggcgtcttcgtcgtgggaagcttcgtgttctcgctgtgcggcgcgagcatcggagacgcggtcttcgactttgcatcgtgcctgggaaacgtgggcgtcggaatcggcttcatcaaccccgggtcttcgcctctcgtcctcatgacgggagctcttggaatgctactgggcaggctcgagatcatccccgtgttctcgggaatacactggctggtaacgatgataagaagaggaggacgcctatgaacgaggcgcgcaagaaatgccttcggtcagtgggcatcactgccctgctctacgttgccgggctgctggcagtctatgggttctcgcttctgagcgtgcagacgctcgtcgtgtttcccgtgttcatcttgggtatcgtcatcgcgagcatcgaaaccgattcgggcgcgttcggcgctgtcttgggggtgctgtacctcgtctcgtacgacttcctgttcaccacgccccggttcgggctcgccatcgtgagcaaggccgacatcatcgcgctcgtgatctttctcgtgatcgcgctcatcatgaacacgctgacgcagcgtttgcgaaagcagctcgaaatcgcggaacgcgacgccacggtcatgagtctgctcaccaaagtgagcaccgggctcatcaacagcaaatcccccgaaagcgcctgctcgtgcgtcgagcgcttcctgcgcgagaccttcgagcgccggatcgccatcgcttacggctcccccgacgagggtgacccgcttgccctcgaatgctacgagggcaactaccccaccggctacggcgaggcgggcggacatggcagcaccatgcggtttctgccgctgagctcgaaggacaacgtgtacggcgtaatctcgatcgactgcagcgaggggcagctcgaccagatcgagacagcctttctcacattgctcatcaagcagacgaccatcgccatcgagcgcaacctgctcgagagcgcccagcagaaatccgagctcgcgatcgaacgggaacgcttcaagacgacgcttctgcgcagcgtctcccacgaccttcgcactccgctgacgagcatctcggggaatgtcgagtacctgctggcaaacgagggcattccggacagcacccgccgcgagctgctcgaatccgttcaggaagatgcgcgctggctcaggtcgatggtggacaacctgctgagcatgacgcgcatagaagagcccgacgagccgatacagatggcccccgaaatcgtggacgacgtcgtcgcggacgccgtccaaaagaccgtcaagcgaaagggagcccacgagctcaccgtcaagatgcccgaggacatcttggtcgtccccatgaacagccagctcatctcgcaggtgctcatcaacctcatcgacaacgcgttcagacattcccgccccgactcccatgtggaggttgccgcctggggcgcaggcgatggtgtgcactttgccgtatccgacaacggaggcgggatagaccccgcggtgctgccccgcgtgttcgaccgcttctacacgacgaacgacggcaagggcgcgcgttcggggatggggcttggcctgagcatctgcaagggcatcgtcgaggcgcacggcggcaccatcacggcgcgcaacaacgagaatggcggggcgaccttcgagttcgtgctgccagctgccgaaaacgcaactgtcgacgagctcgtaaacgatgaatccgaggagcgcatgcaatgactgggaacgggagcatccttgtaatagaagacgaccagagtatccgtcacctgcttcggctcacgctcgaggggcaagggtacgaggtcttttgcgcggaaaacggcaaggtggggctttccctcgcacgcacgaacaaccccgacgtgatacttctcgacctggggctgcccgactgcgagggaagcgatctgatccccgacctgctcgacgtctgcgaggcggcgattatcgtggtgacggcgggcgacctcgaggggccgacgactacatcgtcaagccgtttggcacctcggagctgctcgcccggatccgagtgtcgatgcgcaggggcgcaaattcccagagggcggaaacgccggtgttcgaggcgaatggcctgaaagtggacaagacgaggcgcgaagtggtgctcgacggggagacgatccacctcacgcccaacgagttcgcgctgctcgtggtgctcgtcgaaagccatgggcaggtgctcacgcaccacaagatccagcaggcggtatggggttattcgacaaccgacaactacaagacgctgcgtgtgctgatggcgtcgctaaggcgcaagctcggcgagcggccttccgtcccgcgtttcatcaagacggaagtcggcatcggctaccgcttcatctgctgaggcgcggcgcacagaccgcgcaggaacgcgcgaggagcacgcgagatgtgtggcactgccaccgttttcgcgctgtaaacgccggatgtgtggcactgccacgtttcccgtgcagctggcgtgggatgtgtggcactgccacgtttctcgcgcagcatgcgcgcacaaaagcggccgacccgcacgaggcgggccggccacagctgaaactcttcgaagctcggataagctccccttacttggacggcgtcgtcaccacgcccttctcgcgcgcctcgtccatggtcagccacccatcgggaaccggtgccgtcgcatggcactcggtgcagtagttgaccgactgggtgtgcgccttgtggcactggctgcagtcgatgtcgccgtgacgctgggaatgcgggttgtactcgctgcccaggtacttggtcttctcgaacagcgcctcacggtcgggagtcgccacgtggcacccgctgttcaggcagaactcgtcctcttcgaccccgatgccctcggacaggtcggcgagcgagcgcgactccaggtagggctgcccctgtgcgttggtgcccgcgatggagtagttgccgctcacccagttggcgccctcggacagctgctgcccgatgacgggcttgtggcaatccatgcagcgcatgccgcccatgtaggtcttgtgcttgtacgagagcatggagctcgcctcggtctggtcgagctcgttgccgagcttgtcgtgcgtgcccgtctcgtacgttgccaggtacgggtccatcggcgtatggcagatggcgccgcagaacccgggcgtctcgtgccaggcgccaaagcccaggcacgccaagaagacgacgcccacgatcacgccggccaccgcgtactttttcttcttcggcatctttgccttcttgggcttggtgtcgtcaagcttcgtatccgtctccggggcatcgctttcctgctcggggacgacgctctcggtcttctcttcagtcatgatctcctcctctcacttatgccttggccgcttcagccgcgttctttcctgcccaacgaccagaggtgaaggcgaagcacaggccgcagccgccaccgggatagtcgtcgtagatgaaggtgccgctgcagttctcgcccgcggcgtagaggttctcgatgggcttgccggactcgtcgagcacgcggaactgcgtgtcgacgttgtagccgccaaacgtgccgtgcgtcgtcaccgtcatggtgagcaccgaatacggaggcgtcgtgaggggtttgagctgctcggccttcttgttaaactcggtgtctttgcccgcagcggccatcttgttgtacttgtcgagcgattcggccgccttcgcgccgtcgatgccgagcttggcggcagcttcctgcacggtatccgccttcgcgaacaggcccttctcgatgccggcgtcgtactgctctttgagcgtgtccttgagcgcgtcgaccatggcttggtcgtatacggcgtagaacttgcggtcgtcgaagtgcgcgacctgatagtagatgtcgtgcgtctggccgccctcgttggcaaagcgctcgccctgcgtgttgatccacatggcgttcgcgctgatgagcttggactgcccggcggcgacggggcagttcaggatgccgttggtaccgccgtggccgatgtagcctgcgccgatgtcgaagcccatctggatggtctcgcccgtgcagcccacgccgacctcggtgtagacgccctcgtagtcgggcatgtactgggcaatcatgtcgtcgttgcgcgcgaagccgcccgcggcgacgatgaccttcttcgacttgtactggtacagcttctcggggcttctgcgcgcgaggacgccgacgacggcgccgttctcgacgacgaaggactcggccgcggtctggtagtggaactcgacgccgacctcgtttgccttcttcgccattgccgtgacggcaacgttcgcgttcgcgtcgatgttgtggccgcgcggaatcgtgtcgacggacttcttcgagaccttcttcttgaacggaacgcccagctcgacgttgagccagtcgatcgtctcgccaaagtggtcggcgcagaacttctgcatgtcgtagtcgagcttgtcgccgccacggctcaagaagtactgcagcagcgcctcgggcgtgtcctcgataccctgcgccttctgcagctgcgtacccgcgccgtacagcgtgccgatggcaagcgagctcgacccggcgatccaccccatcttctcgatcaagatgaccttcgcacccgcctcgcgggcctgctccgccgcggtgatgccggcagcgccggcaccgatgacgagcacgtcgcagtcaatcgtcttgctcgccttctggtttgcctccatctcgtcgatggtttttggcgcacagcccacaagcgcgctcagcgcggaaatggcacccgcgcccgcagcgagctcgacgaacctgcgccggctcatacttcgattgctcatgctcggactccccttcccttcttgctagttccctcgtgaatgccagcgcgggtctcccgtccgcacggcacacttctatcccaatgtatatattagggccgtcggcgccccaaagctgcggggcagacgctagaatagggtcctgacctgcaaaatcacccgaaacgggtacgtggaaaagcgggttgttggggataattcgcacgctgatcggctttgggatggcacggataatcggcaatacggcacggcgctccgacggacggcggcgcgaggatggggatgacacgcgagcgcgatggcaagggacggcaagatactcgacaagctggctgcggcgtcgcccggtagcgcgtacctgtgcctgctcggtctcgccgcgacgcgcgtgtggttccagacctcgctctacggcgcgtacgtgcacagtgacaacggcctgttctccgtcctgtgcgacgtgccctacagcatcgccctgctgttgatggcagtgctcgcgaaccgctttgccccgggccgcgaggtcgaacgcaaggttcagctgaccggatttgtcgcgatgacggcggcgggggcgctgctgtgcgtcgccgaagtgctggggcatccccagctcatgagcatcgccgtgctcttctcgggcgtcgtcgccgtctttggctgggccacctggatgcccgtctactgccgtctcaacctgcgcaccgccttgctctacgtgttctcgtcgatggcgctcgggtcggtggcgggattcctcgtcggctt

SEQ ID NO: 2338 - DNA, 2618 bp, Unknown
  16S sequences of unknown bacteria
cccgcatagcgggtggttttttgtttcgcttcgctcaactgcctaaaggcatgaaaaaaaacggggactgtccgcggcttttcgcgaacagtccccgtttttctttgcttgtatcctgcggcgccggaagattcacgcgccggcgagcgcctcgccctgggcgatctcccgcagccggaagcccagcccgtcgcaggagacttggtggtagaccacgccgttccgctcccccgaaaacgcgccgcggagcccctcggcgtggaggtggccgtagacgcagtggcggacgccgtagcgctccagcagctgcgtaaactcgctgtcctcctgccgctcgttgaagggcgggtagtgcagcatcgccacgatggggagccccgggcccttgcgcgcggcgtcctgcagggagagctccaggcgcagcacctcgcgccggtagatcttgagatcctgcgcgctggaggcgggcgtggcgatggtccagccgcgcgttccggcaaaggcgatgccctgcagaacccgggcgtcgttctgcagggcgtagtttccctccggcagcagggcgcgcacgcgcgtgagggaggaccaccagtagtcgtggtttccgcgcaggaggagcttctgtcccggcagcgcgcagatggcggcgatgtcctgcgccgcctcctccagcgtcatggcccaggaaaggtctccgggcagcagcaccacgtcctccggcaggacgcgcgcgcgccagtcctcgcagatcttctcaaagtgcctctcccaatgcgcgccgaagacatccatgggttttccctggcttccgggcaggtggaggtctccgatcgcaaacacgcgcatgggccctacgctcctttccccgtcctcactttctgcggacgtcctcgggcttgtcgtcctcggcctcttcctcgtcctccaggtcgtcgtccatgccgagctccttgtggatctcgctgtactcgttggaggggatgtcctcgtcgacgtcgatgtcgatctcctccagctcgctcgtggcctccagggcggtcacgtcgctctcctcggggacggtttcctcttctccgacgtccgtgacgacgccctcctgcagcttgagctccttcaggcacgccgcgcacagctcctcgccgggcacaacggggtgctcgccgcaggcagagcacagctccaactcctcgtgctcgtcttctccccgcatctcgcgcttgcagaccgagcagtagcgctccgtgtcgggaatgtagttcaactcgcagcgcgggcacttgatgtaacccataacgatccctccagatcctttttccaatggtttggcagcagcgtatgctggacgcaacggtagcgtgcatggaaaccgccgaaaaaatcggattcccacgccaaattccgcctgtgccgccgcttcgtccttttttatcggagatcattatataacgaacggcagccgtatgcaagcagaactctctgcgttttcggaaaaactccattcttaacattcgtttgattttgcgcatttgaaagatgtttatgggatcataatttttgcaagcctcggtttgtccaggatttcggcatttgtgttcaaaatttcttcgttttattttacaaaaactttattgacgaaatagagcccccgtgctatattaattcatgacaggttaccttctttcgaatcatatcctttttaaggcatatctgcatcctatttgctgattcgtcagctcacttctatcggcctatcaagaggtacctgcgctgaacgccgcggtcaattgctagaattgaccgccttttctttgtctatacgggggcgcggaaaatccggccccttttgcggaggaatggaacatgtacgaggcggaactcttttcccagcgcgtctgcatcgaggcggcgccggagctcttctccccgtccgctgcggaccggggcacgctggccatggcctcgcaggtggcgctcctgcccggccagacgctcctggacctggggtgcggcgcgggccttgtgggcattgcggcggcaaaggtcctgggcgagggcgccgtggtcctgacggacgtggaccccgcagccgtggcctgcgcgcgggagaacgcggcgcgcaacggcgttgcgggcgtgcgcatcgtgcagggcgacgcgctggaggccgtggatgcgaccggctttgactggattctctccaatcctccctaccacgcggacttttccgtgcccaagcggttcatcgaaaagggcttcaaccgcctgaaggtgggcggctgcctggtgatggtggtcaagcgcctgccctggtaccgcaacaagctgacggcggtcttcggcggcgtgcgcgtgcgcgaggtcgacggctactacgtcctgaccgcgcagcgccgcgcgctgcactacgccgaaaagaaagtcaagccgcgcaagggctgaaccgggcgcgcggtttctccttaattaaataggaaggcgtcccgatgtacgggacgcttcagcctgtcgaaaaaggtcaccggaaggtggccttttttctcattggagattctcgaattgagggaaagaatgcggtataatagtgaggggtgataaagatgctggtaaaaaaagcagaa

SEQ ID NO: 2339 - DNA, 32759 bp, Unknown
  16S sequences of unknown bacteria
tctcttccacggccccagcccgcgcccgctcgcggtagagctgttccgcacacatagcagaacctctgttcccccggaatattcactttggtatgcagccccgcttcatcctggggcaggccgtggggattctgtgccacatctgtgttctcctctttcattctttccagaatgctcttcatccttttcttcctttcttgatccgcttcagccaaaaattccgccgggccagatgcagcacagcgtcagccccgttttcgtctttcttggctttccaccgacgctccctctcttccctggcttcccaggcctcatgggtgtattccgggcagcttccgtggcacccaatgtgcctatcctggcagtccttgcagcactcaattcccatatttcggcttcctccctctcttcttgggagcatcacccatcatggcttgccgcttcttttccctctcatgggccttcatcctcatacccaccatgcggcattcctgggagcagtagttcctgttccccggcggaagagctgttccgcacacatagcagaacctctgttcccccggaatattcactttggtatgcagccccgcttcatcctggggcaggccgtggggattctgtgccacataagccccatagctcatccctgctttccgggccatgatggccaccttcacaatgctctcattcaccattcttctttttctcctttcggtttttcctttttcccggtgggcttccccttccggtgggcttgtccggcagaagatagcgcacatactggcaggggctctcctgggtgtattcgctccgctccagcaccaccgccccccggggaatccacggctgatgcccgggctttacaatgcgctctcccaccggcgccgggtggatcaggtttcgactgcaccggtatttcttggcgtccggctcccgccgggcctgtttgagaaggtaaacagccagggccgtgaagtccggctggtgcttcagcagctgatagtccacgctcccctttgtccacttctcacagatcacctcataagccagccggggcatgatgatgtgatggtgcagccggacgatctcccccgtctccccatccacttccgtggtcaccagtatccacttgcactcgatcccctcttttttcatcacccgccgggcccgatcaatcaggttttcggcatccttgtccgcttccttccggtttcccggcagatgctccggggaataattcagcgtcagcagcatatcccccgggcggaagtttgcggcaatgatccgctgcaccctccgggtcgccatccggtcgttcctttcaaattgtctttctgtggtggctcccttcttcctcttcttccgtggtttggtattgttccccaccatccccacgatcttctccaccacattgcctacctggtatttcctctccatccacttcaccggttttctccttttctttcccgtgcgcctaaacttagcgtgataaggaccccgcaaagaacgcacgagcctgcgtcctttgcttggtaatttttaacttgcttgcaacttgctgataacttgcttgcaacttgctgataacttgctttctgggccgctcatagcggcagccgctggcggaggtgtcggcatcggcccgggtgcggatcaccccttctccgtatgcctaccagcggccacccctatggggggcccatgaaacggctccccttttttcagttcaccggggttatggcttccaaacctgactttcgtcttccatcatgaactgcatcaagtctttaaattccattctttcttccatcgacagtgtccgatagaactccctaatcccattacaaaaatcaactgccgtttgccgcaccgttcctttaactttcaaatagcaggtacgccagtttacttccatctttaccatgccccattctccttcctgtccttcagcacctggagtaccgccgccacctgcttcacatcgcagtccccgcaggtctccaccaccgcccgctgcaggttctccaactcttccggtgtcccggtaagcctaactataagatcccggcacgccccgcacaccacaacgccgctttccactgcctggccgcaaacatcacaccgcttcatggcgcttccctcccagcagccgcttttccacgatctccatgctctcttcgctcagggagcaaaacttttccccatccacgcccacaaagagcaccggccctacaaagtgatggcccatgatcacccggttgggctgcatcatcagccagagcccttcctcattgcagaggatagccagatccctggccgccgtcaccgcctcgattttcccctccacttccttctggagggcttccagggtgttctccacctccatccgctccggctctttccccggcatcagcttgatgatcttcatctttctttttcctcctcttccatggctttccggtattcctcccgggatatcagcttcacccgtcccggctccacccccagcagctgggccagcgcctgttctgtcacctgggcgtctgccttaacaaagatgcagtccgtcccattctcccaggggccaaggactgcggcataagtatccatcgtcacaccctcccccagtaccggcccacaaaaacaggctccggctcccgtctttcatagattgccgccatcacccggcgcatcccttcctcggtagtttcatcccgccgcagctggtaggccctccaggccggttcagcgtatccccggatcagcagcagttccacccgctgccgccggtggcacaccgggcactcttccaacagtgtgcagctcttcatggcgtacacgccgtgatgtggcccgggccgggcgccgtcgttgatccgcttccatctgtgccggatgggaaggcttgccccgcagtcctcgcacagtatccggctcttcatctcgatcctcaaggtgtatctcctcctcttttgaaaggctccagcaggtcagccgcagcagcgccatcagcagcgcaaaccccggcagcccccacaggctcatctcctccactccccaggccgcccagcaccccgtcagcagcatcgccgcaaagagcgccgtgtaccacagcatttttttcatcccgctttttcctccttttttcttttccctgggccaggattctttcccggtttttagcgtaataggctcttcctttggccctcagcttctctcggttgtgctcccggtattccctctgcttggccatgtatctctcccggtttttcctctgccagtcccgggccctttgcttctccttttcccggttcttggcatatcgcacacggtatttttctcggtttttctgtcgaagttctccttcaatctgcgcatcggcccggcgcatctcctccagctcttccggtgtaaagctcatgtttttcaccctcttttgttcttggatttccttttccgttccaggattctttcccggtttgcggcataataggcccggcctctggccttcagcctgtcctggttcttttctctccaggcctgattggatttcttcaccttctccgggtttttctccctccaggccttgttctgccgaagccgccgttcccggttccgggcataataggcattcatggtttctctcttttcccggcggaagtcctcctcgatctgcgcatcggcccggcgcatctcctccagctcttccggtgtccatcccatgtctttcaccctcttttgttcttggattcccttttccgctccaggattctttcccggtttgcggcataataggcccggtctttagccttcaatctttccctgttcttttctctccaggcccgattggatttcttcaccttctccgggtttttgtccctccaggccttgttctgcgcaagccgccgttccctgttccgggaatagtaagcctgcatcacttcccgcttctcccggcggaagtcctcctcgatctgcgcatcggcccggcgcatctcctccagctcttccggcgtaaatcccatcccatgccctcccttcactccagcttccgcagaaaccccagctcctgggcccggctgaaaagctcttcctggtccgctgcctggtcgatgtaatggtttttctcccgctcttcctgcatcagcagccccatctccatggtcttgtccaccagagccgtcagatacctcttgatctgggccgctgaaaccgtcagctcttccatggcccccgcctccgctgccgccgaacactccgcccggcaaagaagcatcaccgcttcctctgcatcgttataaaggatctgataggctttcttgctcagcatggtgccccctccttctcttctgtttcatatcccatctccgctgcccattccagcagctttttgctgtatacatagcagcgggggttgtcccgctccgtgcgcaccacattgccaaaggggaattgcttctgctcgatgccgcagcgcaaagtgtcggccgtgatcttcatccccatgctccgcagccattctgcagcttccgcaacgcttatgattttaagatcgatcatgttcttatcccttcctttccttgccactcccttcctcctgtggtaaaatttcggaaagaaaggaggtgattttgtgaattactctctcacagaaagcgacattgcagccatcatggccgccttgccccttgtcccgctcatcgacatcggtgacgaagccctgaaaataaccaacgctgcccattgcatctcggtcggcgaaaaactggcccgccgggaccggcacataacaaagaaagaaggtgctgtcatttgctccgccatcactggagccttcatgcttctttccggtcagtgccccgagctttttcaccatgtggatgatgaattgcgcaaagaaattgcgccccacttgtttacttacaatcgcctgattcctcttttcgatgatcttcttcaaatcgaagagtgatcgtctccccaggctctttgtcccaagtgatcattttgaaaagccgctcagccgccacgctgagcggttctttttttggcttcatcccttccagtcctccttcttcgccttgttcatattcccttcctttccttgccactcccttcctcctgtggtaaaatcgggaagaatgggggtgattttgtgaaaaaacttcttgtcctggttctggccctgctgctttctctcccggtgctggcacactcaggtgggacagacagcaacggtggtcataatggccccggcggttatcactaccaccacggctaccccgcccaccagcacgaaggcggagagtgtccctatgattttgatgatcgcaccggcgaatcaagcggcacatccagcagctcatcagaaaaaaataaagataaaccagatgaaaaggagcatcctttctggactttcctgaaggttctttttttccccgttttcattgtgctcgtttttttctcaccgcttctgtttttcgtaatcgggattttcttacaggagtttgttgttgctgctattgatttcttgggatccatttgggaatccattaagaaatttctcaaaaaacatttccacaaaaagaaatagcatgcagcatccccgccgcccttggccgctccggccaggggcggcttttttatgtggcttccttcttcggcggcgcttccggctcttccttccgggccatggcgttcacgccctcggcgtagcccatcagaaaatcccgcttgttttccggcagctgcttcaccgcttccgccaggctctccagcagcatcttttcggtcttgctcatggtctcactcctttcaacttggttaaataatacatctacttggtttaaaagtcaatacccggttttaaacccagtttaaaaaaagtattgattcttttttgccattgcgatataatacagccaagattggaggtgatattgtggaaactgttgcagatcgcataattcttcttgtaaatcacttaggtggaaacaaaagtgattttgctcgaagaatcaatcttactcctgcttatatttccaaattagccaaacactcggacagcatacccagtgataggacaatagcggatatttgccgggagtttcatgtggacgagcactggcttcgcactggcgagggtgaaatgtttcgcccccggtcccgatccgaagagctggccgcttttttcggcgatctgctggccgacacgcccgactttcgccacagcctgatcaccgtgctttcccggatgtccccggaggaatgggccattctggagaaaaaggcctgggagctggtggacgaaatgaaaaagaccgacccccagtaaagggggccggcctttgccctaccgcagcagatggcggagaaattcatagatgatctccagcctttcctcatctgctctcctcagcatttcaatgatttctctgataagttctctccgcttcatatcttttttacctccatgagaaatttttttgggctttcgccgcccatattttcccatggaatacttttcatttgaaagaggggtaactatgaaaatcaagaaccaattcaagcgtcttgttgctgtcgcttgtctcgccgccaccaccgctggcattgccggtgccgcttcctggcgggaaaacattctggtggatgtaaacaaggtcactgtggtttctaaccaaaaaaccatccaggagccgactctcctctggaatgataaaacctacattcctctccgggccaccctggaagctgccggttgccaggtggattgggatcagagcacctacaccgccaccgtcagcaaccgctacgccgctctggcggatgttttatatcagtcttaccagtatagttatatcctgttcgattattatcgtatagtttcttccattcagaccatcaatacctggtctgcggacaaaagcgaaaatatagattatgaagcgtctttgctgctggacgagttggtcgattctatcaactggtattctgaatatcttgatcgtggcatatacactctttctctttatctcaatgaaagtggatggtcttatttgctcccggatttccaagcaatttatcaggaaatgctggacatccattcccaattcaaagagctttccacagatatttcattctacaaaacaaatactatctcagaaataaatgacattgcttttcgttccgcaaagcttcttattcaactcagaactgctcaaaatatgatcagcaattattacgacaaagtatcgaatcaaatggtatataatgttcccatctcttaatggggcaactaaagaaaaaagccgccggtttccgccggcggctttttaaaaaatcctcaggtgatgctttatgttgtgtataaagtgcggtgcctctcttcccgaaggggcaaacttctgccatatgtgtggaaaaaaacaggccctgcaaaaaaagaaaaatctcaggcgtgccaatggcaccggcactgtttacagactggccggaagaaggaaacgcccttgggttgcggcaaaaaacaaaataatcattgggtactatgccacaaaaaccgatgctttggaagccttgggccgtctctccagcttccctctcacagaacgctataatctgacctttgccgatgtgtattctcaatggagcgaagagcacttttctgaaatcggccccagcggtgtggaaacctatgaaaatgcctatcgtatattttcttctctccacaatgccaagtttcgctctttgcgaaaaaaggatttccaaatggtcattgaccagcatcggtcaaaatcccattcttccctctccaaatataaacagcttatcacacaaatgtctgactgggccattcgtgaagaaatcatcacaaccagttttgccaaatttgtcaaacttccagaaaacacgaaaaaggagaaggagatcttcagcccttcagatattaaaaagctggaaaaggataaaagtgagtccgctcgtattgtgctcatgcttcttgccaccggtatgcggataggcgagcttttttcccttcctctttccagttatcatgaaagttatgtgatcggcggttccaaaaccgaagctggccggaatcgtattattcccattcgcccggaaggccgggaacacttttcttatttcgcccaatcagcaaccggtcctttgctcttatccggctattctgggcaaaggctccctgataattttcgcaaaagagactattaccctcttttggaaaaactccatatcaaaagaaaaactccccacgccacccgccacacctatacttcccgagccatcaaggagggattggctccagaagtccttcaggaaattttaggccatgccgactactccaccacggtaaatatttacaatcactttgacccggacactttggttcaggctgtgaatgtcgctgccgttactaacgcattactaacaaatcaaaattgacagaaaatgaaaaaagccctcaaaccattgcggctcaagggctttggctggtggacgctaagggacttgaacccctgaccccctgcacgtcaagcaggtgctctagccagctgagctaagcgtccgggtcaatcagctttttcattatacaagccgtgcgctattttgtcaataggttttttcttttttctcctctttttctttttgctcttccctgggcaaattagcccaagccttatcccttttgtccttttgcttctctttctcatcattctttggccgcatcaaaacaaaaaagcacaatgatcaaagccccttgcggcatcaccgcaaggggctttctcttttcatatgtacttttttagcctttcagctttttgtacagcgccttcacatcctccatgcgggtggggatgtcgatagactgaggacactgagagcaacacttgcggcaggccacgcagtgatgagcctgtttgctgtctcccagagcttcgtaatcggccaggaactgggccttgttctcggtgacgcagtactggttgtagatcttgaagacggcggggatgtccactccggcggggcaatccatgcaatagcggcagccggtgcagggcacggtcttgctctgcttatacacatcggccaccttgaacaaaagctctctttcgctttcggtgaggggcttgaaatcgtccacagtagccacattgtccttcatgtgctccatggtggtcatgccgctgagcaccaccagcacattgggcaggctggcagcaaaacgcagggcccaggaagcaggagtggcattggggtcggcctttttcagcatctcgacgccttcggggcacagggtgtgcagagcgccgccgcgcacaggctccatcaccacaacaggcaggccgtgctcttccaggatctcatattcccgcttggcattctgcatatcccagtcatagtagttcagctggatctgggcaaaatcccagtcataggcgtttacgatctcttccagcatttcgatggtgccgtggaaggagaagcccagatgcttgatgcggccggcttccttttccttctgaagggtctcgaagatatggttcttcttgatgatctccaggcggtcatgattgagggcatggcacagataatagtcaaaatattccacctggcacttattcagctgctcctcaaaatatttcagggtatcctccggcttttccaccagccagaccggcattttgctggccagatggaagctctcccggggatatttcttcatggcctcgcccacgaacagctcgcttttgccctcgtgatagggataagcagtgtcaaaatagttgatcccgtgggaataggcatagtcgatcatctcctgggccttttccttgtcgatgtcggatttctccggatcgatcttgggcagacgcatcagaccaaagcccagcagggaaaccttatcgtcggtgtctttataattccgcatggcaatcatttgaggttcctcctttttcacaggcgggattcatcccgcatttttattatctttattgtaacgcctggagtggggtggaagtcaacatttttttgtttctccttgacaatttctttggagaaatccacaataaaagaaaagcaaaggaggtcttgcccatgacgatacagctcctggagaccgctcgtctccatcttgttccctcttccctgtccctggctcctatggtcaccgcccattacatcaaaaaccgggagcatctccgccccacttctcctctgcggccggaggaatttttcaccctgtcccgccagaccgaaggactgatggaggatgtgcgccagcaggaggcaggcagcagtgtgcggttctggcttttccccaaagaagcgccccagaccatcgccggcatggtgcacctcagccagatcagccggggcgtgttcctctcttgttttctgggttaccatatggaccaggatttcctgcggaaggggtatatgaccgaagccgtggccgccgtggtggactatgcctttggccccttgggtctccaccgggtggaagccaatgtgatgccccggaacctcccctccctctcccttctgcgcaagctgggttttgaggaagaaggcctggcccgggactatctgaaaatctgcggccaatgggaggatcacctccatatggccaagcgaaataccggaatgagcgaataaaaaaagaagccccaaagggcttctttttttgcgtttttatgccagggtgccatcgggattgtgggccaccgaggcctccagaatgttgccgtaggcccagtggctttcgtccacatcctggaagggattccgggagatcagctccgccagatgcccttcctccgggatgcggcccagggcaccgttgatcatcttcaccgcttcagctcttgtcaccggctggtccggacggaaagtgccgtcctcataaccggccacaaagccctttccagcgccaaaagccaccgcctgataggcccagtgggtttccggcacatcggtgaaggaagcgctgcccgtctcaccgaggaaataggccgccagaatcttcatcagttcggcccgggtcaccggctgatcgggacggaaagtgccgtcctcatagccccctacaatgttgtatttctgggcaaaccccacataggaagcataccagctatccccggccacatcggaaaaggagaccggatagctctcctcctcctggtaaagggcctggccgttttcgtccaccgtcagccgggccagcatggccaccgcctcggcccggctgagggagtcccccggccggaacagcccctcggcgccctggatataggcgccgtggtctgtctgattgagcacaggcttcatgttctcttccggctcctccggagtgtccggttcttccggttcatccggctgggcgtattccttctgatacagtgccacgatctccgggttctgcaccatcagctgatagcggaaatgcacttcaccggacacctggggaatggtcttgttgagggccaacatatcctccagggccttgacaccataccagggagaagagggatcgctgttgcctgcctggtaatcggccatgcccacatacagccgcacatcggtgccgtccaccacatcggcccaccagcggaccagggtgtcatagtcggcggccttgtggccgatgtaccaatagatctgagggcagatgtaatcgatgtattcttcctttacccacttgcggctgtcagcataggcattgaaataggtttcattgccattggtggccgagccatcgggcagactgctctggttggcccatacgccggccgggctgatgccataggacaattcaggatcgatggcatggagacgctctcccagctctttcaccagccggttcacattgtctcttctccaatctcccagatcggaaaagtccccgccatactgctggaacgctgcggcatcgtcaaaatcctgaccgggatagaagtaatcgtccatgtgtagtccgtcgatatcatagttccgggccagctcctcggcgcccttgatcaccagttcccgtacctccggaaggccagggttcagataatagtttccctcgtgctgcaccagccattccgggtgctgcttggccggggaagaagccgacaggctctggtattcgctgtcgccgcttttggtcacccggaaggggttgatccaggcgtgaagctccagtcccagctcgtgggccttctctacccaataggccagcggatcaaaatccccttggggagcctggtcctggctgcctgtgagatagcggctccaggggaagatctccgaaggatacagcgcgtcacaggaggggcgcacctgcaggatgactgcattcatccccatatccacgcaattttgcaaaatggaatcggcctggctcttcaaagcggccgggtcggtggtggctttggtgggataatccagattgtacacagtggacacccaaacagccttcatatcctcccgggcgggattctggcttttttcggtttttacaccggcgccgcaggcccccatcagcaggatgacccctgccaacagaccggcccacagccgttttcgcaaatgtttcatattctttctcccatcctatgttgtttttctctgttttccggcaaaaagccggagaccggctgcgttatggccgaccaaagccattataacacaaccagtccccggtttttagtggtatcttctgcctgcttacagggctgccacatcggcggccagcgcctgggcgtgctccaggggcgtggcccagctggtgcagaaacgcacggcgtggtgggtttcatccacctttccaaaatcggcaaaggcatatttttcgctgagttttttcatcacattcttgggcaaaatggggaattgctggtttgtgggagagtcgcagaagaaggggaagcccttgtccgcaaaagctttgcggatgatggcagcggcttcattggcccgctttcccatctcctcatacagcccgtcttccatcatggtctcaaactggacgcccaacagccgtcccttggccagaagtccgcccttctgcttgatgaaatagcggaaatcctccttgagggccggagccgcgatcaccagggcctccccaaagagcgcccctactttggtgccgccgatataaaaggcatggcacagacgggccaggtcggccatggtcacatcggtgccaggcgcggtgatgccgtagcccagtcttgccccgtctacatagaggaacagattcttttcccggcacacgacgctgatggcttccagctcggccttggtatacagcgtacccaactcggtgggatgggagatgtacaccatcttgggctgcaccatatgctcctgggtctcgtcgttataatgatcctccaccagcttgcgcacctgatcggcagtcagtttgccctctttgcagccgggaatggccagcaccttgtggccggtggcctcgatggcgccgctttcatgcacattcacatggccggtctcggcggcgatcacaccctgatggggccgcagggctgcggagatcaccgtcagattggtctgggttccccccaccagaaagtgcacatccacatcctcccggccacatttcccccggataagctgggcggcccgctggcaatggggatcttccccataccctgccgtctgttccatgttggtctccatcaggtgttccatcacccggggatgggccccttcggaatagtcacagttgaaacggatcatctttcctctctccttttcctaatcctcttcttttttatagaaatgtttgcgccaataatattgggcattccgatagtctgtcaccagatcccggtcctccagctccagctgctcttccacctggccgtccttcatataccggccgctggaatggaccacctgaacgctttccatcacttcatcggtcatctgcataaaggcagggccttcccagccacattcctcaaagagcagattcatcaggaaataggggccgatgtccgggccttccccggaaaaatcgttgcccagcacttccttggccgcgtcattggcccagatgagataccgggtggaatagtacttcaaaaatccctcctgggtggacagatccatattgatgcccaaggcgtcatagatctctccatcatctcccatccagggattgtgatccccaaagagcacaatgaccaccggctcttcttcctcccggaagtaatcgaagaaggccgccagattctgattggtgttccagatggagcccagatagttttccagaatgcactgctggctgtcggtgagcttgccgtcgctgttatcaataaaggtgtccttggggctccaccaatactgctcgctgtcataggggccgtggccctggtaactcacattaaaggaaaaatagggtttgccggtttccttgttttcttcgtagaaattgatgatctccgggaagaacacttcgtccaaggccacttccccgccggtgaactgctcataataattttccacaaagtaatagttttcaaaccccaggtactggttgatgttttcccggttgtaaaaccactcaaaacagggatggctgccctccaccgtgtacccctcgtcccggaaataccaggggtaggcattggtgtcggtgcggaaattgctcagctgggagtaaccggtgaggaagcaccgctcggtgtccaccgttccccctgcgaagatgttggtcaccagattgccggaaatgccttcttcctccagcttgtggtattcctcgtaggcatcataggccaggttcacttcttcaaacttgctgaaatcgttgtaggcctccagcatgatggagatcacattgacctttttgtcctcggggatgtgggcatcctcatagccttccatgatggcctgggcggtatcctcgtcgtagccctccggcggccggtcaatggcgtcggtgatgctgtgcaggaagggatagacaaagcctctggaaatatagacctgggtatccgaccaggggctgatgagttccgagttgtcggtggctgcatcgtagctgtacagattgtcgtcggcgtatttgccgctgaccaagaacgcgagaatgagcacggccagggcgccgcctgtacgcaccaggggatggggcttgccccgcaggaaaaagaaaaacagcaccgtcaccgccagcacaccggccacagagagccacatcccggcggtgggaatgatttcatactgtcccgccatgttctgggcttcccgcaccagaagcacatcggcaaacagcaatgggtcattgcgcagactcagcttgaaccagttgacaaaggtgccgcccagaatgacaacactctgaagcaaaaaggccagccaggcccgtcccaaaaggaaatacagcagcgctcccagcaaaagcaccggaagcacattgagaaggacgatgagaggaaactcaaaatagctttcaaacatctccccgccgtattccgaggcggcaaaagccaggctgatcacagccaccccaaaggtggcggccgtataaatcaggccggtatacacccagaaaagtacttttttccaggcactccagccttccggcggttttttctgaaaaacgaaccagcttttccagccagcaacaggagtatccttggctttctgagccggacgcacaatgccgaataatttcatgagggaaacaatcccgtcctttccgtcttttgttaccaatcaaattgctgccggggggctttgggcaaaggagtgtcctcctgctgggtctgctcaaaagagagggtctgcactttgcggaaaaagtcatacaccggctgaagtttccggaaatcctcttccagtttctgagccagccggggcgaaaagaggatctctccctcctccggcgagcaggagtgggtcaccgccacatttttctgatccagccacagtttttcccgcccctgggcatgggggaacttgctcctcttgtaccggtccccctccaacaggaagtagccgtctttccccagggctttgtccgccttctcaaaatccgggtcctgacgcaaaatcagcccccgcaaagtgtccatatcccgtggactggcccggtaataaccgcagccccagcggacaaagcggggggaaaactcaaaataaaaagctggcggcccctgatagagcttcttttcccgcaggaaaacgcaccagcacacatcccgaaaagtggatttatcctttgtaaagcgagtatcccgatagattcgggagatggaacggcccactttgggctcggcgatcaggctgtcgtccagcttccagaccccgggctgcagctccagaaccagctgacgcataggcaaaagcaccagccggtcgtagtccttccgatgctcccggaaccattctttgctgtcccgcagcttgttttccatcaaaaaatccagcgcttccttggaaaaagccactctttttcctccttcgacaacatactgtgatttttattttcccccttcccccggaatttgtcaagaaaaagacacagtcaaaacagttccttcttgccttttttcacaaaactttctataatcttcatagaatattcagaatttcgtcggggatttgtccttgcattcccccttcccaagctgtattattgttattagtacagtctctcccacggaaaggagtgttgggcatgaaactgcgcaggaaactgacccatctggccacccggaatatgcgccgggtctgcttctatctttttcccctttttttgaatctggtgctctattgcaacctgactccctccccatcgctggccccgcgcacaccccgcttttcctttgatctgccaggggtgcttcgctttctgctggcgctgctgctgattttcataggctatgtgctgttgaccattctgacccgccgtccgtggctggccgctttggtgctgtccgtgcccctttatgtgatctccatggtggactactataaatattacgccctgggcacccgcatctccatggacgatatcatcatggtcttcagcctgcatgacctttggacgccccagggcgccgcggggaatggaatgttcttcagtccccttctgttggtcacattcccccttctgtgcctgtatatccactttctccgggtgctgcgggtgggagacgcggtgcatttccatggccgccgggtcatctgcggcgccttggccatgtggtgtctgctcactttttccacaaacagcctggcctatcagatctttgatccccagctgcaggcctacagtgtggtgccatcctcccgcaccaatgcgcctcgtctcacctccatcgactgcctgatcggctcggtctattacgatgaattcaccgacgagcgggccacagaggacaatgtacagcgcctgctctctgcctatgagccccaggccggcaccggtgtgcgccccgatattctggtggtgatgagcgaatcctatttcgatctgcgccgggtggatggcctggaggtggacgactccctttaccagaacttccggcggatgcagtcccagggatgctacggccgggtggtggtgcccgccttcggcggcggcacggcctcttccgagtttgaggtgctcagcggcacatccaacgccgctttgcagggcactcgctccccctatgccggtatctcttcctgggatacccttccctccttccgggagtatttcgggaatgagggatatgactgcacctatgtgcaccccttcaaaggctcgttttacaaccgggccaacgcctttgccgccatgggcttcgaccggatgttgttccaggaggacctgacggtgccggtggaggaatattcccgggatatccacatcagcgatgcaaccctgacccagcagctcatcgcccttctggaagaagaaaccgatgatccccagtttatctgggccacttccatgcagaaccactccccctatgtgaccatggaagaaagcgatccctggctcattgatgcgccggagggcgtgctcagcgaaggggagctggatgggctgcgggcctatgccgtgggcatccgggataccgaccaggccctgggccagcttctggactatatcgacagccgggaaaagcccaccgccctgttgttcttcggcgatcaccagcctttgctggaaggatataaaaagctcaacggtatcgagaccgatacgctgtatgaggacctttccaatctgaccaccgactatgccatctacaccaattatcaggcgccccttacctccatcgacggcagcgacacacggcgcaccgaccgtccgttcagcgcctgctatctgatggatgtctaccttacggccctgggcatgcccaaggattcctatctgtccttcctggacgatgccttccgtcacctgccggtgtattctctgctgatcacccaggaaaaaggcgggaaaaaggatgtgcgtcggtgtcgggatgctttggacatcctctcctatgaccgggccatgggcgagcactattcttctcaaatacaataaataacagaaaggctcccttttcagggagacgggttttgttttatggatgttttgtatgcttctccccgtttggagttttccctgtgggatcagcaggacccccagctggcccacaccctgtggggaaatcctcaggtcacccattttctcacaaccgatggggtcatgaccccggagcagatcgatgagcgtctgaaaaaggaaatcgaacaataccagcgctgcggccttcaatatcacccggtgtttctccgggaaggcggggcctttattggcgtgtgcggtctgcgcccctatggcatgggagcggacatcttcgagctgggtgtccatctgctgcccgattactggcatgcaggctatgcccaggaggcggcccgccgcaccatcgaccgggctttttcccagttgggatgccaggccgtgttcgccggtcatcatcccaaaaacaccgcttcccgggcgctgctccttcgtctggggtttgtgtatgaccatgacgaattctattcccccaccggcctgtatcacccctcctacttcctgtggcgttcggcctatcaggggaaataactccccgctcccaatttgacagaataaaaaaagtggccaatggccactttttttattctgtttattctgtcaccggatcgcccggcacaacattctgattttccttgtgaatgctccgtgtggtactctggttcagacccaccgatgccgcaatcgttattatctcggccaggggcatggccagccagagccctgccattccccatacttttggcagccaaaggaggaaaacgatcaacagcacaaaggaccgcagcagggtgaccacagccgacaaatgcccctttccataagaagtgaggcgaatggctgtgaaaatattcagaccggccaccaggtatcccaggccatacagcctcatcccctccagggccagggtccaaacaccagtcccccgctgtgcaaaacaggataccgccaggggtgcagacaggaaggccagcccatacagcagcggcggggccgcagcaaagaaccgatagctgtaccgctccagttttctgcacacctgaatgttgccctgtccatatccatggctgagcagcggtgcaatgcccatggaatatccgaaatacaggccaataaagagaaactgcaaatacataatgatggagaccgccgcaataccgtcttctccggtcagcgccagggccgtacggttaaacaccacggttgtgatggcaatggccaactgactgacgcattccgatgctccgttgacggcgcagcggattccttccttgatttccatctccctccataccggccgcagttgccgccgcaggcgacagaaataccagatccccaagccgcaggaaagaaccaatcccaaaatagtggccagaccagctcccaacactcccatgttccacttggccaccaacacatgatccagtaaaatattggcagttcctcccgcagccgccaccaaaaaccatatcccggcgagccatccgcgcggataaaataagtacacagttctttccccaccacagcggggacgccgatcagccagatcattgcataaacgcgacaatcggccattgtcagaggtgtggcccctaaaaaagtcagcagctggggcaaacacagggccatccccccggccgccaatccgctgaccagcaatgtcatcaccaggcagacagaaaactgccgcccggccttctccttctgcccagctcccagagaaatggccgcaaaagcgccgcctcctgtggcaaaagccagggcgattcccgtcaggatattgacaatgggatagacaatattgatggcggccagcgcattggttcccacacaagccgacacaaaaattccatccacaatggtatataatgtgttgaacaacgatgtgagataggtgggcagaataaacttcacaactttgccaaaacgcatctgtttcggctgcatcagaatcttttccatcatcatgtttcatcacctcctctccagcatacaccttcaagttccttgaaggtcaagggctattttgatacaatgatggaaaaccgcccgaataggagatttttccatggagcatacctttcccatcggccagattgcaaattatttcgatatcgccccatccaccctgcggtattgggaggaagttggcgtcgtcacccctcagaaaaacagcaaaaatggctatcgggaatattccgtttccgatctgatgatcatatccgatgttttgttttatcaaagcctgggaattcccttaaaacagattcggaatatgcaccgcatggagctttccagccatgaggggatctgtgcccaacaaatgaaaacgctgcatcagcagcgctcggcgctgaaacggcgcatccgcaaacttcaataccatatggccgctttggataccatccgtcatctgcaggaacatccctaccagatcaccgccattgatctggactgcatcgtcccttttgagctggtggaaatcgaaaaactgaagcaatacatcgaaaacccccgcctgtattcccgcgtgcagcactcggctcatctggacgaagaacatcgcgggctgagcatcacgcaagcgcagaaagaccgggaaggttatacccatacactgtgggaaaaccggggcggccggtatgtcacctttctcatgcgggaagaaatcgcaccaggatttcccaacgacctgccccggcatctggccgctgtgcaggctgagcacaccaccggggccgtcatcagccgttttctcacctgtgcccaggaaaagggcaaatcctacgacttttaccagacctatattgaaattctctgaacctctcacttggaagggacaaatgaaaaaagtggccaatggccacttttttcatttgcttcaccagtctttccctctatgatttccttccaggaaaggcacacctggaaattcgccctccctctctccacagattccctcttgacgcttgttcccttccatgctattttcattgtaccgatagctgtaaaaaaagaggagtctgcgcaatttttgctgctttttgcacaaaatttgtgtttttcgggaaagaaggaaaattatgctgcgaatcgccctctgcgacgatgaagaaaaacatttggaaaaaatgaatgcattgctggaatcctatctccaatcccgtccccatttaaacggacaggtggagctgttctccagcggccatacgctgctcacccatcgggagaagcagggcggatttgatctgtatattctggatatcctcatgccctcagccagcggcattgacatcgcacgccgtctccgcgctttgggtgatggaggcgagatcatctatctcacccactccaacgattttgcctccgacagttacgatgtccgtgcctttttctatcttctcaaaccggtgaccgagcggaaattcttccaagtgctggatgaagctgtggagaaatccagcaagcgaaaaaaccaggcggtcatggtgcacaccaccgagggcacacagcgcatccttctggatcgcatccggtatgtggaacgtgtggggcggtgtatgcggtattattgcaccgacggcatcatcgattctcagaccatccgggtatcttttcgggaaatggtgactcccctgctggccgaccggcgcttttgcctgtgcggggccagttttgcgctgaatttccaatatgtcattggggtcaatggccagacggctttgctggacaacggccagaccgtcacccttccccgtgcggctgcatcggagtttaaaaaagcttggggcaactactggctggaagagggcacggtatggtagaattgttcgctatggaatatctgacggcactgggtatgaccatggtgctattatttctcgacagccgttattcccggcgttctaccattctgatcgtctatggcactgccttgctggtcatggcggccgtggcctccatctactgcatcgccggtctgaaaaccacactgcacatctatacactcattgcccatcttccatctcttctgcttttgcttctgctcagccggtttcgcagatggcagctggtctttcagttgttttccgccattctgttctgcacactcattcagcagggggccgggctgatgtactatttgtcggggcatcgcgtctggacattggttctggcttatgtggtcctgaccgccggggtgatctggttcctgatctctttcctgcggccgctgtttctccagacactgctggagcttcgccggggatggtggtttatgtgcctggtgatggccacatattatatcatcgtcatctatctgattcccaaccctgtgggttctgaaaaaagcagcaccattctgaagccagccatttctctgctgatggtgggcttttattctgtggtcttgtttctctttaccatcatccgcaaagaggcagaggcccggcacagcacacacctgtccaccttgcagctgtccgccctgcaaagccggatggaggccgtacgcacagcggaggacgccatccgcacagaacgccatgatctgcgccatcggcttcagaccgctatggagctggtggcccggggcgacgaaacggctgctctggattttctggatgctgcccagcgacggttggatgagcaaaaagaaatccactggtgccgtccaccggtgctggatgcagtgttttccacctacttcgctcaggccaaaagccagaacatatgggtggatgcaaaaattgccctccccgacaccctgccagtggacgaaggggaattggccattgtggtggccaatgctttggaaaacgccatccatgccaatcaaaagctccctcaaaatcgaagggaaatctactgcaaaatggtaggcactccctccgtgatgttggaaatttccaatccatgctccggcagcgtctcttttgacagcaaaggcctgcccctggcccagaaagatggtcacggactgggtgtgcagtccatttcggccttctgtcaaaaaaacggagccgtttgccacttcaatctgaccaacggctggtttcagctgcaggtggtcgtataaatacggatattccaccgccaccttatcaatccccttttctgtccccaacgcctttccttctgtattcttttggtatggaaggaaaggcgttttttattgcttcatggcaaatcggccattgacaaacaaaggtatccggcatatacttaacaaagttaactttatggaaaggcagggaacctgcatggaatggaccgatatgatgcacacccagcagcaaatgcaaaagatcgtgcgcgcgctgcttcctgtgcgcaaatcgttgctcaccgccagtgaatgcgaacttctggcccatctgtatttgtatccggaacaaaacacccctgttctgctcagccaggaaagcggcatgaaaaaagaagccgtcagccgctgtctcaagtcactttatgaaaaaaactgcatccgcaaagagcggcaaaccgcagatgaacgaagttaccggctgtttatgacagaaaccggcctcgcggaactgaaaaagggatatgaaagcattttgcagcctttttacgatctgtggcgcaaggccggggaggattttgagctatttatgcattcggtggaccggctggccacccacattgagaaaggacgggagcacacctgtgagaatgaagttctatgatgctttgcaaatggaccccgccatattgaaaggtcaaatcgccgcctgtgatacaaaacaggaaaaggcatattactggtttgcaatggccatgcgatcggcgctgatcgtggcatttgccgttgtattcatcagcctgctgtccggcctgttcggcgccgacaatacgccgctggccgtggccttgttctgcatgatgcttggcatccgattcgtcaatttccagtattgcgtaaccgattccctcatcactctggccgccatactggccattttggtgctggttcccagtgcagcggcagtgcttccctggttctgccttatccccctgcacttcgccgccttttttgccctgctctatatgacggcccagcagccggaaatgggcaacggcggattatatagttttgcctatgtctatctcactgggaacccggtctttggcgaagcactggtacgccggggactgctggccctggtgggctacctgatctgcggggccatcctgtttgccaaacacagaacccagcaccataccacccgttttcacgcagtggtgcgaaaattcaatccttctacgccggttcatctgtggcagctgcgtatggcccttggcgtcagtctggtgctgaccgctggccaggcctttgctgtggagcggtttatgtggatggggtttgcctgtgcatctctgctgtcggaatatccctactcccattctgtttccacccgcttccgccagcggatcataggggccgtggccggctcctgtgggttttacattctataccggctgacacccgaggtattccattcccttatggggccgttgggcggactgtgcctggggttctgcaccgattaccggtataaaacggccatgaactgctttggtgccttgatgctgggaaccgggatttatggtcttggaggtgatgtggtgctacggatcgcagacaccattctgggtgtcaccttcggcctgttgtttgcggccctgtttcaatggttggccggaaacaagctcctatcccgctcagaagctgcacagcaagctgtttcagattgatgctgcacaacgaaaaacccggccgatttcaatgaaatcgaccgggttctttgtataatttaatagtgtccgccatctttcctgttttcttccaggtcgaaacggacttcatcaaagtatatctttgtctgtccccactgcttctttttgggatgtgcaaaggcatccaggtaaggtgttcttgccaccgtctcccgggcctcctcttccgctttcagcagcacttctctttcgtccaccgaaacagcgccattcttgtccagtttgatttctccatccaccaggaccagatccacatctgtgggatttgggaatacatgcttgccacccggacattctggaagaaatccggcgggaaggtatcggttcccagtgcaatattgatgttgcagtcgcgatagcgtttgaaggaatccagatagcgtccgcctctaccaataatgatggggcaataaatcgctgttgtctttgtcttttcaaggatctccagatcatttcccggatcgtctgtccacttggttcctttgagcacataacaatggggaatccccactttttcgctcaagaatcccaagctgttcagatattcaatggggcttttccccgttttttccttgatatactgatattcaaaagcgccttgggccgcatgcagcttaatggggcaatcaagctcatctgcataggcttttgttttcagcaaaacttcttccgtctgggtttcgattctctccggcagcaatgcgccccggatcagcccattgtacgcaccgtcatattttttgataaacgaaactgcgctttccagtcctctctggccggcttcttcgtcaaactctaccgtcatgctgccgtcgggcctgaccacattcattccgcactgataactgggagaagtgtataatctcaaacccagttttgccgcatgatgcacaccggcttcttcttcctcataggtatcggcccattttttatagtatgtagaggtaatgggcatggccgttgtaacaccattgcgaatcacaaacgcctttgctttgtctgcctgccctgatgccaaataagtgcgaacaagattattggccgcatatcgaatatctcttttctgtaccaaacagttctgaaagacttcttctgcctcctggtatttcttctgcttgaataaacagtatcccaggttgttcaaagcgttctctgcatctggaaagacctccagcgtttttctgtaatacgcttcttccaatggatagtttcttttcttcccatagcaccaggccatccagaaataaagatgatccaaataaaatatgccggttggattttttacatcctcatattgctccaaataggaaagcgcattattccacatctgcatattatagtatgtatatcccagcagctcttttgccagataaatatggtcgttgacttgcaacacccgcagcaatgcatcggcaatatcctcattgttgttgctgtaatatacattctccaatgcttcacacatttctgggatgcctttacatactccgggtctatgaagcagctgccctaaataactccacattcctggaactccttctttgaggggcaccaccaggcagtaaatgaagtctccacataacatcactttgccttgctctaaaaaacgctgcaccttttccggaatgtattgtgccagtctttgattgatagttccggattctccggtaagcaggtcgtctgcagccaagtatatttggttgattggatcctgctttgataactgctgtaccgcctcctgatattccataaagcagggatcttttcgaatatcatatttcagcagctcagaatatcgcagataccccatagttaaactatccaaaagcaaatcacaatactggctttgcaacttattatgtaacgctggtggagcagatgctaccatgtttctgcatttttgaaaattaggcttcctgaaaaatcaatttggttatatacttccacgagctggttctggtaatggacaagctcctgtgcatctgccatgctatatgcctcctgatggtttcaatgcgaatatttcttctaaaaatgaaatgctgcatccagcaactgttttaccgtttcggccatagaaattggatcatccaaatgcaaggtttgcactttgaccagactcccgctggcagaagaatagcagaaaggcacctgttgacctgccattgcatcacaatctggataaagcagcacggcctgtttcgcttgatattctttctgatatgcatacatctgatacatatctgcttgcgaaattccgtaattgtgccactgaggagacagcagcttccacttggtgtccaatacagtctgctctccgctattcagatcttcaatgaccagatccggccgcagagcaaactgtttccatggcagttcaaagaggtatctgccttttgcctgtacatgcaagcggtattgctgggcgtccaagtgccgtcgcagaaccactgccacataactctcgaaaatccgctccatcgggaaaagcagggccagagcggcttgtccgccgaaaaaggtggtaaaactctttcccttcaagaatacccggcacagttccagaagccgctggtagtctgccatgaatcgggatcggctgcaatgttgaaagtcctgctccacattttgggacaccggaacttgctccataacggataacaccatccgcagatccttgcggttttgcaaatctgtggtgtgccgctgcaagtagagggctgtggacttcaccaggcggttttccgggcaatccacgccgaacacatcgtactctacgaagatgcgttcccggtgcagcagattttttcggatatgctccgagaatacgattttcccacggacacaagtttcgttatcctgttttaccgtataatccgattttaagccgcgcccgatcagccggtggctctcgtccaaaaacatgcgcacgaacagatccagcaagcgcatacgggaagtattcagatgggcggtgcgaaatgtcttgaacggagcctcctggaccgttcgtagcatggtgagaaacacctttcggaccgcttggtcactgttgtcttccgccagtgtcagtttgggcagaatttcaatctctgttccgtctttggtggcgatgactcccacatagtttttggcggtaatcaccttacccaaaccgggccttgcgctcagactcatcaattccagcggttcggcgccggaattggcatcccggctggagaggataaactgctccagttgatcgaatgtgtgttccggcagagaaatcatgcctgtccgcagcggcccattgcgggtaaaccccatgtattcccgaatggtatattgtttcaatggagttcacctcccaatggaatgttgtgcctaaaaatgccgatacacttccagatcaaagaacgccgccggattgatgcggtatgtagggcttatctcaaattcaagatcggtaccgaacagactctgcagatcagcaggttcagccttgaaaaatcgctggtgttctgggcgttttttgtctcccagtaccagacagattttctcatagtcgtcatagaaatactcctgcagaagcggaacaattttatcccggaagatctctcccagggtctcaatggacttggactgacgcaggggggtaaagaaggcatgtcccagcgtatgctcccggtcaaacagcacctcgatccggcggttcagcgttgtaagcaggctactgatggaaatgccctcgacttctaccccatccaggacaccactgtccggcatcatttccacaaagttgaaccgacgacggagggcagtatccagcagagcgatggagcggtccgccgtattcatagtacccagcaaatagacattgtcggggattccaaaggcttcgtgagagtatggcagcttggcttgcaattcttcactctgccccagacgcttggaaggctcaatcaaagtaataagttcgccaaagattttcgagatattgccgcggttaatctcgtcgatgatgaatacataggggcctttggtacccttcactggggctgcacctgaaaatccatgcctgcctaacacttcaatgacagtttccaccgccgtgttgaggcggtaaaccgtggacagggtcagacttttttccagacggaattcctcaataccgatgtttttgccctgaaccagccatttcactgttctcagtcgcttatattcgtcaaattccggatgacactccggttcacccgttaccacaccaattgcatcaatcgaccaggccgaataacaggataagacaatatcgcccacctgcattcggttcaaaaatgcgcccagtacattctttccaccaattctgtagtcggtctcatccgtgacactggcgccgtaatcgtcccatccgatgcgaatacagttatttttcatacagtaatcccggatagggtgctgacctgtgcctccaagagacaccttccagattgtcggggactctgagaaaccataggggttttgtttgggatctactgcaggaggctgtgctgttgcacagaattttttaaatataccatcggcaatctcataggagatgtcgccggtattctcatctgtatcttccgcaaaaaccgggcgaatgccttctataaagtcctcgtagccaaaagactggtggaaggtggtgaactcaatccgcccatcctgccgatactgccggtatcgcttcagaacctcctcgtggttttctgcctggacatcttccaacgatttcccctcaatgatcgccacggcatagttgacggtctggtaagtcttacccgtccccggagggccataaagaattgtattctttgcaaaaggcatcggatcgttcacctctttctgcgatagaagttttagtgcatctgctaactcatcacgaagtttccaagagtatgtaccaggctggcccggaagggctgtgcggcccacaaacagaattggccaccatttctgatcctcattttcattctgaaccaacgggcagcccgtcttctcctgtacccgtctggcaagctgaaccatactgctattataatgggcagaagtccctccagattgcagactcaactgtttacaggtcgcctcgccgcccaattcctgcatggttttcagaatcaacaggctttctgctgtacagacagatctgtccacaaaaagctctaaccactgttctgcgctgatctccggatcatactctgccggggacggccagtagtcgcttttataaagctggcttccatagtagatgatgtcgtctgtcaaaaggtgatgcgcaggatcaggataatacgagctgcccagctctgcccgcctggtttcaaacagattcagcagctcactgtcctgctgaacgcaggagaggacccggttggcaatctcctgataggtaagcacattctggctatctcccattttgcaggcggcctgcaagccggtctctgccagaaaagccttgagtttcccgtattgatagagaaaataccgatcgggctgtgcaaaaaacagataggtgcagatggtgcgatccttctgataatgctgtttcatgctctctttgaactgatacttggctaacagggtatctgcactttgcttaaagctttggatctgctcgacaatatccgctccgggagccaaaagctgctgaaacatggagcggaccgtatcaggctccttttccgcaaaaaatgcgatcatcttacagggaaacgagtaattggtgtccagcaaatttcccgcctgggccaaggattccttcagcatttctgcaaaatcggctctctctggattccaatgttcctgaaagcattggactgcccgccacttatacgcttcttccggaaaccaggcggcaaaggattccttgtattggctgataacacgacggatgggatcggcagacagctcccacgctgccatatccagaatccgataatttttgaaagagaaattggcatctcgaaaatctttgattttccggcagttctctatataagcttccagtttgccacgggattttagttcaatccccagtgccgcaaaaatatcctcactgcctacattgctgttgatgacagggaaagtgagcggttttaagcagtgcagtaccacagaggctgcagcggcctgcatcccacggaacgatttcgtcagcaccgatgcagcacgctggaatatctcctcatcgtccgtcatatccagaatatccacacacatcctgataaaagcgcgcacggattggatatctgtcttgccctggaacgagtaaaaaccagtaccaaacatgcctatgtggcctgtgcctgaaacagctttttcctggtttttgtaggcaccagcgtccgcccggcttttcaggtcatcaatcagatggtccaattcttgtttgcgaacctcgggcagatgcgttgcatggacagcttcatgctttttttcatagctgtgccgccatgttccaatacacatgagataaatggcgttaagatcctggtagtccagcgtggcttcatccacatcacagtaagcggatacaatcgcacgcaccagttcatagctgccgtcatgtacatccggtgacagctcgggagtacttttcagttttttcaatatctcttgatgcatttgaggtcaccctccgtttgtgcgacctgcaaccggccataatactgctccagcttctcgtcgcaaatccgctcgatttcttgcttttcctcccgggtcaacttcttccacacggactcgtccacctggatcacgcccagggtcttggtgtggtgaagcatctgcatatcctcaaaccgcttgaaggggttggacaggatattccgctgagcctgggcgtcggtatagccgcccttggcgtagatgctgctggccttctctaccaccagcccagcagcccggcgggcttcgtagaactcccggaagtaggagacgatatcgctgagcttcacccggcctttatcatcggcaaacagcagcaccgccttgagaagaaccggtttataggagtaactcatatccatctgccgcaccatatccagaaacaggtccttacgattggagtcgtcgatcagcgtccagccatattgctgggcatatttttgaagtgtctcctctttgaaatacttgaaggtcctgtgctcgctcatgggcaccaccagatcgggaaccagcaggccctccctgacataccgctctatggtctctgtctgcacatccacccggcggacaaactccatctgtgagatcataccggcggcttcctcctgccagttgaagatgtccaccagtt

SEQ ID NO: 2340 - DNA, 7071 bp, Unknown
  16S sequences of unknown bacteria
gccatcacccgcgccattgcggaccaggcccgcaccatccgcatcccggtgcatatggtggaaaccatcaacaagctgatccgcgtaacgcgccagcttttgcaggaatatgggcgcgacccgcagccggatgaaattgccaaggaaatgggcatttcggaggaaaaggtgcgggagatcatcaaaattgcccaggagccggtatcgctggaaacccccatcggggaagaagaggacagccacctcggcgattttattccggacgacgaagcccctgcgccggaggaaagcgcggccatcaccatcttaaaagaacagctgaccgaggtgctggataccctgaccccgcgcgaagaaaaggtgctgcgtttgcgctttggcctggatgatggccgggcccgcaccttagaggaggtaggcagggaattcaacgtgacgcgcgagcgcatccgccagatcgaggccaaggcgcttcgcaagctgcgccatccctcccgcagcaaaaagctgcgcgactttttagactaaagcacgccatgaaaaaacgccaagcaaacgcttggcgtttttctataccgctacggctggcagcgctggcagggctcatagccttggtcgatgagccattcacggctgccggtaaaggtctgcttgtttgtttcgctcatgtcctgggcgctttggcagtctggcttatgaaactttttggtgttggtgttgagaatgtattcaaggcctgcctcgttcgtttgctgcgggcctgtttttgcctcggtgctgctgccgtcagtataatcgatggccacgccgggctgcacgttgtagcaaaatacgcagaagcgcacgccgtctccgccatcctcggttgaaagcgcttccatcaaaacgccgcgggcaaccagctcctccccaataaatacaggcgtgacccgatagagcacgggacggccggtgccctccacatacgacgccacctggttttcaaagggcagcatgccttcggtattcaggtagcgtgtgcctgtgatcaggttttgcgtattggcattttccgctgttagctggtaaccgatcagatggcagcggttgtatagatactggccgtctacaaagctgtaccgcaccgtctgccagccgctggggcgcaccatgccgatgctgccgcgctcgctggtgggcatggtgcgggggctgaccagcgccatagccacgccgcagcgccccaaatcatccagctcggcatacgattcctcctggataggggccatatcctcttcggtgaaaaagggctggttgccgttgatgacggcatacggctcgccggcatacgcgggcacggcagcatattcgaaatgatctgcctgcggggcggccgtctcagccgtattggatgcaggcggagcctgcacggggctgcatgctgcgccaaacagcgtacaaagcagaaccagcagcgagagcagcgaggattttatccttcgtttcatacaagagcacctccggcgccagggaaatcagaatctatttttagtatagcataccgcggcccgccatgcgctttttcgcaggcgggccttgcgccggaaaaaacaagatgctataataaagccacatttgaatcaaatgtcttcagggcggggtgaaattccccaccggcggtatagcccgcgagccttttggcagacccgttgtaattccggggccgacagtacagtctggatgaaagaagatatgcgcaaagagtctcgcccttttttacgtgcacgaaaggcgggattttttaatttctccatatcttcggttaggagaaacatgaacacgattacaaccaaacacacccctttaacgcagacccgcacccttgtcagtatggcgatgctgacaaccatcgcctacctcttggcctttttggaatttcctgtgccgctgacgccttcgtttgcgatgatggatctttccgatctgccggccttgataggggccatgtccatcgggccgggggccggcgttgccatcgagctggtgaaaaacgccttgcagctgttgggcaccgccaccggcggcatcggcgaattggccaattttctcatcggcgcgtcgtttgtctttaccgccggcatgctgtatcacaaagcgcattggaagggctggcaggcctgtgtgctgggcgctgtggtgatggcggccgcggcggcgttggccaactactttatcctgtttcctatgtttaatgcgtttatgccgatggatcagatcatcgcgatgtttggagagcttatcccctttatccatacaaaattggatatcattctattcaataccattccttttaatctgatcaagggcttggccattgcgctggtgacgctgcctgtatatggcaagctggcgcatgtgttgaaaacaaacgagtaggaggatagacaaagcgatggactatctggcttttttgcaaaaggaaatccatgccgccgcctttgccacgctggcagaggacgggcggccggaagtgcgcatcatcgacattatgctttatgacggccatagcctgtattttttgacggccaagggcaaggcgttttatcgccagctcatcgagcaaaaatttgtcgccattaccggcgaaaagggccggcgggcggtatcgctgcgcggccatgtccgcgtggcggacccggccctgctggatgtgatgtttgaggaaaatccctatatgaaggacatctatcccggcgatacgcggcgcgcgctggaggcgtttgagatttatcaggccagcggcgagtattttgacctgacgcagacgccggtgttgagggagcccatcgccatcggcgccggggaatctgccacgggacgttgctaccgcatcacagcgggctgcacggcttgcgggcgctgtatgcctgtttgcccgcagcgctgcatcgagccgggccgtccataccgcatcgcgccggagcactgtctgcattgcggggcgtgcgcggcggtttgcccggccggggcggtggtgttttgagggcggttgcccgccgcttgccgggtatggtacaatgaaaacagccgagggccttgccccttggaaggacgctttaaacgggggagcggcaaaggtctgctccctttttattggctgaaggacagggaggaccgcccatgaaaccgttgacaaagcgcttgcagaccgctttggatctgttgcctgcctgccgcttaacggcggacattggctgcgatcacggcattgccgccgaggcgctgctttgccagcgcaaatgccaaaaggtgctggcctgcgacatcagcgccccttcgctggaaaaggcaaaggcgcggctgacgcgggccggcttggcagcgcatgccgaatttttctgctgcgatgggctggcaaaggccaacgaagcagacggcgctttgctcttgggcatgggtgggcgcaccatcgtggaaattttgcaaaagggccgttcgctcttgccgcagatgcgcggcctggtggcaggccctgccggccatgccgaggcgctgtaccgggcgctgcccgcgctggggctgcgtgtggaggacgagcgcatcgtctgggaaaatggacgcttttttccgctggtgctgcttgtgcccggcacccagcgaccgcttttaggcgcggcagaggaattggggcctgtcaactgccaaaggcgggacgagaccacgctgcgctatgccgcatggctgtgccgggtgctggaaaaaacgcttcgggtgccgggggcttcccgcaccgccgcccaccaggaggaggccgcggggcgcctggcctgcctgcatgcttttttggaggaagaaagatgaaacaatccatcgcactgacggaacttatgcgctgtttggatgagtttgccccctttgccctggccagcgactgggacaatagcgggctgcaaatcggggatttttccgtgcccatcaccggcattttgttgtgtgtggactgcacggaggccgtggtacaggaggcagtggaaaagcactgtgaattgatcctgtcgcaccatccgctgctgtttcgtccattcaagcagatcgtggagcagtttggcagccagcgcgtcgtgcgccagctgatccgccataacattgcgctggtcagcacgcatacgaatttggattatgcagaaaagggcctctgctttgccatggccaaaacgctgggcctggcggagatacagcccgtcatcggcccgggcgaggaggacgccggctacggcaggtggggctgtatagaaaccatgccgctgcgggccctggcgcaaagggccaaggaagccttttccgctaccacggtaaagtacgccggcgcgtcggatgcgccggtgcgcaccgtgctgaccgcctccggcagcgggctcaaggcagtgctgcatcatgctttgcagctgggggtggatgcggtggttacgtcggatgtggcgtacaacgatgcgctggacgccgtggcggccggcctgtgcgtggtggatgccggccactttgataccgaaaaggcctgctgcgaggtgtggaggcaaactttacaaacaaagtttgatgcgctacaatatagtgtacggttatacactgcacaaaatagcgtagatgtgttcaaacaagtgtgacaagggccttacggctcttgttttttcgccgtagataactttatgtgagagaattttgaagaaagcagaggtgaccttcatgatccaattggagccgctttggaaataccaaaaggcagacctggcgctgtttcgctttgaacggggattgaaaaaatccgaaacgcggaacaagctattgcaggttcgaaacagaatcatggagcagcagaacagcatcaaacgcctggagcagcagctgaaaaagagccagacagaatgccggcgcattgcagaggcgctgaacacggccaagcaaaaggcggagcaggtaaacagccagctctcttccggcgcatacaccgagatcaaacaggtgcgccaggccatccgccagatggacgaggccacaaaggccctaaacgcagataaaaagctcttgcaggatatggcgcagattgccggccgcacggaaaagatggtcaaggatgcgcgcgccaagatgctggagggcaaggcggagtttgacaagctcaaggttgtccacgatgcggagctggcaaaggccacgccggaattggagcgcctgaatgaggaggtaaaggccatggagccggatctggacaaggcgcttttggccaaatataaacagatcaagaaaaacagggtaaaccccatagccctggtgcaaaacaaccaatgccagggatgcaatatgtcgctgcccagcttgacgctgagcaagctcaaagagcaaaaggaactggtagagtgtgaaaactgcgggcgcatcctgtatgtccgcgagggaaaggacgaggaataaacaaataaaaatttgcgagtaagccagatggccgcgggcgttttttgcgtccgaggaaagtccgagctccacagggcagggtgctgggtaactcccagtgaaggcgacttcaaggaaagtgcaacagagagataccgcgaccccgcagcatgcgggacgtaagggtggaaaggcgaggtaagagctcaccagcggcttggcgacttgtccgctatgtaaaccccacctggtgcaaggaaatagggagcagcatgtggcggcccgtcacgctcccgggaaaaccgcttgagcgcgctggcaaccgcgcgcctagatagatggccatccaatacagaactcggcttatagacttgctcgcatttgctttttacggcccgccgcgcaaaaaacggcgctgcgggccgtacttatgaaggaaaaccgccgtaacaaaaggaattttgttgcgttctggcggaaaatggcatataatcaaatgctgaaatccaatgaaaaatacaggcgcgggccccgtgccttttaggaggagaaccgttcatggcatcgaccgtcaaaaagttagaaaaatccaccgtagagctccgtcttaccgtcccggcagaccaattcaacgccgcgatgaataccgcgtaccaaaaacagcgccggtatttcaatgtgcagggcttccgcaaaggcaaagcgccgcgcagggtcatcgagaatttctacggcccggacgtttttgttgaaggtgcagtcgatgaggtagcgccgaaatttttggaagaggcgctcaaagaacacgacctggaattggtaggccgcccggctgtttccctggaagaggcgtacaagcccggccaggatgtgccgctggtgttcatcgtagccgtgtacccggaagtggagctgggtgaatacaaaggcctggaactggaaaaaatcgatgataccgtcaccgacgagcaggtgcaggccgaggtggagcgcgcccgcgatatgcgcgtgcgctatatcgaggtagaccgccccgtgcagatgggcgaccgcatcgtgtttgactataagggcaaggcggatggcaaatactttgaaggcggcgaggcccagggcgccacgctagatatcggttctggccagtttatccctggttttgaggatggcatggtaggcgtggaaaaggaaaaggccgcggagatcccggtaaaattccccgagcaatatcacgccgaagagctggctggcaaggatgcgatcttcgaggtgctggtgcacgaggtccgcgaaaaagagctgccggatatcgatgatgatttggccaaggatgccagcgaatttgacacgctggacgaatggaagcaagatattaaggcgaaactgacagaggcggccaagcagcaggccaagatcggcctacaaaaccaggccctccaggctgcggcggacaacgccaagctggaagtgccggatgcgatggtggaaagccagatggacaacatcctgcgcgattttgcccagcgcttgatgtatcagggcctgaacctggaagaatactgcaagtatactggcatgacgcaggaacagctccgcgaatccacccgcaacgatgcgctgcgccgttgcaccaaccaggtcgtgctg

SEQ ID NO: 2341 - DNA, 7638 bp, Unknown
  16S sequences of unknown bacteria
aaataagtagacggtgttgcccagttatcatgccaaaatttatggattttaaggtatttgaaatcccatttattctcaaatagttccaacttgtttaaagcggtttcttccgttggggcagtatatacaagtttcaaatctgtcatcaggtttttaatgtccttgtaggagacaaactttgtagaattgtagatctgatgggtaatatgctgctgaatctctgttttggtataaactgaagcaccttttcaagttatacccaaattttaattattcttcattcttttgtacaatttcaagaaatacaagcaaaaaatcaccgagactcactttttagcgaatctcggctttttgatatgctattttttatagcacccttaatgaacttgaactataagctaaatatggtatatgctctctaattacaaatatatattaacaatttcatttaaatcattgatgtagtttttaatttcgtctgcatcaacactgtcattttgccctctgaaaactaaatcatatttacataaaaattcctcaaactgtgaatcattatcttctaaaccttttgcgtaaatatacgaaataaccataatggcggcatccataggatgcgatgcaaaatggtcggcatctgctaacccagaaaccatgcctctatcaggaaggttgtataagcttctgactttacgttctagtataatagcactgttgtgatcaattatattcatgttaattttctccttttaattttctcctttttattattgatttgtataccttaagttcaattcatttcatatattataccataaaatatatggaaaataaattttttgttttatttgacataaaaattattcataacctatcctaatagtgtccgagacatagcttatctgtaaaatatttggtattcactatatcacagtttatcatttcgttttagggttattaaaagtctaatgatattacccgtttcatacataatatactcaagaatgtttctatcagttttatcatgatgtttagcattattgtttatataatttgtatagtttttcagtgttgcttcaagattattacttatatcttttgggacattgtgttcttttaagtaattcccatatgtggatctcatattttcaagacttttgttttcttcgaaaaattccataaagaatgtttcaagtgattttctaaagctatcggcaacatcactggcagtttcattggactgagtatagtatccgatcaacgcctttttccatgccttttgtgattccggataatgttgtaaccagtcactgacatcggaaacaagggcttcgtcaaactgtttcactccacgagggataatataataagcttctccttcatttataatctcatattgtatgtttaattcagatagttgtttgggaagaaaacctttaattaaagttataagagcacggttatttatatgttttgccgctgtgtttgaaaatgctacatacttatttactaattcattaagagtcgttgtacaatcaatactttctaatacgccaataatattttgatttgcgggataataaccaatttcaataaaataatctataaatgatggatttctataagcgttatcaaattctggcctatttaaatatgccataagattctttattttatttttcaaaatttcaaataagtcattatcagtgtaaactattccaagtaggttgttgtaatcgttccagttcatcgaatatctcctttatcaataaatcaaaaatattttatatattaaatatatcagttattattttataaatcaataaaataaaatatattataaataataaaaataacccaattttcccaactttgcgaattctaatcaaatcccatattgaaatccccacataaaaagtgtataataaacatatacagttctatattccaaaattacaaaatatacaaatgtgtgcggatatagagcaaatacgatatggagaaaataaaatgaaaaagattatttcattgttgatggcggcggttttggcagcgacgatgttcgcaggttgttcgtcttcatcttccggtacgaccggcacaacttccggcaaagacggcaagttgaacccggctcttgaagatgtaagagtaagacaggccatcacaaagcttattgacaaagaggccattaaagaaatttatggcgaaaatgctacggttcttacttctcatgtaaacccggacagtgatttttatgatgaaaacttgcccgaatggcagagagatgtagagggcgcaaaagagcttcttaaagaggctaattttgattttgattccgaaattaaaatcgcttactactacaccgaccagacaacacaggatgttatcgctgtaatcgaatcaaaccttaacgaggccggtatcaagacaagttccacacttctttccggcgacttgggtcagcttatctatgttgacagacagtatgatatgcttctttgcggcgaaagtgccgccgatgttgccgaaatgtacttcttgcttttgggtgcaggggataccgcttactttaacgatattctcggcgacagagaagaaagacgggagcttatcgacaaatatgttgacgagtacaacgcaacaaccgatattgaagaacagaagaagattgccgcaactttgcaggaaaacgctatcgaagaagctgcaattatcccggttgtttcaatcaacacacttgccttgtacaattcttcaaaggtttctttcccggacagcatatttgattccgactggaaaacaagagactacaagtttgaagattggaaacttctttccggcacaactttgaacctgccttggtcgcagcagatgggcattgacacattgtttgaaaatccgtcaaatgatgttcagtcacttctcagcccgatgatttttgacagacttatttccgacgaggccgacggttcaatcacttgcagattggcaaaggattacacaatttccgaggacggccttacatacacatttacacttaaagacgcagtttggtcagacggcgaaaaagttaaagcaagcgatgttgctttctcactttacgcatatatggcagacccaaattcaaacttctctaacattgccgcacctattgtaggttccgacgctgttaagaacggcgagagcaaagaatttgaaggcgttgtttacgatgacgaagcaaacacaatttcaattacattgtccgccccgaattcaaagtacatgacaaaacttgcaggcttgtacattttgccggcacaccttttgggtgatgttaaagccgaagaaatttcaacttacgaggcttactggtcaaaacctgtgggctgcggtcagtacaagattgatacagtttcattccctgattactgcacacttgttcctaacgaaacatactacggcgaacagccgggtatttcatccgtaacatttaagtcttacgcaacaggcggtgcagacgcacttacaaatgctatcattgccggcgaagttgattttgcctcaggcaacgaagtaaacgatttgaatgttgcacagtcaatcatttctttgaactctgatgttaagatgattgaaatgacaagcaactatcagagacagattttgtttaatttctaagcaaaattttgattttgaatattgaacacaacggctttatatattataataatgtaatatatagggcgttgtgttgatgttcgtttttgaaaaaaataaagtgggcaccgacagttcaccgccggtgcccatttaactgtgatatatacacatcactttaaacacttatccggcgccgttgggttttgctatggcgctcaaatagtttaagcaaaggaaagtcatataatggcgaaatactttacaaaacgagttcttgaactgatacctaaaatcttggtaattacggtaatcgtttttgcggtactgcaaatgttgcccggggacgcattgtcaagaactatacctccgatacagtataatcaaatgtcggaagtgcaaaaagaggccatgagagagtccatgggacttaatgacccatattatattcagtttgtaagatggtttggcaatttgttgaaaggggatttcggttattctcaatcaacagggtcaaacatattcgagatgcttaaaaacagactgccggccacaatagaacttacattgttggcccttataattgccgggggtttcggcatatttttcggttttatagcctccttgaaacaaaattcacccttggactacataaatacaactgcctctattgtgggtatttccatacctgaatttttcttcggtattctttttattcttattttttccgtttatttgaaatggttgccctccggcggaagaatgaccgtaggggttgactcattttttgacagattaaagtacatgattatgccggctacctgccttggcatatctttgacggcaactctttcaagatacacccgttccacaatgcttgacgttatgggcaaggactatgttaaaactgcaagagcaaagggactttcggaaaaagatgtgattttaaagcacgttttcagaaatgcgctttcgcccattatggttattttggtaatgcgtttgcctatgcttgtatccggcaccgttgtaatcgaggcggtgtttaactacccgggaatgggctcgatgattttggatgccatttccgcaggggatatgccggtggttatgattacaacaatggttgttgccattgtaacgctttttgcaagtttacttgttgatatttttacggctctccttgacccgagagtaagatttgaatagggggatatttatgaaaattaaatcatcttctcttaccaaaagaaatatacagaagtttcttgataataaaatggctgttgtcggggctgtggttttaatcgtgatggtgctctgctgtatttttgccccgttgattactcaatatgccccggagcggattgatacaaaaaacaaattgtccggaataagttctcggcatattttgggaaccgaccgattgggcagggatattttttcaagaattttatacggcggaagatattcgatatttatcggccttgtcagtgctgtcggacggagtcgggtaggggtgattttcggctgtattgccggatacttaggcggccgggcagataagatacttgtgtcggtatcggaatttttctctgttttcccgcagacattgctcattcttttatgtatgggctttatgggtcagagcatggttaatataatacttatatttataataacgggatggagtggggtattcagaattgtaagaacaagaatactctctttgaaacaagagccatttgttgaaagttgtgttgcaaacggaatttccggccggtcgattatgttcaagcagctgctgccaaacacaatcggcccggtaattgtacacaccacacttgcaaccgcaggttatattttggcggaggcaggtctcagctttttgggtatgggcgtccccgcaaaaataccgacttggggcaatatcataaatgccgccaaaaggcttgacattataataaattcgcccttgctttgggctgcccccggcggtgcgatttctctgtttgttttatcaatcaacttcttaggcgacggcctgagagatgtttttgacgcaaaaaattaagtaattatggaaaataagacgattttaaaagttaataacctgcaaaccgagtttactgtcggaaagaaaaaggtacacgccgtaaatggtgtttcttttgagctgaaaaaaggtgaaattttgggaatagtcggggagagcggctgcggcaaaagtgccacggctcactcacttttgcgactgttgcctaaaaacggcaatattatcggcggcagtatagaatatacatacgataacggggagacagtggagcttacagagcctgaaagcacatctgtacggcttagaaaaataagaggaaaagaaatttcaatgatttttcaagatcctctttcatctttaaacccggtttacaccgtaggcaggcagataaccgaagccattttgcggcacagaaaggttacaaaagcccgggcaaaggaaatagccgttgatatgttggcaaaattgggaattcccgaaccggaaaaaaggtttaacgaatacccacatcaattttccggcggtatgaaacagcgtgttatgattgccattgcaatggtaaattcgccggcaattttgatagccgatgaacctaccactgctcttgatgttacaatccaggcacaaattctcgatttgatgaaaagtctgaaagagaacaacggcacatcaatcataatcataacccacaacataggcattgttgccgagatgtgcgataaaatcgccgttatgtatatgggcagaattgtggaaacaggcacagcagaggaaattttgacaaatcccaaacacccttacacaaaagccttgttaaaatctgtgccggtgctgggaatgaacagcgaccgggagctttacaccataaaaggacggacgccggacggctcaaccgaatttatcggttgcccttttgccgacagatgtgatgagtgcaaagaaatttgcacaaaacaaatgtcgaataaagtccggttcagtgatacacattatgccgtatgtgggttgttgggtaaaaatatatgacggaaattacaaattttgtcatgaaaatataactgcattgagaggaaagtaaaaatggataatcttcttcgagtggagaatttgacaaaatattttgatgtaaaacagggcggttttttacaaaagcctgttaaattaaaggccgttgacgatgtttcttttacaattaaaaaagggcagacctacggcatagtaggggaaagcggctgcggcaaaaccacacttggcaaatgtgttgttcgcctatacaagccggacagcggtaaaatttttttgaatgtaaacggccaggaaaaagatattttatccctgagcaaagaggagagttttgccgcaagaaaaagggtacagatgatttttcaagacccatatgcatctttaaacccggtaaaaaacattctatcggcatttgacgagccgttgaaggctcacggggtgaaatccgcagccgaaagaaaagaaattgcggtaaatgcgcttgaatccgtaaatttacaggctgattatatatacagatttcctcacgaattttccggaggacagcgacagagaatttgtattgccaaagccttggcaatggaaccggatttgattgtctgcgatgagccggtaagcgcacttgatgtttcggttcaggcgcaaattttgaatttaatgaaaaaaattcaaaaagaaaagggaatatcttatctttttatcgctcatgatttgtcggtggtgcagtatatgtccgacatgatttccgttatgtatttgggcaaaattgtggaaaccgccggggcaaaggaactctatgagaaaaaattgcatccttacacccaggctcttttgtctgccgtacctgttccggtttggggcgcacagaaaaacagaattattctaaaaggtgatgtgccgtcgccgataaaccctccgtc

SEQ ID NO: 2342 - DNA, 15105 bp, Unknown
  16S sequences of unknown bacteria
tgagcaagaagcccccacttcaaaatctgggatttaagtggtgggagcatgtcacaaagattaccggagcatccgcgaatgagtatcgcaaccgcatgtggggcggtttgacaaacagccggaagtagggtatagtgaaagctgcaggcaaacagactcaaagggggtattatgattcattcaagaaaaaaaggtgcgcacatcggatggatgttgctgcttttactggtgctttcgatgggaatcgcttctgtgcaggcaagcgcggcaccggtctcgacagcggcaaagagcgcagacggaaaaatcgtgacaaagggctctgataagtattatcgctataaggacggcagctatgcaaaaaatacatggattaagatcggtaagcggtcgtactattttctgaagagcggaagaatggcggtcagacgcatgcagaagctctcaggaaaaacctattattttaaggcaaacggagtacgggccgagtccatctggatcaaaaagggcggcaggtattactacttcgataagaatggtgtccgcgcggagaacaagtgggtcaaacggaacggaaagtactattacgttggagaaaatggtgcgatcgttacaaagtcgtgggtagataataataaatattatgtcggtgcaaacggcacacgggtgacgaatacggtaaaggatggctattacctgaatgccagcggcaagaatgttatcaaggtattcaatggtgactatatcttcgtcggtgattcccggatggtcggcatgcagagtgcggttgccccgtccgatacactgtacatcgcaaagagcggccagggatacgcgtggctgaaaagcacggcaggcgtacagctgcgctattatctgaaaacgaatccaaatgtgaaggtcgtgctggcactcggcgtgaacgacctcaaaaatgtgaattcctacatcacatattataagaaactgattaaggagttcccgaagacaaagttctatgtgctttcggtcaatccggtaaatgaaaagatccgcagataccgcattaagaattcttcgattgagtcttttaataaaaagatgtatgtggcatttcgcagcaggtatgtgaatacatacaggcagatgaagcaggaagggtttggtacaaaggatggcctgcattatctggaagcagattatcagaagctgtatgcaacgattataagtaaaattcagtagaacaaagaactgttgctatttgcccgatctgggaaaacagccttgacaaagtggagtcaggtgtggtatattcggcaacagttgtagtgtgtaactcgatttcaggaggcattaactatacatagcaggatttgttatgtggggttagtgtctctttttttatcagtcggctgcaaagacgactgacctcacgggcattttctgcaaaagtataaactacacaaggagtaagaaaatgaaggacaaaattttcggtgttttgcagcgagtgggaagaagctttatgctcccgatcgcaatccttccggtagccgggctcttgctcggaatcggaagctcatttaccaacgcgaccacgattgagacctacggcctgacaaagctgcttggagacggaacgcttctccatgcactgctggtgatcatgaataaggtgggaagtgcagtatttgacaacctgcctctgatctttgccgtaggcgtggccattggtatggcaaagaaggaaaaggaggtttcagcgctgtcggcggttatcgcatactttgtgatgaatacagcgatcagcgccatgctgacgattaccggacagattctgaatgatggaagcattgcagaatccgtcctggaaggaacaatcacatctgtatgcgggatccagtccttgcagatgggcgtgtttggcggtattatcgtaggcctcggagtagcggcactccacaaccggttttaccggattcagcttccgagtgcgctttccttctttggcggcacacgtttcgtaccgattatttcaaccattgtctacatgtttgtcggcatcctgctgtattttgtatggccggttgtccagaacggaatctatgcgcttggcagtctggtgaccggatccggctatgtgggtaccctgattttcggtctgattaagcgggcactgatcccgtttggactgcatcacgtgttttatatgccattctggcagacggcagtcggcggtacgatggagatcgcaggccagatggtacagggtgggcagaatattttctttgcgcagcttgcggattcagccaatattgtacacttcagtgcagatgcgacgcgctatttttccggagaattcatctttatgatttttggacttccgggggcggcactggcgatgtatcagtgtgcaaagccggaaaagaaaaaggcggcaggcggcctgctcctctccgcagcactggcctgcatggcgactggtatcacagagccgctggagttttctttcctgtttgtggcaccggcactgtttgttgtccaggtcattctggcgggaagtgcctatatgattgcacatatgctgaatattgcagtaggccttaccttctccggcggcttcctggatttcttcctgttcggtattttgcagggcaatgagaagaccagctggatgcggatcattccggtcggtatcatttacttctgcctgtactattttattttcaaatttatgattaaaaagtttgatttcaagacaccgggacgtgaggatgatgataccgagacgaagctttatacaaaggcagatgtaaatgccagaaaagaagcgcagacagacggaacgacatccgtggacaaggaggatgcgcgaagtgaggcgatcacaagaggacttggcggaaagaaaaatatttccgatgtggactgctgtgcgacaagactgcgctgtaccgttcatgagccgggaagagtaaatgacagtattctgaaggcaaccggtgcaaccggtgttgttcatagaggaaatggtgtacaggttatttacggaccgaacgtaactgtgataaaatcaaatctagaggattatctagaaaaggccccggatacctatgcagagacggaagcggcgaaagcagaagagacggaagtacagccgcaggaggcgcaggggcagaaggtaatagagaccattaccgtatgctctccgatcacaggtctggcagctgacctttctacggtaccggatgaggcctttgcagggaagatgatgggagacggagctgcggtgacaccggaagatccttatgtacgtgctccggaggacggagaggttgcatttgtatttgacacaaagcatgctattggatttgtaatggattccggagtcaacattctgattcatgtcggaatcgacacagtaaaactgaacggagagggatttgaggcactggtagagagcggccagaccgtaaagaagggcgatccgatgctgaagctggatctggagtatctgaaagcacatgcaccgtcgctggcgtctccggttctttgtacagagctggaggacaatcagcggatccgccttctgaaggaaggttcggtgaaggccggggaacctctgtttgaaatcgaggttcttgcttaagcaatgccttaaagtgggtaaaataaatgtacaggatagcaaaaacactgaaccacaactgagaacagatcagcaatccgctgaccgatgatatccgtgtgatgttttataaggaatacaaagtcgcctcctgcattcaggagcttttatgggggcggcttcagatccggatcgatgagcatgaggtcggctatcttgcgcttcatgtgcattctgcgattgaggaagaaaaggtatcgcaggcgatggaagtggcaagagccgtccgggagagtatttctcttgtggagcatatcaccggatatacgattgatgtgatgtcgttatcctataaccgtatgatgaaccatatccggtatatggtggcaagagcggtacacggagaaaaattaaaagtaaatattaatgattatatgttagtgaagtttccagatgcatttcaggcggcaaagcagatctgtgaagagatggaaaagcggctgatgcttccgatggaggagatcgagatcggatatctggcaatgcatatggagcggatcatggacagagaagaaggagaataaaactatgaagacatttgaatatacgatcaaggacgaacttggaattcatgcaagaccggcaggagtactggtaaaggaagcgaagaattttacatctgaatgtaccatcacaaaggacggaaagaccaaaaagctgactcagctgatgatgctgatgtcacttggcgtcaagcagggagataccgtgactgtcacagccaacggcgcagatgaggatgctgccatcgaggcactgaaggcatgctttgaggcgaatctgtaagcacctgcggaggaaggacgatgcaatattttcagggaaaatctgtatataaagggatcgtcatgggaccggtggcggtgcttcgaaagaatgattatcaggtaaaaagaaccaggatcgaggatgcggatgcagagattttgcgtgtgaccggtgcagtcgaagcggtaaaggagcagctgggacggctgtatgacaaggccgttcaggaggtcggtgaggccagtgcagcgatctttgaggtgcatcagatgatgcttgaggatgaggactatctggaatcgatccagagcatgatccgtacagagctggtaaatgcagaatatgcagcggcagcgaccggggacaattttgcgcagatgtttgcggcgatggacgatgattatatgaaagcacgcgccgctgatatcaaggatatttcggagcgtcttgtccggaatttaagtgggggagcggatgcggacctgaactccatggagccgtctgtgattgtggcggacgacttaagtccgagcgaaaccgtgcagatggacaaggagaagattcttgcgtttgtgaccgtacacggttccaccaattctcacacggcaattcttgcgcgtatgatgaatattccggctctgatcggtgttccgatgaagccggatgagctgaagaacggtatgacagcggttgtggacggcttttccggtcaggtgatctttgagccggatgagacggtaaaggcagagacgaaaaagaggatcgaggaagaagcggaaaagcagaagcttcttcaggagttgaagggaaaagaaaatgtgacactggacgggcgcaggattcatatctatgcaaacatcggaagtgtcggcgatatgggctatgtgctggaaaatgatgccggcgggatcggacttttccggagtgagttcctctatcttgggagaaatgattttccgaccgaggaagagcagttccaggcataccgtcaggcagtacagatgatggcagggaaaaaggtcatcatccgcacgctggatatcggtgcggacaagcaggtggattattttcagcttggccgggaagataatccggcgatgggctaccgggcgatccgtatctgtctgaaacagccggagatcttcaaggtacagctgcgtgcactgctgcgtgcggcagtctacggcaatctttcgatcatgtatccgatgattacctccacagaggaagtgaagcggatttacgagatcgtagcggaagtggaggaagagctgaaggaacagggcgtacagtaccggattccggagcagggagtgatgatcgagacaccggcggcagtgatgatcagcgatcggctggcagagctggtagatttcttcagtatcggaacgaacgacctgacccagtatacgctggcgatcgaccgtcagaatgaacggctcgatgatttttacaatccgcatcatgaggcaattctgcggatgattcagatggtagtggagaacgcgcacaaatgcggaaaatgggcaggtatctgcggagagctcggggcagacccgacgctgacggagcagtttgtacgaatgggcgtggatgagctttccgtagcgccatccatgattctgaagcttcgcaaaattgtccgcgagatgaaggcagaagcataagaaaaatgacagaagctctctggctgagaaaacagtcagggggcttttttgtcaatacattttctgcttttctgcgtgtccgttctcatccagcagaaaccgtgagtcttccgtatccagcttccggtatgcggacggtccggccttataatacttttcaaaggaatgcgcgaaatgctggcggctgttgtagccgcaggcaaaggcgatatccgtgatcttcatggagctgtttgtcagcaaaaaggcagcctgttctagccgcttctgtgtaatataaccgatgacggagcagcccatctgccgcgagaacaaaagctgcagataggatttattaataccggtatgtgcggcgaccaaagggacagtcagcgtttcaagaaggttctgctcgatataggagcaggcctttttcagataggctgcgccctgtgtcctgcgggagtgcttcgtgcagaagagaaattccagaatcattctggaaaagagaagccgcatcagctccggcccatcgtcctgtgcaagcggaagctgcgtgatcagatccttcattgcatagccgagattgcgctggtcctccgcaatcaggcaggcatctcctgcgtccagccatgtggcaaagccggggcagcgctcaagcagttcccgaagcggcagctccgtttgtttccggccaaggcagttaaattccagattcaggattgcgcaggggcgcccggcactgatttccagccgatgcggtgtatttgccgacaggaaaataaactgatttgcagtcagtgcgtgcaccccatcctcactgtatacctgacagccgccacttgtcacatacatgatctcacagctgtcgtgcgtatgcatcggcatatgatactcagggagtgagagcgcatagtaagcggtgacagagataaaaaacggagaggcgtcgaagggtgatttcatggcagtagtcctttgctttttttgctattataagcctgcttttaaaagaatgccaccggaaaattaaaaatttaaatgcgataatatcttgcatattctcccttccgcgagaatatgttccacctgatggacgtgtggcaggtataatagcagcatcagaaaaatccggcggattgcagcggccggagaaaaacacctgcaaagaaaaatgtggcaggagacatcaggaggaatggatatgagctttaaggtagcatttatcggtgcgggcagtcttgtgtttgcacgcacattatttacggacattatgtcggtaccggagtttcgggatattgaagtcgcatttacagacatcaatgcgacgaatctggagcggacgcgcgcgctctgccagcgggatctggatgcgaatgggattccggtgacgatcgaggcgactacagaccgcagaaaggcatttgaaaatgcgcgttatatcgtaaactgtgtccggatcggcggacttgagggctttgagaaggatgtggagatcccgctgaagtatggcgtggaccagtgtgtgggcgatacactttgcacgggcggtatcatgtacggacagcgcgtcatcgcggcgctgcttgacttctgcaaggatatccgcgaggtggcagagccgggtgcgatcatgctgaactattcgaatccgaatgcgatggcgacctgggcctgcaataaatatggaaaggtaaagacaattggtctgtgccacggagagatccacggcgagatgcagatcgcggaggtgctcggcattccgagagaggagctggacatcacctgtgcaggtatcaaccaccagacatggtacattgcggtgaagcatcatggcgaggatatgttgccgaagcttctgccgggctttgaggcgcatgaaaaattcagcgaggaggagaaggtccgcatcgatattctcaagcgctttggctactattccacggagtccaacggacatctctcagaatatgtggcatggtatcgcaaacgcccggatgagatcaaagactggatcaatctggacaactggatcaatggcgagacaggcggatatctgcgcgtgacccgtgaggagcgcaactggtttgacaccgattatccgaagattctgcaggagccgccgaagaagctggatggctctgagcgtggaaatgagcattgctcttatattatggagtcgctggagacgggaagaaagtaccgtggccatttcaatatgatgaatgagggctgtatcacgaatctgccgtatgaatcggttgtagaggtgccatgctatgtggatggaaatggtatcagcgtgccgaagatcggcgatctgccgcttggctgtgcagctgtatgttcccagtcaatctgggtacagaagctggcagtggaggcagcggttgcaggagatgcgaagcttctgaagcaggcagcactgatggatccgctgaccggagcggtctgcaatccgccggaggtatggcagatgatcgatgagatgctcgttgcagaggaagaatggctgccgcagtacgcggaggcaatcgccaaggcgaaggagaatctcgcgaagggcgatctgataccgacgaatgagaattaccacggagcggtacgattaagagaaaagacgcctgaggaagtggcggcagagcgcgcggcgcggaagattacagcctgagcatcagcgattgcgaatgtccgttttaccgtttgatctgtgttgaaaaagaaaaagcagaagcagctccggaactcatccggaatgtcgcttctgcttttgtcttatacacttatacgccatccggtagcgggtcccattcgttcagtcccatccgctgcttttcctcggcctcctctaaggtgagcgtcggaagatcttcgttcagatattcaagcagctcctggatcccttcccgggtcacgttgttgaccagaaagatccgatggcagccggcgttgtgcagccactctgtcaccatcgggatattggcatagggagaatcgatctttgtgatgatcccgatcatcgggcgaaggataaagctctggcaattcgcaccgaaaagattgaatggttcatcggctgcctgcaccagggcaacgacgtccgcctcgaaggagaagcaggcgagtccggcgctgaaatgcttggattcggcatattctcccggagaatcgatcgtgtcctcggatgtattggtatattgtgtttttacatagtgaagggtctctcccttcagggcctgagtcagggaggtcttaccggcctcactgcggcctgttaaaaacagtttcttcatagtagtcaattattccttttgtcagcttttatggatcgcacaagtcttaaaatgcagttcctcgccaaagaaacggacaacctccgtcaccgcggtctgcacctgagagagaccgccggtgatgattagtgatccgcagaaccgatccataaagctgatctggacgtctccggcctttaccgcgatatcagccgcagccacaacagcctcccacggcgtgaggcgtaccatgccgatcgcatctccggtatgatcctcgcctgcgtgtgtaccgatgtgcagtccgagattctggtagatgcacggatcggaaggtgtgatgatatgcgccagacacacctctctgcccggtacgcgcagacgcgtcatacgcagacgctttccctttaaatgctcatagtcgtcatggaagagcgtttccagtaattcttcctttgatatccgattcataactgcacttcctatcgtttggtgatcttgcagacaacgtagcctaaggaatcacggaaatagttcacgacttcggtcagtgcggacatgacttctgaaatctctccggtaataatcagtgttcctgtgaaacggtctgcaaaaccgaggtaaacatttccactcttgactgcgatatctgatgcaatgaccgcggactccggcggcgtcatattcataattccgattgcagaggagcggtagtcgacctgtgggttcagcccaagcttctgataaatgatcggggccggaccgcccatcacatgtgcaaaagtgatctccttaccggctaccgtctcctgtacaattcggatctgctgattttcattttccatttcaaacccccccctttctgaataatcaggacctgccagtaccttttataatactattagaaaaaaactctgtcaagcgacgtgcaatgaactgaaaagaaaggaatgaaatatttacgtacaactttaaagtacaagtttgatacaaatgaaaaaatatacgcacatctgacttgacatctggccattcaaatcatataatatgcttgtaatcgatccaatttaaaatataaactataagaattgcataaaaatccgcttgtaaaattgcatgctttgaatctgaaaaagcaggtgatttttaagtattggtttttaaacatacatcttataagtacaacttgaaatacggcattcagaaagcagagcgaagcatgggaagagcaccgaagtatcagcagatcacagaatggattcagaatcaaatagcatccggggagctttccggtggagaccggctggagtcggagcatgagctttccgcgcggtttcggctgagccgccagacggtgcggcatgcactctcagagcttgaggaggccgggattgtgagtcgggtgaagggcagcgggacgtatattcagtacgggaccgggagcacagagccgctttctcagactgtgacgatcatcagcacttatgcggacagctatatttttccgaaactgctgcaagtgatggtgcgcaggctttctaaggcgggctacagcacgaagatcatgttcacgaataaccgggtcgagaccgagggacggctgctgcgacagcttttatccgagggaagcagggatccgcttctgatcgagccggtcatgagcgggctgccgaatccgaattccggctattaccggaagctgcaggcagcggggatcccgattctctttttccacagcttttatccggagttgtcgattccgcatgtgagcatggatgaccgtgcagtcgggcgtgcggcggcagagtatctgctgcaacagggtcacgcacggatcggaggtattttcaaagccgatgacggacaggggcgtctgcgctacgagggatttactgacgcgatgcgtgcatccggcgctgagatccgggaggagcgtatttcatggattgatacacaggagctgcgggatcagctgtcctacagcccttacatattgagacgactgcagacatgcagtgcatgtgtctgctacaacgatgagatagcacatctggtgacggagcagtgtattcaggcggggatccgcattccggatgatctttctcttgtcagcgtggacaattccgagctggcgaagctcaatgccgtaccgctgacctcagtgatccatccgctggaggcactcggtgagaaggtggcggagaatctgctgcggctcattgcggacagggaatgcgatgcgacctttgaatttgccccgcagatcgaagagcgcgcgtcagtcttacccactgtttccgctgcgcagagtaataatcagtgaaccaatatatacacatatacactatcaagcaaaggagaataatacgatgaaagcagcaaagaattacaagttctggtttgcaaccggatctcaggatctgtatggcgaggagtgcctgcgcaaggtggcagagcattccagaataatcgtggaccgtctgaacgcttccggcgttctgccgtatgaggtcgtatggaaaccgaccctgatcacgaacgaagtcatccgcaggaccttcaatgaggcaaatgcggacgaggagtgtgcaggcgtcatcacctggatgcataccttctcaccggcgaagtcttggattctcggactgcaggagtaccgcaagccgcttcttcatctgcacacccagttcaatcaggagatcccgtatgatacgatcgacatggacttcatgaatgagaaccaggctgcacacggcgaccgtgagtacggccatatcgtgaccagaatgggcatcgagcgcaaggtcatcgtaggatattgggaagaccgtcaggtacaggagcgcatcgcatcctggatgcgcaccgcgatcggtattatggagagcagtcacatccgcgttatgcgtgtcgcagacaacatgcgcaatgtagctgttaccgagggcgataaggtcgaggctcagatcaagttcggctgggaagtagacgcatatccggtcaatgagatcgcagaggcagtcgaggcagtcggcaaggcagatgttgatacgctcgtggaagagtactatgataaatatcagattctgctcgagggcagagatgaggcggagttccgtcgtcacgtagccgtacaggcacagatcgagattggattcgagcgtttcctggaggagaaaaactatcaggcaattgtgacacacttcggtgatcttggctccttaaagcagcttccgggtctggcgatccagagactgatgcagaagggctacggcttcggcggagagggcgactggaagaccgctgcaatggtccgcctgatgaagatcatggcacagaatactccgaacgcaaagggaacttccttcatggaggactatacctacaatctcgtaccgggcaaggaaggagtgcttgaggcacacatgcttgaggtttgcccgacgatcgcagacggcccgatcagcatcaaggtaaatccgctgacgatgggagaccgtgaggatccggcacgccttgtatttaccgcaaaggaaggtccggcagtagcgacctccctgatcgaccttggcaaccgcttccgtctgatcatcaacagcgtagactgcaagaagactgagaagccgatgccgaagcttccggtagcgaccgcattctggactccgcagccggatctcgcgacaggtgcagaggcatggattctcgccggaggagcacatcacaccgcgttctcctacgatctgactgcagagcagatgggtgactgggcaaatgcgatgggtatcgaggccgtatacatcgacaaggatacgaaaatccgcgatttcaagaacgagctgaagtggaattccgtatactacagataagaagaaaaaagaaaacacaaagtgcgatatcttacgtccgggcagaattcatctgtccggacggtttttaaccgaatcaagcaagtcacctgcttcaattgcgcaaagcaataagctgcaaagctgttcggttatgatatgtccaaaaaaccatcgacatccgatatcatgtacgttataatatacgtcaaataagacaaccggatactcgttaatgcgaaatcgaaccgtgatgttgaccgacgaagtgaattcgatgaagcgaaaagggtgaaggaatatataaaatataaaggggaaaattttatggaatatgcagcaatttttcatgacatggacaaaagattctgctatgcgattgataaggatttattcgtgatacgcgtgcaggtaaaaaaagatgatatgagggaagtcattctccactatgaagataagtatatacccatggagtcagaggatacacggaagacgattccgatgaagaagattgccacctcgcagtttcatgattattatgaagcgcagcttcagatgcatttgatatgtctgcgctattattttgagtttacagatatgcagggggaaaaggtatactacggcaattatgagttcaataaggaatgtattacaaacagggacagaatgtttgattgtccgcagaacctccgagaggaagaaatgtttgaggtgccgaagtgggcggcaaacaaggtcgtgtatcaggtttttccgtctcgttttgcagcgtcacagccggtagagaaggacctgtggtataaagcgccggttacgcctgaggataatctgcatggtgatctcagaggagttattgagcatctcgattatattcagaagcttggaatcgatgttttgtatctgaccccgatctttaagtcaaattcatgccataagtacgataccattgattactaccagattgatccttcatttggcacaacagaggatctgaaggagctggtacaaaaagcgcatgaatgtggaatgaaggtagttctggatgcggtgttcaaccataccggaagagaattttttgcatttgcagatatcatggaaaagcaggaaaaatcaaaatatctggactggtattttatcgagggcttcccgcttaaaagtgatctgggagatgtcccgaacttcaaaagctttgcttattatgcagggatgccaaagttaaacctgaaaaatcctgaggttgaaaagtttgtcacagatgttgcgtgccactggattaaggaatgcgatattgacggatggagaatggacgtaggagatgaaatcagccatttcttctggaagcgtttcagaaaagcaattaaggcagtaaagaaggatatgctgatcatcggagagatatggcattatgcaggggatttccttgagggagatgagtgggatacggttatgaattatccgttttatctgaatctgatagatttgcttgcagatgaaaagattacggtcagccagtttgtgcagaaccttggatatttgaaggggcgcttaaacaaaaaatgctatcctcttatgtggaatctgatcgacagtcatgatacggcaagatttttgcatctgtgtgacaataataagaaaaagcagcatctggcagcagcttttcagttactgttgccgggaatgcctatgatttattatggagacgagtttgcaatgccgggtgcaaacgatccggattgcaggcggggcatgtactgggatgaggaataccaggacaaagagatgtttgcatggtacaaacagctgctgcaggttcggagagcacatgcatgcatcgtagagggcgaattgaccgagacaatcacaagagacgaggatgagacgatcgttttgacacggaaaaatgacaa

SEQ ID NO: 2343 - DNA, 32759 bp, Unknown
  16S sequences of unknown bacteria
gcgagccggagggcctgttgctcgacggcggtctgcatacgccaacaaacaggaaaccacaccagaccggcgagccgcgaggcccgtcgccgagcggcggtaaaaccccggccaactagctttccctcgggcgccctgcgcgcctatggcgcgcagtccgaatggggctcagcccctagccctgcctgcggggaaggaggaagaaggcggcggcgaggaggatcagaaggggaagggccacgagaagggcgacacccatggtctggctgcccacggtcagagagggccggaaggcgctggaggccatgatgtccagagaaatctcgccgctgggaaccagctccttgagaacggcggtcagaaattgttcgttgaaggtgctctgataaatgtagtcgtccaccagcatggtgctgttgccaagggcaaacatccggctgacgttgccgttggagtgcatccgatgggcgtatagggccagagaaagctcgccttcccggtcgccctcctgcttgtccagcgtgttcctgccgtccgtcagactgcgcaggtagccgtggggtccggtcttcagcaccgtggcgacggtcaggctgctgtccggctcggcaggatcctcaaaggcgctggcggcaggcatcaggagcacgtcgtagccgctgctgagcaaagtggcggtcatgtccagctcgcagaccttcggaatgatgtagagcggttcaccgtagtaggtgtcggtgtcctcctccccggccacggccacgcccgctagaggcacgatgccgtagctgcgcagaaaggccagatagttgggcacgccctcgatggggtcggtgtagtcccgcactacaaagacgttgccgccgttttgagtgtaggccagcagtgactgggattcgtcctcggtcaggtctttttgcagacccacgatgaacaggcagtcgatcccgtccagtacgtcccccgtgcgcaggttcacgctgcggctgtcgatgttgttgctggtgaggaagttggtgaagttttccagattttccagcgtcagctcgccgtggccctgcaagaagcccacggtgggaatttcctcccgggtgacgtatacgatggcctccgtcagggtcttttcgtagctgagcccttcgatctgaaattctccggcctcgatgttgtagccggtagtgaagaaattctgataatccagcaccttgtagcggccggtggccgggcaggagacgatgacggaatccgccgcaacggaggtggtctcgtcgccggtgaaccgggacagaatggccgggttccgggcgatgtctgtgggaatgacgctgatgtgatcggaaagcaccttgtagcggttcagaacctgcaggacctgctcgtcctcgtccccgttctggtagagcagatacagctccacatcgtcccgcacccgctccagcgccttttgcgtttcctcgccggtggtggcgtagcggttgtagcttaagtccttccgccagccgtacaggttttccagcccggtcaccgccgcgttgaccagtacgaatacggccagaaacgccgccatcagaagaatgctgcggcggccgtgccgccatttgggctgacggagccgggccagcagacggcaggactttttggacgttttcatgtcaggccgcgcctccttccccgaaacggcgggcgtccagcacccgaaccgcccccgccagacatacaatgataaagctcacgaaaaacagcacgctggcatagctgagctgccccagcaaaaagggctcgtaacggtcgtacagactgacgaaattcagcgcgtcccgaagccaagaggcgctcacgctgccggccagcaggtcggtcatccacagaaagaaattcgctccgaagcccgccaccgcgccggtgatctggtttttggcaaagcagctcaccagcaggtccagcgccagaaagctcagactttgcagcgtgaagcccagatagcccacgaaccattccccggcgtagaccgtgccgtaaaaggcgatgatcagggtgtacagattgctgcacagaacggtcaaaagcagcactgctgccgccgcgaagtatttgcccagcaccgccgaggccagcgataccggggcggtcagcagcagctggtcggtgcgcttctgccgctcctcgcagatcaggcgcatggtcaaaagcggacacagcagcatgttcaaaagcgtcagctgggacaggaaggacagaaggtcgcccgacaggtttttcaggttggaaagataaaagatcagcccggccagcgccagaaacacgcccatgaacacatagcccaccggcgtgcggtaatagccgagaaattcccgtttgaaaatggttctcacgtccgatcttctcctttcactcgtccgcgatggcctgcaggaatacctgctccagatcgccactctggcggctcaaatgcagcagcggtacccccaaacggctcaaaagcgcaaacagccgccgctccggctcgccctgtccggcggcaaagaccagggtcagggtagtgcggtcgggatggctgtccggctggacggtcagtcgccgcaggccgtccaactcccgcagtcggggcacgatggatttttccgccgcgcctaccgtcgccagcagggaaaccgcgtccgtgctgtccgtttcgtccagcgccatggcggtctttacctgcccctgatgcagaatgaccacgtggtcgcaaagctgctgcacctcgctgagaatatgggaagaaaacagaatggtcttctcccggcccagacggcggatgagcgaacgaatttcggtgatctgcttgggatcaagccccacggtgggctcgtccagcaccagaatctccgggtcgccgcacagcgcctgcgccagccccgcccgctggcggtagcccttgctcaggtgggacaacagccgccgctgcatctgagtcaggccacacagctccatgatctcatccacatgcgcgggcacggcccggctttccacccctttgagctgggcggcaaagcgcaggtattcccgcacggtcatttcatcgtacaaaggcggcacctccggcaggtagcccaaatgcttccgggcctcctccggctccagcagcgcgtcgtgcccggccagcagggcccggccctcggtgggggccagatagcccgtcagaatattgatcagcgtggtcttgcccgcgccgttctgccccaacagccccagcaccgagcccttttccacatgcagcgacacatcccgcagggcgtacagcgcgccgtagcgcttggtcacatgctgaatgtcgatcacaggaacccctcccttggatggcaaaatggccgtttctatcataacacattcccgccggtcacgtgtgactgaattgtaaatctgagggggagggaaatgcaaaaaggccgcagctgcggcctgtgattgtcaaaaaagctcgcctgcggcgatctttttcgccagaagctgtcggtgctgttttcagcaaagctgaaaactccccgcccgaccgggtgctgcgcacggcgaagccttacggggccatttgccgaccgcaggtcagccggtcgatacgaatacagtcagaggggctgccgcccctctgacaactcccctgaagagtttttcgacagatactgttgcggcctgcggcgcgaggcggggctgttcacaaaaagggtgcgaagcgccgaggggcgggaacagcggcgaagccgctcctcagcccctgttttcatccatttccctcagctcagccggtacacccgggcctcgtagggacggagagcgaacgaatcctcccgggatacaggcaggttggcgatcagcaattcggcgtccgcccagcccatggccgacagctccagcctgccggcggcttcgccggaaaagttgcacagcaccagcaggcgcgtatcgtccagacggcgctcataggcgaaaatctgcggatcctccggaagcgccagccggtaatcgccatacacgatgacgggattttccctgcgcaggcggatcagggcgcggtagtaattcagcacgctgtttggatcgttctcctgcgcggcggcgtggatgaagggatagttggggttgacgcggatccaaggggtgccggtggtgaagccggcgttgggcgtatcgtcccactgcataggggtacgggcgttgtcgcgacccttggcccggatgcaggccagcatctcctcgggcttcacgtcgccgtcctccaccagctccctccatgcgttgagaatttcaatatcccggtaatcctcgatgcggtcgaagggaacgttggtcatgcccagctcctcgccctgatagatgtagggcgtaccctgcatcatatgcagcagcgtgcccagcatcttggcggaggcaacgcggttttcctcggtggaatcatcgccgaagcgggatacgatgcgtggctggtcgtggttattccagtacaggctgttccacgcgctgccgttcaggctggtctgccatcggctgaggcagcggcgcaggtcgtccagccggatacggttcaggctccactttcccagcggcccgtagtccagacccatatgggcaaactgaaaaatcatgttcagctcgcgctgatcctccccggcataacggcgagcgtcctccggcgtgacgccgggggtctcgcccacggtcatgacgtcatagcgggcaagcacctcccggttcatttccttcaggaactcatgcacccgggggccgttgaccgcatggggcgtaaagtcgccgtagagcgcgcctggctctctgggcccgtccggcaggccgggctccttagagatgaagttgatcacatccatgcgaaagccgtccacgcccttatccagccagaagcgcatcatgtcgtacacgccctgacgcaccttggggttctcccagttcaggtcgggctgcttggtggagaacaggtgcaggtaatactcgccggtggtctcgtcctttttccacgccgggccgctgaagcaggagccccagttgttgggcagcctgccgtcttttccctcccgccagatgtagtaatcccggtagggattctcccgggacttgcggctttccacaaaccacgccatttcatcggaggtgtggttgaccaccagatccatcaggatccggatgccgcgcttatgcgcctcggccagcagctcgtcaaaatcctccatggtgccgaactcgtccatgatggcccggtagtcggagatgtcgtagccgttgtcgtcgttaggcgagcggtagatggggttgagccagatcacgttggcgcccagccgctgaatgtagtccagccgctgaatgataccgcgcagatcgccgaccccgtcgccgttggagtccataaaggaacggggatagacctgataaacgaccgcttctttccaccatgcttttttcattcctttgtttctccttcttgctgtttttgggcagcggattgattggtttcccgatacagggaaggcgacatgccgtatgccttacggaagacggtggaaaaatacgaagcgttttccatgcccacctcccgggaaatcaccgcgacaggcgtatcggtctccaccagcatccgggcggccgccttcagcctgcaggcggtcagggcttccacaaaggactgaccggcggtctgcttgaacagcctgcccagatacccggcggacagggaaaccccgtcggccgcgtcctgcagggagaagccgggatgccggtattccttctcgatcatctcgcagacctgatggatgatgcgctgaccccgcagcaggctgcgctgctgttcgctttcgttcagcagccgatggcacacgccgaacagctcccggctcaggctgcacagctgatcgaaggagtccgactgctcgactcgcaccagcatttccgccagttcctccccgctcttgggctgacaggtggattccaccagctccacgcactggcgtagcacatcggataccacatggatgcagatattgggcgacaaatgaccgcactcctcaaagaaagcgtccagcgcctgatacagctcgtccgtctgctcatggaaaaggaagccggagatccttttgagccacgtatcggtaggcgtggccggggcgctgcgccatttttccaccgtatcctgtgtgaaaagaatgcgctcctgatgatagaaggaatcgtagaccagccgcagggcctcgctgtaggccagatgaagctgctcgggcgtttccactaccgggcttacgcccagccgcacttcgcttccctgcttttcccgacaggcgaggcagaatttttccatctgctccgtcagctgctcctcctgaagggcgtcggcggacgcaaagcagaacagcagcacccggtaatccgtccaccggaaggagatgcactctctcagccccggcagctgcccggcggccagacgattcagctcttcaacggtgtactcccgttttttggtgtgggacagcacccctaccacaaagcgctccgactgcgtaatggaagcgggaagctccacccggtcgcagggaaggccgaacagcagggactgcaaattggactggtacaggctctgcttcatcatatccgaacggtcgcggtataccgtcagctcgttggaaatgaccgccatttcgtccaccaccgcgtcgctttcgtgaggcagttgggagaccagatcgtcgatgggccggtagatgcgcagcagcaggatgaacatcgtgcccatggaaaggatcagcagggccagaagaaagagcaccagcataatgatcttggaccgggctgcgctgagcaggccacgagcgggctggatgctgaccaccgtccatgcctgcgtgggaaatttgcaataggagaccagatttttctgaccgtccagctgttgataaaaggagccctgctccggcccggcctgatacagcccggacagaacctgcccccattcggcgggcagatacccgtccaccggccgcaccagcagctgattgctttcccccagaatataggtatgggagcctgcgctgcgggtcagcatggtctgcagatgggagcgctgaatatcgatggcgatacagcaggtatagctgttggaatagcttcggatgggatacaccagcgtcagcacggcggtttctcccagaccgggagacgttaccatcctcggcacggaaaacgtgctgccgcgggcgatctcctcgtcgttccaggcggtctcctcgcgggcgtagtacagcaggttgagctgcttgccggtggtgacattatataaggaaatattctgaatgaacgggtgcagcgccttgtaccggcccagcgagcggaaggcgtggtagttggtcagcgggtcgctcttccgggcggtaaaaaacgcgcggatgttctggtcggcctgaatgctgctggacaaagcgtccatctcctcccagaggttctgggtgctgttgacctgctgagccatcaaatccgttgcataggaggccgtctggctgttggcgtaattggaaaactcgctgtagagcagaaacccgatggaagcaaacagaaccatcagcaaaacaaacaccgccagcaggctccggcgatggagcttgtagtgaagaacccgggacagatactgctgctgcggtctctttggcttggtcatggctgctcctttgcaatggtttttttccggtggcgggtcgtcaagccgcttatttgcaattattatacaccccatcacgtgtttgtaaaaacgctttttaggttttttgaaataaaaagcgctttttcaaatgtcgcatctggtcgtttttcgtatttttctaaagcaatcacggattcttttcgttgtgatttggctgatttggtgctaggatggccttatcaaacaaggaggttgggaaatgaagtcgcagtccgttacggcgccctcgctgacgaagaagcgctataccttcttcaccgatgttcgcaggaaccgcttttcctatctgctgatcctgccggcacttctgtatgtgctggtgttcagctacctgtcctacccctatatgatcatcgccttcaagaacttcaactataagctgggcgtttttggcagcgaatggtgcggattcaagaattttgagtttttcctcaaatccaccaacgcccccaccgtcatccgcaatacgctggttttgaacctcctgttcatcgtaaccggcaccctgacctcactggtgctggccatcctgctcaacgagctgcgcagcagggtattcgtccgcacggcccagaccatgatgctgtttcctcattacatcagctgggtggtggtcagctatatcctgctggcgatcttctccaacaaaaacggtctggccaatcagctgctcaacgcgctgggcatgaagagcgtcagctggtataccaaggcggacgtctggcccaccattctggtttggatgaagatatggaagagtgcgggcatgaacgccgttatttatctggcggccatcacggggattgacgagagcatctatgagtccgccaccatcgacggcgccaaccgcttccagcgcatcgtcagcatcaccgtgccgctgattatgcccaccgtgtgcatcatgacgcttctggccgtgggcaagatcatgaacggcgactttggcatgatctacgcgctggtgggcgatcagggcatcctgtacgagaccaccgacgtgatcgacacctatgtttaccgggtgctgcgccagacgggcgaccccagccagtccatggccatcggcctgttccagtccctgatcgggctggtgatggtggtgggcagcaactggattgtcaagcacaccttccacgaaggcgcgctgttctgagaaaggaggctctgccatgagtacgcttgccgccccgaagagggtcaaaaagttgaaccggctcaatgccggagactacctgatgtatctcttcaccggtctgttcgccctgttctgcatggtgccgatggtgctggccgtgtgtgtatccttcagcagcgaggcctctatttcccgctatggctaccgctttattccctcggcctggtccacagaggcctaccggctgatcttcaacggccagagcagcgtgatgcacagcatgctgatctccattctggtgaccctgctcggcaccatcgccgctgtggccattaccgccgccagcgcctacacgctggccaacaccaacgtgaagtaccgcaaccagctgtccttcttcttcttcatccccatgacgttcactgccgggctggtgccgtggtacatgatctgcacccagctgggcctgcgcaacaacttcgtcgccctgctgattcccaacctgctgttttcccccttcaatatgtatctggtgcgcaactacatgtccgatatgcccggcgagcttcgggagtccgcctacatcgacggcgctacggacgtgcatatcttcttcaagatctatatgcccctgagcgtgccggtgctggccaccgtggccctgttctacggtctggcctactggaacgactggtggaacgccatcatgctggtggatgacaagaagctctatcctctgcaatatctgcttttgcagctcaagtcccagattcagatgatcaaggatatgcagaagatgatgggcggctccattcccggccagaaggctccctccgaatccctgaagatggccacctccatcatcaccatcggccctatcgttctgctctaccccttcctgcagaaatacttcgtcaagggtctggtagtaggcgcggtcaagggctgacggaacgccggtttccattgatacaagccgcacaagcggtttgcagataaaaatctttattgattaaaggaggaactccccaatgaaaaagtggctgtccctgctgtgtgcgctgatcatggttctgagcatgcttcccgccgccatcgcttccgccgatgagatggtgaccatcaagtatgtgattcccggttccgaaaaggaagactacgccaccgtcatcgaagccgtgaacgccaagctggccgccgatctgggcattcaggtggagctggtctacatcccctgggatgtatgggaccagaagctgaacctgatgctgtccaccggcgaggaattcgacctgttccacgtgatgcaggatcgcgtttccttcgctacctactatagccgcggcggtttggccgacatcaccgatgccctgaacgcctacggcgacggcatcaaggcctccatcgcgcccaacgtgctggacgccgccaccatcgacggccgttactactgtatccccacctcgtggtgcgagctgggcgttgaaggctccttcacctaccgcgccgacctgctgaagaagtacggccatcaggttcctaccactcccgctgaaatgctggacacgctggaggacatcatctcccagtgggacggcgacgaaaccccctacctgcccctgctggccaactacaaccccgcctctacccacctgaccgtgctgcacagccagtatgacagctatcccttcaacgtggtggacggtttgttcatggtggaccaggaaggcaatgtgaagagctgggtggaaaccgaggaattcaaggcggacgccaactgggctcacgaagcctacgagcgcggcctgatcgatcccgacgtgctgaccaccaccgaagagcagcagatggataagctcaagcgcggcgagtacgtgttccatctgggcacctgtgactattatctggacaccgtggagcatgttcccgagctgacgatggatgacatccagatcgcccgcctgaacagcgaaaagggcgccatccgtccctgggccttcaagaactgcaacgccgtgtcctccacctccaagcacgtgaacgaggccgttcagttcatcaactggctctacagcgatcaggccaacttcgacctgttcttctacggcatcgaaggccagcactacaccctgaacgacgacggctccatcaacaccctgaacaccaactgggccttcgacacctggatggccggcaacatgacctaccagcgctatgcctccaccatgctgcccgccgtgaagaaggcgcagttcaccgtggatgagaacgctgtgaacagcgtggccggcggcttcttcttcgacgccagcagcgtgcagaccgaatacagcaacgtgcagaccgagatggaagcggtcatcacccccatcatcatgggcgtgatcagctacgaggacggctacgaatccgctctgaagcggctgaaggacgccggtctggacaccgtggtggctgagtaccagcgtcagttcaacgcctacatgggcaagtaaggctgactttgtcccagcgacccaagcgcgcagccgcttcgctctcagcggagcggctgcgttaccgtgattgaaggaggaacaacgatggatattcgtcaggcccgggccgcctttgacaaggaaggcaagatctacgattccgccctgctgacctttgtgggggtggatggatacgatgtgtacaactgctccatccccttcgccatgaacggcagggagtatattttcggccgcgtcgagacccgcagggaatgggccacctcctgggtgcgcctgtttgaaaagacgggcaaggatacctacacgctggtaccggattccatgatctaccagctggaggatccctacattcagtttatcggcgatcagctgaccatgggcggcacccatgtgatgaaggaaagcggcaaggtgaagagcttctacggctacttctatcgcggcgccgagctggagcatatgcgctacttcaccaccggaccggacaagatgaaggacattcggctggtgagcctgaaggatggccgcatcggcgttttctcccgtccccggggcaaaaaggtggaggagacctatggctccggcgcggtgatcggctttgccgtcatcgattcgctggacgacctgaccgccgatttgattgaaaacgcccccgccatcggcaatctgttcggccggggcgaatggggcggctgcaaccagtgctacctgctcaaggacggccgcatcggcgtcatcggccacaagtgctatgccgaaaaggacgcggacggcgtggagcaggccgtgtacctgaacgtggccttcctctttgaccccgaaacccatcaggcgaccgagcctcaggtcatcgccacccgccgcagctatccggatgcggcggccaagctgcccaacctgaaggactgcgccttcacctccggcatcgtgctgcgggaggacggcaaggcggatctgtacagcggcgtgggcgacacccacgaaggccgcgtgaccatcgacaatcccttcggcgatctgctgtaggccgcaaaaagccgcctgtctcttttttccaaatcaaaagcctgccccgaccggcggaggattcctccgccggtcggggcaggtctgttttacgggttcagaaagccccttcggtcattcatacatctgatacttttccttgcgccgggtatagcgggcgcgggcttcggcgtagcggtcgataagctgctcgccgttcacgatcccggcggtatagtcggggtcggccagcagcttgtccagatagcgggtaaattccggggcggagggcagctccttcacgttgtgaccggcggaacagcccgcccactgcacttcatcgggccacagttcccggaaggtatccagcagggtgatggccgtgcggaaggattcgaagtgggagcggtcccggacgatgacctgcacgcccttgcagacctgcccctgatagttggagctggtgggcttgaagaacaccggcgcgaacgccacaccttccagccccttgcggttcatccgggcggccagctcgtagccgtcggcccagggcgcgccgatgagctcgaagggcttgctggtgccccggccttcgctgatggtgctgaccccctcgaatacgcacatccctgcatacaacaggttggcggtgcagctgttcagactgggggagggcagcagccacggcaggtcagtctcatccgcgtaccagccgcgtttccagccctccacagggacaacgtgcaggtcgcagccaatgctgaactcgccgtttacgtaccgggcgaattcgcccatggtcagcgccgttcggctgggcagctcatagtcgcctacgatcaggtgcatggtggacgggcagaccgtgccctccaccgttacgccgttgatgggcgcaatgcggtcgggaatgaccagcttcttgcccgccctggcacaggccttcatcaaagcggcgcagcagtgcaggtattcgaagaagcgggtgcccgcttcccgaatgtcgaagaccaccgcgtccacctgggcgagcatttcttccgaaggggcgatgcgctcccggttgaagatgctgaccacctgccgcccggtgacggtatcggtgtattccggcacgtcttcgccgtactgaaattcgccccggatgccgtagatggtgttccaaagggccgtgacgttgtagcgctggcagagcacgtccaccacgggagtcagttcccggttgattgcgccgccgcccgtgaccacgcccagccgcaggcccttcagttcctgatccagtgcttccagccggtcaatgccgttaagaaccttgtgcatagaaataccctcctagtataatatagatgaacgttttttagtccttgttggtctcgccgcgggccgtatgcatccgcagggcggcctcccgggtcttttccagatggggacgaatctctttataagtgcggctgcacacggacgtatacagcacgtcgatcatgaacatctggcagatacgggagctcatggcgccgctgcgcatgaaggtctcggtgctgccggtgaacagccggatggaggccaggtcgctgatggtggaggaaccgaacttggtcagggagatgatctccacgcccgccgcggcgatctcccgggccacgttgacggtgtcggtggtctcgccggaataggagatcaccaccgccgcgtcgcccttgcacagggaaagggaggtgatgtactggttgtgcgggtcggtattggccacggcgaccttgccgatgcggccgaatttgttgctggcgtccagcgccaccagaccggaggaacccacgccgtaaaaatcggtgcgccgggcccggcacagaaggctaacggcccgctccaactccgccgcgtcgttcatttccatggtggtgcgcagcgcaccgaagtcgctggtcagaaggtggctcatcaccgcctcggggtcgtcgccggggtggatatcctcaaattcccggttttcctccaacacggacaattcgccgcacaggctcttcatcagctccttgtagccggacagcttcagggccttgcaaagccgcatcacggaggaaacactgctgccgcaggcctgcgccagctcctccagcgacatgccggaggcctgacgggggtgctgcgtcaggtaatcggcgatctgctgctctttggggcttaatgatgcgtaggattctttgatgcggaaaaagcatcctccggctgcggccatggctatcctctccctcggccggacggaaagcggcccggcggcttttgactgaaatacgcgtttatgcgaaaaaagaactttttactttccttgtgtccagtataaaggaaagttttccttctgtcaaatgaaaaaagaaaagttctatgcaaaaattgaaaaacagcattgacaattacttgtcatacttctataatgaagatggctctaaaggagatgtttccctttcgataaaaaaacaggtttttgaaggagggttcttgttatgatcgatctgaaccgccgtccccggatgggacttttgctgatctcccccgaacgcttccagaccattggcgagggcacggcccgcggcagctacaaggaacgcaagcagaaggaagccgaatggatggccaaggaagcgtccgctatcgcggaagtgaccttccccggcgtgatctacaccgccgaggatgtgaagcgcgccatcgacgctttcgtgaccgccaaggtggactacgtgctggctatttacctcagctgggcggaggacttcgcgtggattcgcttcctgcgggatatgcccgcctgcccggtgctgttctgccatcggatgcgggacaagatcgaactgaaggacacccatgatgacgacgagttcgccgaatatctctgctgcggcggtttggtaggctcgctggaagccagcggctccgtcaagcggtttaaccggcccatgctggaagtctacgccggcacgtggacggaggtgctggcccgcgctaagaccttcggaaacgccgcccgggcccgctctctcttccgggaaagcaccatgggtctgctggcctgcatgaacgaggtcatgtggagcacctacgtggatccctacgccatcttccgggatgtggggccggagctgcggttcctgtccgtggcggagctggaagacaccgtcaacaccgtttccgacgcggacgccaccgctgtgatgaagcgtatcgcgtcccagtatgaggtgctgcccaacgtggacgagggcaagttcctggcctccgtccgggcctccatgggcatggagcgtctggcggaaaagaaggatctggacctgctggtgctcaacgatattgacaccgtgctgttccagcacatcggtctgcgccccggcttctggcccacctcgcccgaggtgaagacccttatcgtgcccgaaggcgacatcggcggcggcatcgcctgcttcgccctgaagctgctgaccggcggccatgtgaactatatcgaacccttccacatcgacctgcccaaccacggcttcgacgcgggtcacgcgggccccaacgattacaccgatcctcggggcaagtgcaaaatttcgtccgacgtgcgttttgccaagaccaagtggaagtacgcgggcgcacccttcgcgtggtatgtgttccccgaaggcgaaaagaccatgctgcactgctcgcagcagacgggcaagttccagttcgtggccgcccagatcgaggccgtgcacaccgatcacttcctggcgacctattcccacagccatttccgccccgtgggcgaaagctgcaacgagctgttcaccaagctgctccggcagggcgtgacccagcactacggcatcgtggacggcaacgtgcaggccgagctgcaggatctggccatgatgatgaatttcgaatttgagcgcgtgtaagtgctgaaaaagaacgacccgaggaatcaaaaaggagagacgaccatggaacggatgcagaaaatcggaacccttccccttcgcagcgctgcccaggtgggcccctcccgtatcggcatcggctttgaaaagctggatcgcaaggtcttcgagccggaaaaggcctatgatctggtggccgctaccggcgtacactacgtgcggctccagtccggctggcagcgcacggaaaccgaaaaaggcaaatacgacttcgcgtggctggatgatatcgtggatcagatcatcgcccggggcatggagccgtggatcgacctgtgctacggaaacgagctttacactcccatggcgaaggaatacttcggcgcggtgggctgcgcgcccatcgctaccgaggaggagcgggagggctggcggcgctacgtcaaggccgtcgtgacccgctaccgcggcaaggtgaagtggtacgagatctggaacgagccggacggccagtggtgctggaaaaccggcgtaagccccgaggaatacggcgatttcgcgctggccacggctcggaccatccacgaggccgacccggaggccaaggccatcgcgggcgtgctgtgctatgtgaatctgccctattgcaagcggatgctggaccggggcgtggcggcggaggccgacgcggtctccttccaccgctataacgccaacgagctggacgcgctgaacgaaatgcaggccctgcgggccctgctcgaccgctacaatcccaaggtgcagatcattcagggcgaaagcggtacccagtccgattcccggggcgcgggcgcgctgcggggcggcgcgtggacgccccttaagcaggccaagtacctgctgcgccaccggctgatcgatctgtccaccgatatggtgttcacctcccatttttccgccatggacatgatcgaggccctgaacggcaaggtgggcgacaaggcctcctatctggacttcggctacttcggcgtgattcaggccgacttcaacgaggaagggctggccaccggcgagtacacgccaaagctgtcctaccgggcgctgcagcacctgtgcaccctgtttgacggaaaggcgcagccggagcagctgcccgtccgccgggtggtgaatccatctccccgcgtgttcgacaaggacgcttccgacagccgtctggtgatgctgggcttccgccgcggaaacggcacggcgctggcttattgggaggccgccgacctgatgcgggagaccttcgacagcactgtcagcttccagctggcgggcgtgaaggacgcgccccgtctggtcgatctgatgaccggcgacgtgtatcaggtgcctgaaacgctggtgaagcgggacgatctgggcaatgttgtggagctggtgaacctgcccctgaccgacagccccctgcttttgatgttcggcgattttgacgactgaggtggatgctcccatgacgaatggcaatattctggtgctggatgtaggcggcagcttcctgaaatacggcgtggcagaccagcggggcgcgctgcttcccggcagcgtgggcgaagcgcccgcccgggcggacgaatcgccggagaaggtctatgaagccttcggcgaggtgatccgccgggcgcaggaaaccgcgccgctggccggagcctgcgcctgcttccccggccccttcgactacaccgagggcgtattccggatgaagcataaatttcaggcgctgtacggctgctccatcctgccgcccttcgaacgggcaggacttcccgtccgcttcctgcacgactccacttcctacattttgggtgaggtttccgacggaacgctgcaggggacgcaaaacccctgttgcgtcatgctgggcacggggctgggattttccatgatgaaggacggcaaagtcctgatcgatcagacccagaccccggcactggccctgtggtgcgcccccttccgggagggcatcgccgaggattatgtgtccacccgagccattcaggccgcctacggtcagcccctttccgttaaggatatcgcgggccgggcccgtcagggggacgaacaggccctccgggctttccggctggcgggcgaagccctgtcggagctgatggagatcatcgaccggcgcttccatcccgacaagctggcgctgggcggacagatcgcccgctccgccgaccttctgcagctgaaactgcccttcccgtgggaagtgtcccaccatctggacgacgcggccctgcggggtgcggcctattacgccctgcgcactcgggaagaatgcaccgaggtgctgcccaaaatttccctttgattttttctaacttaccatacaggaggaagaacccatgagttttatgttccatccctatccctacgtggatcccgatgcggtcaatcccattcacgcccccgagtccgtgaagaacgggctggtcaaaggcccccagtccgtggcgaaggagatcgcccggcagatcaaggccggcaagacccgcgtgggtatcgactgctacgcgggcgcggagatcggcgcgctggcccgtcagctggaagaatttgtggaaaacgtccggctgatcgacgcgaccacgctggccatggacgaaaaagagctggatgaaaagctggctccctatctgcccaccgaccgcgaccgcgaccccgtgctgctgtacggccgccgtttcatggagggctacgagggcctgcagaacgccgaaaaggtgcgggcgctgaaggaaaagctggacaaggccgacggccccgtggtggtctgcggcatgggcgcgctgtgcaaggccctgcgggacagctacgacctgaaggtctggatggatctgtccccccggcagaccgccatcaactataagaccggcctggccatcaactacggttctacccattcccgtcccttcagccagctgatgcgccggaattactatgtggacttcgagaccgcgctggatctgcgctgggagctgatccgggaaaaggcgctggacggctatattttcgccgacgatccccagaagatgcagtggctgccctacggcgcgctgctggatctgttcgacgagctgaaccgttcgcccatgcgctgccgcccggtgtatctggaaggcgtgtggggcggcttctacgtccacaagctgcgcaagctgcccaaggaaatgaagaactgcgcgtgggtgttcgatatgatccccatggaggtctctctggcggcgaccttcgacggcaacgagtttgaagtgcccttctacaccttcgtgcaggccatgggcgaaaaactgctgggaaagcgggcctacgacgcgtttggcggctacttccccatccgcttcaactatgacgatacctatcacgccaacggcaacatgtccatccagtgccaccccgacgcggaatacgtaatgaagaaccattccgagctgggccgtcaggacgaaagctactacgtctgcgtcaccgcgcaggatgcgaagacctatctgggctttaagaacgaggattcctgcgagaagttcttcgccgccgcggaaaaggcgcaggagactcacgaactgatcgattatacgcagtacatcaacgccgtgccctccgtgcccggcacgcaggtgatgatccccgccggtacggtgcacgcctccggccgcaatcaggtcattctggagatcggcagcctgaccgtgggctcctacacctacaagctgtacgactatcagcgcatcgacccccagaccggcctgccccgccccattcacctgaagatgggccgggacgtgatccaccccgagcgcaccgccgaatttgtgcgggacaatctggtcaaccacggcggcatcgtccgtcagggtgaggactggtgcgagaaggtcgtgggcgagcatgacctgctgtacttctccctgcgcaatctggtgttcaccacctccatggaggacgataccaaggacgatttccacgtgctggcgctggtggacggcgaaaaggtgcgcgtggaatccgtggaggatcccagccgttactttgacctgaacatgctggacatcgtcgtggtgcccgccaccttcggcaagtaccgcgtggtgaacaagggcatcggcgtggcggtcatccacaagaccatgctcaagccgtaaggcaggaggaaagaggccatgtatgagcttcagggaaagaccatgatctaccggctggacagccggggccgttccatcagctgctatcaccgtcagaccgggcatgagtacatccacacgcccggcgcggtgtggaaattgatctatgcggtaaagaacacggaacgggtagaggttcccgtctgggccgaggagcagcgcttctccgtccagaccggggaaaatcagctgactctatgctacgacggactcatcggcgacgagggccggcggatcgacgccgccctgaagctccatttccagatgaacgatctgggcctgcaggtctgggccgatctggaaaaccgggatccggaagtaacgctgatggagctgcagctgaccccggtttccggggcgcggacgctggccggagagccggacaatgatttcatcgcgtggcccaacggactgggccgccgggtgcgccgtcccgcctacgccgatctgagcacctttgccggtttccgcaaatatgagcgccacgaccagtatcacaccgacatggacgcgctgtatccttcggatgtggcttccatgcagtggtacgactggtataccgacggcgaaggcctgtactgcgccagcgaggacgtgacccaccagacagtgggcctgcacatcgagcgggacgccaagctgaacgtgcttcgcttcggctttatccgttaccccatgatcgacgcgggcgagcgcttcaccatggcccccatcgactgctatccccatctgggcgactggcacgcgggcgcgaagctgtaccgggccttcatggaggaaaagggcggctttgtgccgcccgtcaatcccgagtggagccgggacatgacgggctggctgcggctgatcttcaagcagcaccactgcgagctgaactggagctacgccgacattcccaccatgtatgacgagctggaagcctgcgggctcaagaccctgtatctgctggggtgggaagaaggcggctttgcccgccagtggcccgatttccgggtggatgaacgcatgggcggcgaaaaaatgctgcgggagggcatcgagtatgtccaccgaaagggcggcaaggtgctgatgttcctgagctatgccctgatcgaccatcacagcgacttctatcagaaggaaggcggcgacaaggccaccatccgctcgatctggggcgaggatattccctttgctgagacctactgcggcgagggcacctatcggaagatcggcaatccggccatgcccatgtatctggcctgccccggcgcgccgatctggcaggaaaagatgaaggaatccgccaaaacctgtctggagctgggggcggacggcgtgctgtacgacatcggctcctggtatccctacttctgctatgccgagggccacacccacgccaagcccagccattcccatgaaagcaaggccgccaattacgccggtctgcgggagtatatcaagaccttcgggcaggacaagattatcctgatggagcacaataccgatattttcggtcagtccatggatatttcccacagcgccaacacccagcccccggtgcgcctgcgttccccggagacggcccggcacgccacggacgtgcgcgacgatctgttcatgccggagctgtaccgctacactttcccggaattggtagccaccaaccgggaatgcggcgaggacgaggaaagctacaaggccatggccgggttcagtttcctgtatggtctgcgctttgacatgaccatctaccgctgctgcggttctctgcgggatattccccggtacgccgcttatctgaaggagatctccgccctgtacgagcagtacggcgacttcctgctccggggccgcttcgtggacagcgacggctttacttcggacagcgagaatgtgctggtcaagggctgggaaggctgcaacggcggtctggccgtcagcctgtggaaccccaccggcgaggatcaggtcgtgaacctccgcagccgcaggaccggccgcgccgtcaccatcatcgttcccgccgagcgcgtcgccgccgccgtgatcgacgaagcctgaatacgaaagagacgttggggctactcgcccccaaacccctcgtcagggctgtgctctgaacccacttttgaccgcgtattacgcggtcaatgttgggattgttaagggctttagcccttaactgcggggtttggggccgcaaaggccccaacgtctctcttattcgtctaaaagcggcagggcgcggcagaaggcgcggaaagcctgccagtcttcccggacggcgcagcctgcccaaagcatcaggttcttttcccggtggcgcagcgccgagggggataagaaaagctcctgctgcaaggcttccggcttttcgccccgaagcagcccgaaaaacagccgccggtcgttatcgtcgcagcggtccagcagcgtttccagcgccatcagccgctgggcctgcccgtcactgtaaaaatccaccgcttcccggatgggcgtggaaaaggattcctccgcagaatgcaagggctggttctccgtggactcccgaaccgctatgcggcagtgtacctgcaccgccacactggccgttggctcctgccgggataaaaaggcgtacaggctcaccgcccgccgccccagctcgtcgtggttcagcgacgcgctggtgatggccgggcgcagggcgcgggccagcgacgagtcgccgtagctcagcagatataattccttcgggacggtcacgccgtcctttttcagttgctccagaagcgccgccgccgcaatgtcgttggcgcagatcacggagtcgaaccggcggacatgggggaagaaggcttcatagcactccttgagagagccgcggttccagaatacgttgggtcccgccgccacgggaaaacgacggctccaggcggcgaaaacgtcctgcttggtcaggtcggccgctgaattggggttcagggcgaaaaacgccgttttttcccggccgcagtcccgcagatatttcagcagcgtccgggtcgcttccgcgtggttcatggagatcacgccttccgccggggccgcctgcgaggggttcacgctgatgagcacgcaggcaatgcccagcgcggcaagccgcgcctgcgccgcagggacccagctcatggacgtacccatcagcaccgccagtcgccgttcgccgccgaaaagcccgtcccagtcgatgctttcttcctgcaccgcatccaatagcaccagttcgtatttttttcgggcggcttcccgggcgataccctccagcgtctgccgggcccagagggagtttcggtaatccggctccaccagaacgggaatgcgcatggagacggcctcctttgacgaactttttcgttatgatagcacatgggggaaacacaggtcaataaaggctttcgcacactgttcctttgcgttgcttgccgcaacgggccatttttcgtacaatgagacgcgccggagaaaaaagaaagaaggaatgcccgatgctgagtgaaaatatcagggccgcacggaaagccagagggctttcgcaggaagaactggccgcaaggctgaacgtggtgcgtcagacgatctcaaaatgggaacagggcttgtcggtgccggatgccgacctgctcatcggcctgtcggaggcattggaaacccccgtcagcgctttgctgggcgaaaccgtgaccccggaaaagccggacgaaatccagattttgtccgaaaagctggaagcgatcaatctgcagcttgcccggcggaaaatcgtccgaagaaagctcctgcgcggggcgctggcggcattgtgcctgatcgttctggcagggctggcggggctgtacgctgcgcacagtccctatctgaactgggattatcatgaccccgagaccgccgttgccggggcggcgctccatggcttcgaatggctgttcgtccatgcggctccgctgcttctgatagggggcagtgtcggtctgcttttgacccgaaagaaaaagtgacgttttttcaagccctccgcagatcgtatggcctgcggagggcttgccgtttgcccacttggcgcattttacggaatttttccgttggatttggcgtttcgcagtcggcggcgggctggtataatgaccctagaacccaaccccggcttgtgtcgaagaatgggagcgaggaaagtgaaaaagcagctttgtctggaaacggcggcgctgaaaggctgccgtctccaaaaagaaaaggaaggctacaccgtctgcggggagcgtggcaaaatgtccctgaccttcgcgcctttcgatgaggaaacggcgcgggcttttcagcaggcggacgcgctggtgctcgacctgaccagccgtgtctccgcctgcgaggcgatcttcgtccgctttgcggaggcggacggccggacgctggaaatgaacaccatgctttttcccgggcagaaggtccgggccgtgtttcggctgaaatggctggatggcagcctgttgttcccgccgctgaatccgggcacgctgaagacctgtgtttccgggcaggggttggaaaaagaccgggtagtctcgctgaccatcggtttcctgcccggacgtcaggatcagcggcgttttgatctggcggatgtttttctgacggacgaggcgatcgaattccccaaagccgccgaaaccaccgtggacgcgctgggacagtggaaacagaaggaatggccgggaaaaatgccctccgaggaagcgatgaaggactttctgcagggcgagtgggcaaaagaattgccgcccctgccgggacggaaccgcttcggaggctgtacggagcgccggttcgaagccactggatttttccgcgtccagaaggaaaacgggcgctggtatctggcagacccggacggtcgtgcgttttactccaccggcgtgttcggggtaacgcccggcgaagcgggctggatccgcggcgtggaagaccagatggacgatctgccagacccaaggggccccttcgccccggcctatgagctggccgaggaaaacgagctgtaccgccggaaattctccggcatgttcccgaaggatacccttctgtacgccccagccacggccaatctgatccgcgctttcggcggagaatggtatgaccgctggtgcggactcaccgcccgccgcctgcgggcgtgggggatcaacaccctgtccatgttcagcgacccggagttcatccgccgctcgaagatgccctacgtcatcatgctcaagggctatcccgctacccggcgcatgctctaccgggacttcccggatgtgtacgccgaggaatacgaagaaggctgccgccggttcgccgcccagctgacggcctatcgggacgatccgctgctgatcggctatttcctgaataatgagcccacgtggggctttgtggaaggcatcctgctggcggagcgggtgctggagaacgggcagggcaccgctaccctgcgggagctgatcgccttcctgcgtcagaggtatggggaggatatttccgcgctgaaccgggcgtggcggctggagcttcccgattttgaaacgctggaaaagggcctgttccgggcggcggaacgctccccggaagccgaacgcgacctgtctgactttaccggccagatgatcgaccgctatgcggggcttcccgcccaatacgcccgggaggtcgcgccacgtcacctgaatctgggaatgcgcttcgctcatgtgaaccatcccggaatgctgcgggccgcaaggcatttcgacgtgttctccctcaactgctatgccgccgaccccacggaagcgctgctggcagtgcaaaaggcgctggatatgccggttttgatcggcgagttccatttcggggcgctggacgcgggactgcccgctcccagcctgttccatgtgaaggatcaaaaggcccggggcgacgcctacgcccggtatctgacccgggcggcggctcagccgtgcagcgtaggggcgcactacttcgcctataacgatcagcccctttggggccggtatgacggcgaaaattatcagttcggctttgtggacgtgtgaaatcgcccctacgagcctttcggcgagggcgtgcgccgggccaacgaagaaacttaccgggtcaaggagggacttgccgcgcccgaggacggcgagacccaacgggaatcgtgaaaagatccattcgaaaatacaggaggcaacgcccatgtttcagaaaaccaaagttacggatgaaattcgcctgatggccgcctatgattctcccgccgccgaagaaatgcccatgttcgcggaaaaccgggtgcatcagcgctccagcggcaatccctatcccaataaggtggtcatgcgggtggatcgggcccaccgctctgaaaaaccctttcgaatcatcacattggaaaacgaatatttgaagatcgagcttatgcccgaactgggcggacgcatctacgccgccatggataaacgcaccggctacgacttcttctaccggcagcacgtggtgaagcccgcgctgatcggcctgctgggcagctggatctccggcggtctggaattcaactggccctgtcaccaccggcccagcacctatatgcccgtggacgtacaggtggaggaagaagaaaacggcgcggtcacggtgtggatgagcgaaaacgagccgctgaaccgcatgaagggcatggtgggcgttcgcctgtgtcccggagaagcacggttcgatacccggatgaaggtgtacaacggcacgcccgcccggcactccttcctgtggtgggaaaacgccgccgtgcctgtgaacgagcagtaccggctggtgttcccgccggacgtgcattacgtccagttccactaccgcaagaatgtgacggaatatcccgtggcctccggcgtgtacaacggcattcggatgggcgacggcacggatatttcctatcataagaacacgcaccagcccacgtcctatttctgcgcggccacgaattatgatttcttcggcggctacgacgagggcaagcgctgcggcgtggtgcacgtggccgaccgtcatgtgagcgtgggcaagaagatgttcacctgggcctataatcagctgtcccgcagctgggagcgggcgctgaccgacaccgacggcgcttacgccgagctgatggccagcagctactccctcaatcagccggacttcgcgtggctgtacccctacgagagcaaggaattttcccagatgtggtaccccgtgggcgacggcggcgcgcctttctgcgcctgccgggaagcggccctgtccgtggaaagcggccgtctgcggctgcaggcctctgttcccctgcgggatgcgaagctgatcgtcaacggcgcggagcattgcttcaccgccgggccggagcagtccttcgacctgcccctgtcggaggagatcgccgcgttccagctggtagacaaccggggcaagacgctgctgcgctatgaaaagcctgtggaaaacgaactgaaggaaatgccggagaccatcccggacaatcctaccatggatcagctcaagagcgcacaggagctttacctgctgggcgtgcatacggagcagtatcgcgacccggccatccgtcccgccgggtactggcgggaagccctgcgccgggacccggatcatctgccctccctgatcgcgctggcgaatgacgagctggctcacttccgcccggagaatgcccgcaagctggcccttcacgcatggaaggtggccacggtgcgcaatttccatcccgaaagcggcgaactgcaatacgtcatggcccggatcgaggaagcactgggccgggaggacgaagcgctggacggctatctgcaggccgcgtgggcgcaggacgcgcgctcccgcgccatgacccgggccgcgctgatccagctgcgccgcggacagtatgacgatgcgctgaccagcgcagaggaagcgctgaaccagcacgcccataacgagaccgctctgctgatccgctatctggcgctgaaaaaactgggcgacgaccgtgcagaggaagcgctgcaccgggcggaagcctacgacagcctgaacctgaccctgcgggcgctgaaatacggcgcgtctcccgagctttacgccacgctggaaagcgacccctgccagtcggcgctggatatggcgcaggatctttccgaaatgggggagacagagctggctgcggccattctggccggtctgcccactccctgcgctcaaaccgagtacgtgcgctggcacctgaccggcgaccgggcggcgctggaaaaagccgccgggctggaagcgggcgcggcttatcccctgcgggagattgagcaccggtcattgacggaagcggtgaaggcgcatcccgaggacgccaacgcgctggatctgctggcctgtctggaataccatatggaaaaccacgaaaaggcggacgaattgtggagccgcgccgccaaggccgaccccaacgcctacatgcccctgcgcaatctggcggtggctcgttacagccatctgaaccgccgggaggaggccctgcccctgctggacaaggcgctggccctccggccggaagacggtcagctggtatgggaaaaggcctatctgatgacccgcctccactgcgaccccaacgagacggcgtcctttgtggaaaaacacggctacgagcgggaggatatcgccatcgagctgtgccgggcgctgaatctggcgggccgctatgaagaagcgctgaacatcctgctgggcaagaagtttacgccctgcgagggcggcgaacacgccgtggccgagcagtatatgttcgcccatcacgcgctgggccgggggctgttcgcggccggacagtacgaacaggcgctggaacatttccgcgccgctcagaccctgccggaaaatctgggggcgggactgtggaacgaagtgctgctggtgccccatcaatacttcgaggcccgctgtctggaagaactgggccgcggggacgaggcccgggcgctgtacgatcatattctgatcttgaaggtagactatttctccaacatgaacctgcccgagctgccctgctggcaggccatggcgctgaagcgcacgggccgggctccgcaggcgcaggagatgatctccgcccacctgcacaagcaggaaaacgccgcctttgcccgggatgcgggctactacaagaccacgcccttctttatctcctacatggaggacgcgcagaccctgcgccgggccgggtgtgactggcagtccgccatggcctgctgggcggcgggcgaccggcagacggccgccgagctggccgcgctttccctgatcggcgagccctccaacttgtatgccctgcttttgagccggcaaaaataaggtaaaaaagctcgtgttttatggaaaacgagaacgaaaacagcggctcgaagcccggttgaacgcgacttcgggcccgccgaatccctgctgccgttcggcagtatcagtccttcaaaatctgcgttgctcgatgatgtgggacgctgattttccgctaaggaaccagacgttttgaccctcacaaagccctttgccgttccggcacagggctgtttttcgtgaaaaagaaaagttttgttcaatttctaaaattccttattgacaagtattgttcaccctgctataatcaaggcagatggaaactttggcaacgaaacgaccgttccgggtatggaaaatcattcctttgtgaaaaggtgcttgcatcttccccggaaagttgttataattaccacacagacgaaaaaacattgcgtttgattcgaatgggtttccaaagcaaagttgcttttcctcttttccattaaaccggtttgatgggaaaaaggtcgaaaagcaagacgtttctttttttatttttcatacggaaaggagcccttgccttgagttccgtcaaagttcaaaagcccgctcccagctttgccccctcccgcaagcacgtggtaaatcggatctggcaaaaccgttacatttacatgatggtcatcccggtactggtgtacatgatccttttcaagtacatgcccatgtacttcctgcgggccgccttctacgattacaagctgctcaagggctttgaaggctccaagtacgtcggcctgaaatggttcgagcgccttttgtccagccccgacctgtggcagtacatcaaaaataccctgtcgctgaacctgctgtcgctggccatcgtcttccccgcgccgctggtgtttgccattctgctgaatgaaattcacagcgcgccctacaagaagatcgtccagaccgtttcctatctgccccacttcatctccaccgtggttctggtctccatgatcaacaccatctgctccccctctctgggcgtactggcgaagatctacaagagcatgggcatgacgccggtgaatttcatgggcaacccggactacttctacgccatcaacatcatctccggtctgtggcagggcaccggctggaacgccgttatctacatctccgccatcgccggcatcgacgcctgcctttacgaagcggcccgcatcgacggcgctaaccgatggaagcagatcctgcacgtgaccattccgggactgctgcccaccttcatcctgctgctcatcatgcagatcggccagctgctcaactgcgtgttcgacaagatctacctgctgcagaacaccctgaaccttcaggtgtcggagatgctgcccacctacgtgtacaagaccggtatgatcagccagaagtacggtctggccactgcgggcggcctgttcaactccgtgatctccgtcgttctggtgctgatcgccaacaccatcagccgcaaggtttccgaaacttctctattctaacagaaaggagcgcacgccatgtccaccgtttccgtttcgaagcaaaagaagcaccgtcacgaacaggattttatcaagcgctccacgggggagaaagttttcaatgtggtcaacattgtgatcatgctgatcctgctgtgtctcttcctgttcccggttttcaacgtcgtttcgatctctctttccgatgataaggccgtactggctgctgaggtcaccttctaccccatcggctacaacccgcaggcctataccgccatcttcggcaacaccgatttgtggcgggccgccttcaacagcttctatgtggccatcatcggctgtgtgctgggcctgatcggcacctgcgtggccgcctatcccatggcctacggcaacttctacggcaaaaagctgtacgtcatcatcatcatgtttacgatgtggttcaacgccggtatcgttccgttgttcctgaccattcgccagctgggcctgtacgacagcctgtgggcgctgatcctaaactccatgattaccgcatataatgtggtcatcatccgcagttacttctcgtccattcccttctcggtgatcgaatccgcccgcatcgacggcgcgaccgactatcgcattctgttccagctggtgatcccgctgtctaagcccgtgctggctaccgtagctctgtggctgatcgtaggccactggaacgactacctgaatccgttggttttgatccacagtcaggagcacaagaccctgcagctgttcctgaaggaactggtgctgaatgccgaaacttccacctccaatctggcctccgtcaacgacgctaccaacaaaggagtggccgcgttgagccagcagctgaaaaacggtgttctggtggtttccatggtccccatgctggtgctgtatcccttcctgcagaagttcttcgtgtccggcgtcatgctgggttccgtgaagggctgacctgcactgcaacaatggttcttatcagcgttaaggcgctgaaaaggaaaaataaaaggaggaactacgcatgaagaaactggtatctctcgtattggctctcgccatgctgctgtccctgacctccgcgatggcggatacggtcggcggaatggaagacggctggtggaaggacattgagatcgctccttccgagacgttccatctggatgagcccctgaccattacggcgctgggcatccacttcaaccagtatcccaccgaattcgacggctgctactatctgcccaccgtcgaaaagtacaccaacgttcacctgcaggtggactggcgtcctgactccgactggaacacccagatcgcgaccgccttggccggcggcgtggacaac

SEQ ID NO: 2344 - DNA, 2319 bp, Unknown
  16S sequences of unknown bacteria
cttctttttgaatttgatgaaaaagtccttgacttttcgtctctggaaaaaccgcaaaatctattcttatctcctgcggtgccaggcttgcgccttttgatattgcggaagtccgggagatcaccatgtatgacgaactggagctggatttggtcggggaccggaaaacagccctgtttttcatcatttctgatacggacgccacattcaacttccttgtcagcatggcctatacccagctttttaacttgctttgtgaaagggcggatgataaatacggaggccggctgccggtgcatgtgcgctgtttgatcgacgaggcagcgaacattgggcagatcccaaacctcgaaaaactcatggcaacaattcggtcaagagagatttcggcctgcctggtgctgcaggcgcagagccagttgaaagcactgtataaggataacatggacaccatcatcggcaactgtgattccagcttgttcctgggcggaaaggaggaaactaccctgaaaagctggagcgccctgctggggaaagaaacgattgatatgtataacaccagtgtcacgaagggcacgcaggaatcccacgggcagaatttccaaaagctgggcaaagatctgatgtccatggatgagcttgccgtgatggacggcgggaagtgtctgctgcaggtgcgcggcgtccggcccttcctgtccaaaaaatacgatattacccagcaccccaattataagtacctttcggatttcaacccgaaaaacactttcgatatagagaaatacctgtctacccgcttgcgggtgaggccggacgatctgttcctcaattatgagatcagcccgtccgagctggcggaagaatccgcagacgataccgaataggcccgccgatttgcaaaatcctttttcttttcggcgggccttgtttttttatgcccatttcaaggaggtgcctattggtaaggagccgtgattctcctaaatttactcacaatccgcaggatgtacgcctgcgctcgccgcccgctgtttgttctttcttcaagcagcgggcggctttttttgcgtttcaggccaaaaacggccacaacactatcatttttcatttgataaggaggtaattacccaatatgagttttttcacttctgctattgataccctgcagattttggttgttgcgctgggcgccggtttgggtgcgtggggcgtcatcaatcttttggaaggatatggaaatgacaatcccggagctaaaagccagggtatgaaacagctcatggctggcggcggcatcgcagtggtagggatgacactgattccgcttctgtcgggcttgttctaatcgtccatggactggttatttggctggataacagactggataaaacagggcttaatcgacgccatcacaggacaatttacgggaatctttgaatcggtcaacaaccaagtaaccgatgtggccgcgcaggtaggccagacaccccagggctggaatggcggtgttttcagtatgatccagacactatcagaaacggtagtgctgcccattgctggcataattcttacctttgtgctggtatatgagctgatccagatgattcttgaaaaaaacaacatgcacgaatttgacaccttcaacatttttaagtgggtgttcaaaaccttcgttgccacttatctgctcaccaactgttttacgattgtgatggccgtattcgatgtggcgcagacggttgtggcgaacagtgcggggatcatcaacggaaatctggatgtggccgcgtctttggccgacctggaaacacagcttcaagctatggggatctgggaactgatcggcctatggctggaaaccaacatcatcaatctgtgcatgtggattttgtctatcgtgattttcgtgatcgtttacggcagaatgatagaaatttatttgaccgtgagcattgcgccgattcctttttccacacttgccaaccgcgaatggggagcgatggggaccaattacctgcgctccctgttcgcccttggcttccagggattcctaattttaatctgcgttgcgatctatgcggtgctggtacaatccatcccatcttccagcagcgtacatgccgcaatctggggtacagcaggctatacggtgctgctggcctttgccctgtttaagacaggctcgttatctaaatcaatcttcaatgcacattgattgtgcttatatcattcaaaattaaggaggttattccatgagcaataccaatgctaatgcaaatcccactgtcccggaaacaaacggggaacagcctttcaagc

SEQ ID NO: 2345 - DNA, 17723 bp, Unknown
  16S sequences of unknown bacteria
ccttcgggaaaaaggaggcttttggccgggcaacttcttacgattgtgccactaaccaaaaggctccccttggaatcaagggggcgcacgaagcgcgcgcgctgtgcgcggagcagcgcgaagtaagcccagtaaggcaaggagcgtcgcaagcgagccctgcgagcgaagcgaggcgactatgccgcactgtggaatgctgtcagcgaagctgactgaggggtgtccgatccctccgtcacggcttgcgccgtgccacctcccttttcccttcgggaaaaaggaggcttttggcagtgctgcttcctgcggtagtgccactaaccaaaaggctcccctttcacaaaggggagctgtcagcgaagctgactgaggggtcgcgcacagctcaatgcaacttgtgcgccgaatattcctcgccaaaggtatcgacggtgactttcttcatgcgctgctccttaagcgggcggtcgttgcggcccgtgggggtatcggcgatggcgtccaccacgtccatgcccttgagcacgcggccaaacgcggcgtatgcgccatccaggtgcggcgaagtttcgtgcatgatgaaaaactggctgcccgcgctatccggatacatggagcgcgccatggagatcacgccgcgttcgtgcttgaggtcgttcttcacgccgttttgcgcgaattcgcccttgatgccatagccggggccgcccatgcccgtgccctgcgggtcgccgccctggatcataaagcccgggatcacgcggtggaagatcagtccatcgtaaaagcccttttgcaccagttccacaaaattggcgacggtgttgggcgcgatatccggatacagttcaatttcgatcacgccgccattttccatttcgatggtcacgaggggattttttttcataccattgcttcctccaatcattcttcttccatcttggtcactgtgtattgatagccgtgggtgtccacggtgatggacgcgatcgtctggctaaaaaggggcgcgtagtatgcgtccacggccgtggtcgcgatggaatccagcacggcgaggctttcctcatccacgatgcggccgaacgccgcgtatttcccgtccagctcgggatagttgtattgcatgatgaaaaactggctggacgcgctatccatatcggattcgtagcgcgccatggagatcacaccgcgctcgtgcgaaaggggattgtcaaacccgttttcggcaaattcgcccgcgatggtgtagcccgcgtcgcccgtgccatccccgttggggtcgccgccctggatcatgtatcccagcaccacgcggtggaacgtgagcccattgtaaaacccggattcgcacaaattgacgaaattggccacggtattgggcgcgcaggcgggatacagttccaggcgcatcacctgcccatccgccatcgtgatggtgacggtgggatagggaatctccgaatacaggggcgcttcctcttctttgccgcaggcggcgagcgaaacgagcaccgcgccgagcagaaccagggttaaaaaccgcttcattttccgtcgcctccaatcagcgcgcgcttgcgctccaccatttccgccacgcgggcgatgtattcttcgatgttgcgcaggttgggcgcgcgttcgatgcgcctctcccgcgcgaagagccatttggtcaccgcgcccgcgcccagggccagcacgggggcggtttcctccatgttgccgatgttgtacaggcaggcgtgcccttcctttgcgtagcccgtattttccagattgcccgccatatacttttgccggtagagataataggggaaatagccgcgctcgcgcagggattcgcgcgcgaagcggatcatttccgccgcgctttctggcggcgcgtaatcgctcttttcggtcaccagttcttcgtgcaggcggctggaacgcttgatggcgagcgaatgcacggtcacgctttccggatcgagcgcgagaacctgctcgatggtggcgcggaactggggcaggtcttccccgggcagggcggcgatcacatccatgttgatgtgcgcaaagccggcctcccgggccagcgcgaaggcgcgcagcgtgtcttgcgcggtgtgcgcgcggccgatgcgccgcagggtttcatccgaaaacgtttgcgggttgacgcacacgcgctctaccccgcgctcgcggatggcgcgcagtttctccatcgtgatggaatccggcctgcccgcttccaccgtccactcccgcgcgccggggaaggccgcctgcgcctcgtccagcacgcgcgcgagttgcgcggcggttagcgaagtgggcgtgccgccgcccatataggccgcgcgcacggacaggcccatttcgcgcatcattgcgccgcaggcgcgaatttcctgcgcaagcgcggcgagatagggctccaccagcttgccgtctcccagctcgccggaggaaaaggagcaataggcgcagcgcgtggggcagaagggaatgccgatgtataggtcgaactgccccgggggcaccgtgcgcaggccgcgctgcatgcgttcgatttctttgagcaatccggccttttcttcggagacgaagaatttctcccgcagatagagggcggcggcagcgggcgtatcgccggcttccaggcgttcatagagcagccgcgtggggcggatgcccgtgagcgaaccccaggcagggctttggcccgagatcgtcctgagcagcaggaacaggccggtcttggccgcgcgcttgcgttcgcgcttgatggctagctcgcccacggcgcggcgcggcgcaaggtaggtgtgttcaaaacccagcgcatagaagcgatcctgccagcgatcctcctgaattccgccttcgtggcggatgcaaaaatccccctcgtccgcctttacgctcgtggggtaaaaaatccggataacgtccgccagttcgccaaacagggcgggctcgttggtttccagccggatggtcataagccaagcaccgccatggcgctttcgagcggcgcgctttcgccgtggccgggatagatggcgtcctccccgggcaggcggcggagcgctttcagcgattgcgcgagttcggccatgctgccaccgggcaaatcggtgcggccatagccatcggcaaacagcgtgtcgccggaaaacagcgcgttgtactctggcaggtggtagcacacgccgcctggcgtgtgcccgggcgtggggatcacgcggatggccatgccgcacacctcgatatcgcccggcgcgcaaagggaataaacctcatccgccgcaaagggcgcgaacgcttcgcggcaaaacaggggattgtaggcgttgaggcgcgcgtcgcgcaatagcggcgcgtctttttcgtgcaggcagattttggcccccgtctcgcggcgcaggatgggcgcggcgagaatgtggtcgaaatgcccgtgcgtgagcagaatgtggctcagccgctttccgcaatcccgcacggctttcaggcaggcggcggcatcgtcgcccgggtcgatgatcagggcgtcctcgcgctctggcaagaaaacgaggtaggcgttttcctgcaattcgccgcacagaatgcgcttgatgatcggcttcattggctcaaaacccctttcggctatccagcagaatggtcactgggccgtcgttgagcaattccacgcgcatgtgcgcctggaactgcccggtttgcaccgccaggcccctggccgcgagccgctgccgcatggcctggcacaggggatcggccacttccggtcgcgcggcggcgctgaagctggggcggcggccatggcgcgcgtcacccagcagggtaaattgcgaaaccagcagcacttctccgcccacatcctcaatggagaggttcattttgccgttttcgtcctcaaaaatgcgcaggcccgcgattttgtctgcgcaatagatcatatcgttttcgccatcgccgtcttccacgcccacgagcaccagatagcccgcgccaatcgcggcgattttctgttcgttcacggttacgctcgcgtgcgcaacccgctgcactacacaacgcataatggcctcctcgtcattggctcacgcgatagacttcgatcacgtcggagcgcttgcgcaactgcttgagcacgttatcgagctgctgcgtgttttgaatggatagcgtcatggaaatggtgacggtgaacccgtcctcgcacttgcgggcggaaatcgcgttgagcggaatgcccagcttggcgaacatcagggaaagatcgcccaccaggcccgcgcgatcgtacccattgaggtggatttccgcgtcgtaggcggtattgcccgcgttttcccagcaaacttcgatcatacggtcgggttcgatgcccgcgtccttcatgttctggcaatcggcgcggtgtacggaaacgccgcgcccgcgcgtgatatagcccacgatcgcgtcccccggcaggggattgcagcatttggcgcagcgcacgagcatgttgctttcgcccttgacgatgatgccgtgcgaatgctcctgctcctgcgaggcgcgcttttcagggtcgctagaggggcgaggtttgctggcttcgggcgcttccgtcttttggttctttttcatttcctccagcaggcgattgatcacctggctggcgtttaggccgccatagcccacggaaatgtaaagatcttctagcgattgaaaggaatagcgccggcacacggcttccagatattcgggtttggccagctgcgaaaagatgtatccctgctttttggcttctttatcgagcagatccttgcccaaatcatagttttcatcgcgataggtgcgcttgaaccaagcgcggattttggccttagcctcgctcgtttttacgatttgcagccaatcgcgcgagggcttgccgctgggcgaggtcatcacttccacaaaatcgccggtttccagcgcgctgttgagcggcacaatgcggccgttcaccttggcgccgatgcacttgttgccgatttgcgaatggatgcggtaggcgaaatccagcggcgtggcgccgcgcggcagcaaaatgacgtcgcccttgggggtgaacacaaacacctcgtcagggaacaggtcggttttcagcagttcgccaaattcgctggggtcgcgcgcggtgtcctgccaatcgagaatgcggcgcagccaggcgagcctttgatccagatcgtccgcctgccggccctctttatagcgccagtgcgcggcgatgccgtattcggcggtttggtgcatatcgtacgtgcggatctgcacctcgaaaatcatgccgcccttgcccaccaccgtggtgtgcagcgattggtacatgttcgccttggggatggagatatagtccttaaagcggcccggcaccagcgaccaaagcgtgtgcacgatgcccagcacaaaatagcattcttgcttggtgttcaccagcacgcggatcgcgatcaaatcgtgaatttggtcgaacgtcttgtgctggttcttcattttgttatagatagaatagaaatgcttgggccggccctcgacttccgccttgatgcccgcgtttttcaactcggtctgcagggtttcgatcacgccgcgaatcgccgcttcccgttcctgccgcttcatgcccacgagattgaccagggtgtaatagccttcggggtcgatgtagcgcagggaaaggtcttccagttcccacttgatggcgttcatgcccaggcggtgcgccagcggggcatagatatccagcgtttcatgcgcgatggcgatctgccggtccgccggttggaacttgagcgtgcgcatattgtgcagccggtcggccagcttgatgatgaccacgcggatgtccttcgccatggcgaggaacattttgcgcaggctttcgattttttgttcttctttggtgctaaaattgagccgggataacttggtcacgccatcgaccagcacggccacttccgcgccgaaatccttttcgatggtttcgatggtgatttcttcgatgtcttccacgcagtcgtgcaacaacccggcggcaatcgtcgtcgcgtccagcatcaaatcggcgaggatcaaagagaccgcgtaggggtggttgaaatagggctcgcccgatttgcgcttttgatcctggtgcgcggttttggcaaaattgtaggccttctccacaagcgacatatcttcgttggggtgatagcgccggatagaatcgatcagcttgctaagttgttcatcgcgaactggacaggtaccgccgtccatgccatccattcaatccacctccatcgcgtaggaaaccagagcgcgcatgcgcatatacagttgggaagattccatatcgaccttcataccggcgggcacggtgagccgccgggcagcgtccaggcggattaagcccaattcccgcaacagcagcacggccgcgaaggcggcgacgcgcgtggaagagcaggattgcgccaggatttgcgccaggtgttcatcgccgtttgcgctgccgcccgcgcgcgcgtaggcgcgcgcagcccggtaaaattcccgcagcgcggggatgtcgggaaggtctttcagccacgaagaggaaaagcgccggtccagccgggcggtacacgccggatggaagggcagatcgagcgccaccacctgggaatagcgcacgccgggcgttcccgcggggcaaaaactcagcgcgtggaacgcgcgcggatccgtggggtaaacgccacagaacacatcgatccccggatagcgttgcgccgcccaaagcagagcttcctccgtggcggcaattagcagcgttccctggttgcccgccatgtgcgcgtccagcgcgtccaaagagagcacttcgggagctgataacgaaccagtataaagcaattgcgttaaaatcgcatgctgaagcgcgtaatgttcctgttgaatcgcattttttgcgccattttcggcaggcttcagcgctttcacttgcatttgcggtaagcggcggccgcggtattcgttcatgctgagggtataggccacatcgtattcgccgcacagcgcgtccgccagggctcccgcccggaaatacacgccggaaaggcttgcgtgcgcgccggcaaaggaaaattgcaggtgcgcgccatcgcgcccgcagcgccgcagggattgaaagttgccgcggctgagaaacacgggcgcggggttgccaaagcccgtgggctgcaggcggtcgagagattcgataaaatccgcgtccgcttcctccagcggcagggcgaggtcgtattcgcactcgggaatgtacgcgtccgcgtctactgtggcaaatagatgttcgtctagcgcacgggaaaacgccgcaatgttctccgcgggcagcgaaaggcccgccgcctgcgtgtgcccgccaaagcgcgtgaggtaactttcgcaggcgcacagcgcgcggtaaatgtccacgccgggaatgctgcggcaggaacccgtgcccacgccgtcccttagggaaatggcgatggagggcatgtggtatttttccgtcagccgcgaggcggccaggccgatcacgcccacgttccaatcttccccggccaccacgatggcgcggtggctgggaaaatcaaagtctttaagcatggcttccgcctgggcgaggatttccttttccaacgtctggcggcgcgcgttttcggtgttcaaccggtcggcgatggcagccagttcgaaatcgtcgctgcccgtgagcaattgaaaggaaagggaggcgtcggccaggcggccgcccgcgttcagccgcgggcccagctggaaagcgatggtttcggaaaataggggttttccttccatcccggcggagcgcatcagcgcggcgacgccggggcggggggagaggttgagacgcttgagcccgcaggccacaatcgcgcggttttcacccgtgaggggcacaatatccgccacggtggcgatggcggccagatcgatatggccaagcgccgtgttcaggtcgctcagcgcgcgcgccagttggaaggccacgcccgcgccgcacaggtcgggaaagccgtaatcgcccacgtggggattcaccacgacgcaatcgggcagggtttcgggcggctggtggtggtccgtcaccaccacgtccatgcccagcgactgggccagcgcaacgagttccgcggagctgatgccgcagtccacggtaacgagcagggtatgctcctgcgcgagcgagcgcacggccgcttcgttcaggccgtatccctcggtgtggcgcgagggcaggtacacttcgcaccgcgcgcccatggcgcgcagttggccgtgcaaaatggcgctggcgcacacgccatccacgtcgtaatcgccgtagacgacgatggcttcgtcccgatcgacggctttttggatgcgttctaccgcttcccgcatgccgggcatggtgaagggatcggcgatttgcgatgcgtccgggtgcagaaaatcctgcgcggcctgcggcgtgtcgacgccgcgcgcgcacaaaagccgccacagcgccggggccattccggcgggcggcggggaatccgtgcgctgcgctgcgcggcatttgaagcgaagcatccttggcgttcttcctttctgtacgattgcggcgcgttgagaatttgtagagaattctgagtaatattatactatggctgtcaaggcgacgtttaagacggcgaaaatccgtttttgacacaaaatgcgttgcgttttcgccacaatacgatataataagggcgagcgggcgcgggaagagcaaacctcccgctgccgcgaagctttgccggcaatgcgcgaaaccagagcggctcagccgcgagaaaggggacaggagcatgctgaaaatagaaaatttctccaagacgtatccgggcgggaaccgcgcggtggatcatctgtcgctggaagtgcgcccgggcgacgtattcggcttcatcgggcacaacggcgcgggcaaaaccaccaccatccgcgccatcacgggcgtgatggatttttccgagggcaacatctgggtggacggggaatccgtgcgcgaaaacccgctggcctgcaagcgcaaaatcgcctttgtgccggataacccggatctatacgattatctcacgggcatccaatacctcaatttcgtggcggacattttcggcatggacgcgtccgcgcgcgagagccagatccgccgctacgcggaaatgttcgaaatgacgggcgcgctgggcgatttggtcagcgcctattcgcacggcatgaagcagcgcctggcgctcatcgccgcctttatgcacgagccgcgcctgttggtgtttgacgagccgtttgtggggctggatccctccgccgtgcacaccgtgaaacaattgatgcaggaattctgcgcgcgcggcgcggcggtgttcttttccacgcacgtgttggatgtggcggaaaagctgtgcaaccgcgtgggcatcattcgcgcgggcaagctcgtggcctgcggcgatatcgaagcggtgaagggcgaccagtcgctggaggaagttttcctcgaattgcaggaaaagtgaggcgagcggccatgaaagcgttttgggttttgacaaaattgcagctgatgcaggcgtattcgctcaatccgctcatccagggcaaaaagtggggcaagctattgggctttggcgtgctggggctgtatctcatcggcatttttgcctttgtggtgtactttttcgcggaggggatcgtgcgggccttcgcggcgctgggtgctttggaggcgttcccgccgctcatcgcggcgctggtgtgcgtgagcacgttggtattttccatctatcgcgcgtccaccatgttgttttccgcgcgcgagctggaaattacgctggccatgccggtgcggctgtccgccatcgtcgcttcgcgcgtgatggggttgtacttggccaatttgccctttgccctgatggtaacgattccggcgattgtgccctacattcgcgccgcccagccaggcgcgctcttctacccgatttttgccgtttgcacgctggccgcgccgctggttcccgtggtgctggccgcgattgtgggcgcgctggtcgcctttgcctcgtcccgcttccgcgcggcaaaatacgtcaacatgctgctattggtggcggtgtcgctgggcgcgatgtatttctccttcaccatcaacgccaatcccgaggccatggcgtcgctggatctgggcgcggtgggcgaaacgctgtcgcgcgccatttcccgcatatatcccttgtcggaactgtatgcgcgggcggtggcgcgcggcgatgcgctggcgtttctcggctatgtgggcgtttccgcgctggtatttgcggcgtttgcctttgcgctgggccgggtgttcctgccggtgtgcacgtccatccattcccagcgccgttcggcccggcgctaccagctgggcgccatgaagcgctccggcgttttgaaaacgctgatgctgcgcgaatggcggcaccttacggccgtgcccatgtggattttcaattccctgttcggcctgctgctggccctgatcggcggcgtgctgttgctgatcaacaaaaacgcggtactcgcctttatggcgcaggaattcgcgccgcagttgggcgtggatttgccgctgggcgcgatgctttccatggtgctttcctggctggtttccatgtcgtgcctcacgggctgcaccatttccctggaggggcgcacgctttggcaactcaagtcgctgccggtttcggggcgcgacgtgtttgccgccaaggtgctgctcaacctcctgctgtgcgcgccggtttcgctggctgtgggcgtgctagcgggggttgccgtgggcgtttccggcgcgctggattggctctggctgctgctcacgccgtgcgcgtatctggttttgatcgtgctggtggggctgctggggaacatccgttggcatcgctacgactggacgaatgaaaccgtcgtcatcaagcagagcctgggcgcgatgctgccggtgctggtgtctatgcttaccacgctgccggtggtctattttctcgccgtggcggaggacgcgaacgcgctgatgggcgcgattaccttggcgctggtggcgatcgatctgttcctcgccgcgctgctgcgcaaaaaggccgggcgctggtacgccagcctgtaaggagtttgtggtgaaaaaacgctattggttgtggaacgcgctcattttggcgctggtattcgggttcaccgcgtggagcatcgccaaggaacagaactttgcgctgctcccgcgggcgtttgccctcatgcgggtggaatatatcgtcgcgggcgcgctgctctccctgtggtatgtattgtgcgagtccatcattctcaagctcatgttctggcgggaaaagcgccgcgtttcctttttgagctgctcgcggtattcgttcatcggctattttttcagcgcgatcacgccttcggcctctggcggccagccggtggaaatctattatatgaaccgcgatggcattccggtttccacctccacgcccatgctgatggtgaccacgattttgtataagatcgtgctggtggcgctgggcgtcgtgtttatggcagtggggcgcgaccgcatgctggcggcgctttcgcattccctgtggctgtttgtgctgggatttgtgctcaacgcgctattcatcgcgttcgtgctggcgcttttgttcaagcccgcgctggtgcggcgctttatgcactggctgtttggcctgcgccccctgcgccgccacgataaaatgcgcgaacgggccgtcgccttcgcggaaaagtaccatgagagctgcgagcttttcaccagccgctggaaagacgcgctcgcctggctgttggtttcgcttttgcagcgctgcatttatctctttttgccctatctggtgtatcgcgcctttggcatgagcgggcattcggcgctggaaatcatgctgctgcagggcctgatcgccatatcggtggatatgctgcccctgccgggcggcatgggcgcgagcgagcatctgtttatggaattctttttgcccgtgtttggcgcttcgctggccttgcccggcatgctcgcttcgcgcgtgctggtgttctatttcccgctggtggtttccgcgctggtcacggtgtggtcgcatttccgcgcgcggcggagagagtaggaaagcggaaagggagaaaacggcttcggcggatagaattgcctggggcaatcccggttgctatataagagccctaagaccgaggcagcccgaaacgagttgtcaaggactttttaatcaaattcacgaaaaagtcacaaacaagcgcctctttttcgcccggacgagtttactttccccggcacatgggatataatataagcagagataaagaaaacttgagttctaaagaatagaaagggcgacttgtatgaatttggcgaaaatctctgcaaacggtcaaatcactgtgccggtagaaatcaggcggcagcttggtctgaaatccggcgataaaatcctgttcctccagaagcagaatggagagatcgttgtcagcaacgcctccgctgcggccatccgaaaagcacaggccgccttttccggggctgctgatgcgctgggcgtatccagcgaggaggatattcaggcgcttgtagacgaagtgcgttatggaaagggacggtaaaatgcggatattggtagacacaaacattctgttttccgcattggtctttccccgttccaaaccggcgcgggctttgctctacatcgcagacaatcacgaaattgtcctgtgtgaccgcaacatcgcggagctgcgggatattctcggacggaaagcgccaaagtatctcccggatgccgaagtgctgctggcagagatgtcctatgagttaattcctgcggtagaccatgcggaaaagctgatacgagatgcaaaagaccagccgatcttaaacgcggccattgtgtcggatgtggatattatcctcaccggcgataaagactttttaagtctggatatggaacatccaaagtgcatgaccgtcgcacgatttctcgaaagtgaaggcgtggaggattgacctctgcgccttttctcctggcatggaaagggccggaagcctgtttgatcgacgccttggcggcggtctgtttgtcgtactcatttttcttcctgcctcttcaccaactttttttcgctcaagcctcatttggggcttaactttttatttgcaggctcagtcggttaccgccgcgacggagggattgggaacttgcgtatcataagaggatgcgatgatacaatttgaaaacagaagacctttgagtgaaacattgactttatcaatatactaaaagcgcgaaaggaccaaagccctttcgcgcttcaatcgtccccggcggcgtgtgcgttattcacaaggacgcattatcttcttccagccagggagcataaaattcctccatcaccagcagctcgcaccggccgtcggtgtgctgcaccaagtcgcgctggaacgcttcagcgtctgccgagcgcacgcacagggtgaaggtgatggtgtcggtgaacgccttgtcctccacgcgcacgggcgcggatttgaggaagtgctcgaaacggcccagcaggggatagggcacgtccaccagcaggcgctgcgtggggtgcatcaccgcgacctgcgcggcgtttaaggccatggcggcgccttgggtgtacgcgcgcaccagaccgcccgcgcccagcaggatgccgccgaaatagcgcgtgaccaccacgatggcgttggtcacgccgcgcgctttcatcacttcgatgatgggcatgcccgccgtgccgccgggctcgccatcgtcgttgtagcgcataatgcccatgtttgtgccgatgatataggcgtagcagttgtgcgaagcgtcctggtattccctgcgcatttccgcgaggaagccgagcgcttcttcttcgctttccaccggcgcgccgtggccgatgaagcgcgacttgttcacgataaaggaatcgctcgcgcgcttcatcagcgttttatagggcgctatgctcattgcgccagcaccagcaggtgatagttcttcttgcccttgcgcaacagcaatccttcgccttcgagcatgtccggcgtgacggtgaagtccacgtccgccactttttcatcgccgatgtacaagccgcccgcctggatggtcttgcgcgcgtcgccattggatttgcacagagcgcacttgaccgccagggagatcaggcggctgtccgaggcgagctcttcccgggtgacggaagtggtgggcgtggaacccgcgcgcccgccgccggagaacagcgcatccgccgcgtcctgcgccttttgcgcctcgtcctcgccgtgcacgagcttggtgacctcaaaggccagcacgcgcttggcctggttgatttccgcgccttccagcgcgcccaggcggcgcacctcgtccatgggcaggaaggtgagcagggagaggcacttttccacatccgcgtcgtccacgttgcgccagtattggtagaaatcgtaggggctggtcttgttcggatccagccacagcgcgcccgcctcggttttgcccatcttgcggccgtcgctggtgagcagcagcttgtaggtgagggcgaaggcgtccttgccctccttgcggcggatgaggtccgcgcccgcgagcatgttgctccactggtcgtcgccgcccgcctgcagcgtgcagccgtaatcgtggtagagctttaagaagtcgtagctctgcatcagcatgtagttgaattccaggaaggtaaggccgcgttccaggcgctgcttatagcattccgccgtgagcatgcggttcacggagaagtgcacgccgatgtcccgcaggaaatccacgtaattcagcttcagcagccaatccgcgttgttggccacgatcacgccgttttcgccttcgaaagaaaggaaacgcgccatctgctttttgaagcattccacgttgtggttcacggtttccatggtcatcattttgcgcatgtcgctcttgccggaggggtcgccgatcatgccggtgccgccgccgatcagggcgatgggctgatggcccgcgcgctgcatgtgcgccatggccatgatcgggatgtagtggccaatgtgcagcgagtccgccgtgggatcaaagcccgtgtaaaaggtgatcttctgttcccggaacgccttgtccaggtcttcttcaaaggtgatttgcgcgataaagccacgctcgcgcaggatatcgagtgcggattgcatttatatcagtcctcccaatcgtttcatgcccgtttcgatcacgtcaaccgggctgttcgagaaattcagacggaacgtgttttcgtgcccgccttcgggatagaagtgcgtgccgggcacgaaggccacgttgttttccaccgcgcggtcgaacagggaaagcgcgctctggccctccggcagggccgcccacacgaacaggccgccttccggcgcggtgtgcgtcacgcccgcggggaaatattgaaaaccgtcgagcatggcgtcgagctgccgcttatacgacttacagatgcgctcgatgtgcggcagcaagaggttcttgcgcaggtagagatccacgatggcctgcgtgaaagacgtggtgtgcacgtccgtcgattgcttgccgatcaccagcttgcgcatgagaaccgggttgcagatggccgcgcccacgcgcatgcccggggaaatcagcttggaaaagctcgccagatacacgacccagccgccctcgtcgaacgacttgatggcgggcagcggctcgcccgcgtagcgcaggtcgcgataggggtcgtcttccgccagaatcacgccatagcggttcgccaactcggccagcgccttgcggcgctccagcgagagcgtcacgcccgtgggattctggaaggtcgggatgatatacatcagctttggatggtgggcgcgaatggcctcctccgcagcttcgggaatcaccccctgttcatccgtggcgatggattccacgcgcgcgctgtacgtgcgcatggcctgcagcgcgcccaggaaggtggggctttcggcaaggatcacgtcgccaggattgatgaccgccttgagcaaaagatccagcgcctgctgcgaaccatgcacgggcagcacttcttcgggtttggcctcgatgcccgcgcgcttcacaaattccgcgatgctttcgcgcagcggcgcccagccctcggtcgcgccatattgcaaaatggccttgccgttttgggcgagcgcttcctgcgccagcgcgctcacggtatcgacgtccagcgcgtccgccgaaggattgccgcccgcgaaggagatcatgcccggccgggcgagcaggtgaaacacctggcgaatggcgctgccagtgatgggtttcatttgctccgcaaatacatcctgtgtgaattccatgctatttccctccatatggctcgattgcttgccgtgcgatgcaaaaaaacgccgccttcccacgggggaaggcggcggcgccacggtaccacttccattttgccacgcaaaccgcgcggcctctgtgcgctataacgggcgcgcccgtgcctcgctactgccatttcgcaaagcccgctcacgaaggtattcggcgcgcgccgcccgcttcctcgcacccaccggaagctctcttgagggggttaacgcgcttacttctttcgctcatcgcaattaagggcattatacatgctcccggtggaattgtcaacagccgtcacaaggattttacgcggagagcgcctgatggaatgttaaaataaaatgaaattcgcaaaacctcttgacattgggaatgacttgcgttatactgaaatcacaaaagaaaacagcgattcaagcaaaatggattgcggtagtatggaggggatgcataaacagcgattgtttgtttgaaaatgcacatgccattgtccctttgcgaaaatgcacattcgcaagcctggcgaaagggcatggcggagaaaatccatggaaagtgcggggaagcgtttcacaaccattgtatggcatccgaaaaaaatccagcgtgcggcagaggcctgatatatagataaaagaaaggcatggagttatacgatcgcagcgcttggacgggaaatgataaaatcagtggcaatgcgccgcactcagctcccactagggcaagccgtgaaaatgcggccagtcttttgaacgaaaccaattgtacgaggagaaacagccatggtgcgcctagcaatggaaaacgacgcggaaatgctggctcaattgaacgctgccttcaacgggcccggcgaaaccagcctggaacatattcgtgcctctttgcgcgaaaaccggcaggaaaccgtcatcgtcgatgaagcaaacggaatccttaccggctttctttgcctgcagatcaagcgttccttttgttacgacgcgtgcgcgccagaagttaccgagctctatgtccggccggaataccggcggcaaggcatcgccaggcgcatgcttctgtttgcagaagagcattgccaaaaagaagcttcttgtcacggactcgagctgttgaccggggacgacaactggattgcccaggccgtttatc

SEQ ID NO: 2346 - DNA, 22445 bp, Unknown
  16S sequences of unknown bacteria
gaaacgaggatttggcacggcagtgccaaagacgacgattgaggttgcggaacagcgcccctcatccttatgccacagcagtcttcccgcgaaccagcttaagggtgcgcagcaccgaggacgaggacagccctgaaagggctaccgcagtccgaagcccgcaacgcaaagcggagcgggccgcagagcgctgttcgcgggcatctgcacgccatccgcgtttttgaatcatcgtcccaaaggaaaatatctttgcctgcccttagaacaggcagatatactttctccattttcggaaaaaatcctgccttattttttcatgcgggaaagccaccgtccacgcccagcacctgcccggtgataaaggcggactccgggccggaaagccacagtacggctcgggccacgtcctccggggtgcccagacggcccaaaggggtctcgtcggccagctcggccagatcgtccgaggtgaaggtgctgagcatatccgtgcggatcacaccggggcagacgcagttcacccgaacgccgctggggcctgcctccttggcaaggccgcgggtcaggccgatcagccccgccttgacggcggaatagggcacttcgcagctggcccctatgcggccccaaatgctggaaacattcacgatggagccttcctgccgggagatcatccccggcagcacggcccggcacaggtaaaacgcgccgctcaggttggtatccaccatgcgccgccactgctcgtcggtcacgtcggtcaaaagctcctgcgaggcgatgcccgcgttattcaccagcgcgtccacatggggcagaaaggccttcgtttcctgcacggcccggcggacggacgcgctgtcgaccacgtcgcactgcagggcgatggcgcccgtttcccgggccagtgcttcggcagcttcccggctctgacggtagaagaacgccgtctgccagcccgcctgccggaaggcccgcacacaggccgcgccgataccccggcttcccccggtgatcagcgccgttttcatacggacgcgcctgccttttgcgcctcggcagccgcgccgggcttgggttcgtgaaactcgcagccctcgttgtagtagaccttctccggcggctgttccagttcgtagggattggtcagacagtgcttcatcacggcaaagagtttggcgtagatcgcgccgctgcacacgcgctcgtcggcggtgatgccgatgggcaggatgcacttgcggctgatctcgcccttcatgtccggctgattgctccgctggggcgtgcccatggagaaaaacagactggtattgccgaagttgtagatgtggtggtacacccgggtcatgccaatggaggccatgttggtcacatacatgctggtatggaagggcagctcgtccaaaagctccttgggggccaggccgtagcgatccagcagcttcaccagtcctaccacggcgttgggcaccagcggcagcttcagcacggccttggccagcttgatggcgaagctggggtcgtccgccttgcggcctttttcaatggtctccttcacccgggcgctcacgtcgaaaatggtgtcgctggggtcgaagcgaatcttgacggcgttttcctccgcgctgccgtcgggcgtgtccatcagcagggtaaagctgacggtcagctcggtgcggttgtagaactgcttgttcatgataaaacgattggtctccggcacctgcgacacgccccgcacataggacgcgatcagcagctccataaaggtgatcttatgcccttcccgggctttttcggcgatgtagcgcatgaggggttcatagtccgcgtcgtgggagagaaacacctgagcgtcgcagcgctggggcatcagatagggggtgatggcaacgatggggtcaacgtcgtgaatgcggcggccctccgggcggaaaccaaacatgggcatctttcctttcttgtcggggcgaatgagtgcggataatagggtatgaaggatgtggccttttcaaggtcggcagagtgtcaaaaaagtggaggtgcaggaggcactgctgccactcaatcgtcgcggaggactactgccgtagtccccgctcgtttcgtgacacacctgcgggtcgctaaccgcctatggcggttgtgcccactgggcacccactcccctccggtgcctgccggggttataggggcagcgcccctaacccttgtgccgcagcactttccccgcaaaccagcgtagcgctgtttgcgggcaacggaggccgactcggggtttttcgacaggctggcggcctttccaaggccggagaaaccattattctctgcgcaggacagtgccttccggtgtgggcgtgacccggaggaaacagtcggccctggcacctgccgcgtcctgccggtcggtgcaggtgatgaaggtctgcagcggcgcggcgcttttgaacagggcgttgcggcgcttcgcgtccagctcgctgaacacatcgtccagcagcagcgtgggcgattcgcccatttctttttcgatcagccgaatctcgcccagcttcatgctcaacacagcggtacgtagctggccctgactgcccatggcccgtaagtcccggccgaacagctgcaggctcacatcgtcccggtgcgggccgaaggtggtatacatccgccgccggtcttcctcccgattgcggcgcagcccggccagcatctgctcgtagggagcgtcggactgggccagtgggccgacgtaaaacagcgaaaagggctcgtccgggttctcggatatggcggcgtattcccggctggaattttcgctcaactcctgcaaaaaccagcggcggctgcggacgataggcacggcggcgttggctaactgctcgtcccacgcgtccagctgattggcgaaatcgctgacgccctgcagcttatcctgccgcagcagcgcgttgcggctttccagtacgctcaggtaggttttcagcgcccggacgtagccggagcggatctggctgagctgcatatccacaaagcgccgccgggccgccgggccgtcccggacgatgcgcaggtcttccggcgaaaacatgaccaccgtggcgtggcccatcaggtcggcgatgcgctgggcgggcttgccgtacagaagcacccgcttctgaggcttttccataggggtcaggcgaatttcgatctcgtgccgtccatccagacggcgggtctccccgtgcaccaaagcggccacttccccctgcgccaccatttcccggtcggcagtggtgcggtggctccggcccagcgaaagaaggtgcatggcctccagcaggttggtcttgccgctgccgttaggcccgtaaagcacagtgatcccctcgctgggttccagttccagatagggataattgcggaactgcttcaggcgaagggtggtaaagtgcatgaaaaatgggcctcgctttccagtggggataaatttaccggctgatggtcaccgtgacggcccggccgcccagcggcttgccgaacacgtcccggcccttgaccgcgtagcggcggacgatcagtgtgtccgcgtccggcgcgtccacggacaagaagccggtctgcagcatgggcttggcctgacgggcctgcaagatttttttcagggcgcggcgcatggccttatcgcccttgtcccaggccatgggagcccggttccacgggtcggccatgccctccatgcccagttcgtcgccgtaatagacggtgggcgcgcccggcagggcgcacagcagacggaaggcttccagtaccttgacctgcgcggcttcccgttgttcgggagtcagacggatatgagcggcctccgcccgatccatctgggccgcgccctcctgatcgtagcccgccatggcgttgaggatgcgcacccggtcatggctgcccagcaaattcatcaaagaataataaaacggcgcggggtagacctcctgctggtgcaggatgacccggcgaagctgctgcgcatcgcatttgccggtgaaaaagtcgatcacggcccggcgcaggggatagttcatcacgctgtccagactgtcgcccagacagtaggagcgcagcgcgccgtaggagaccttattggatgcgtcctcccagacctcgcccagcagcaccgcctccgggtcggcctgcttcacggcccggcgcatggcggacaccagcggcatgggcagctcgtccaccacgtccagccgccagccgcaggcgccttttttcacccagcggggtaggatgccgttttcctcattcagcaaatagcgctgataatcggcgttttccttattaacggcgggcaaggtgtcgaagccccaccacgtgcggtagcggtcggggtactgctcgaaggtataccacggataatagggcgattccgtgctctggtacgcgcccagcgaatcatagcggccgtagcggttaaaatacaggctgtcggagccggtgtggctgaacacgccgtccagcatgacgcgcattccgcgggccttcgccgcgcggatcagcccgtcgaaggccttccggtcgcccagaatggggtcgatctcggcatagtcgcctgtatcatagcggtgattggtgcgggcccggaagatggggtttaagtacagcaccgtcacgcccagctcctgcagctcgtccagcttttcggcgatcccccgcagggtgccgccgaagaaatccagcgcccggttgtccccggtgacgggatccagatccagcaggggcgcttcgtcccactttttgtggaaaaccgcctcggggtgggcaactttgatcttgcggctccgtcccggatgaccggccttttcatcccggaagaaacggtcgggaaaaatttgatacactacggcgtggcgcagaaattccggggtctgataggccgggtcgtacacggtgatctgatagctgctgggctgaccctcgtagcaggcccccacgccgcccagctggtcgtaggacgtgccatagcgcgtgtcgctgccgggccggtgaatgatgaaatcgtaccagaacagcatgggcgtttcgggcacgagaatcgtgctttcaaaaagatgttcccgggtctgctgcatggggtagcgggcctcgccgccgtcccaggtgcgcagagtgacgtgttccgcttcgtcgcacaaaaagcggatggtgacggaagcgcctgcgggaaccgggccgatggggtcgcgatactccgcatcgtaggaatcatgataaagcatggcttcccgttcctccttcatgtctggctttgcatttacgccctatcatatcatgaaaccggcagacggtgcaaacccttcccgcataaaattcggctggagaaaattcccgccgccctgacgaacggtttccagtagagccgttctttccatttttatgcgcaaatctggcaatgattgtcgcaaataggcagtttcgcttctgcacacaatagccgcgaggaggcgaacagctttgaaaaggatctggattctcctggtgatctctctggtcggggtgggtctgttcaccgcttgctccagcaacgcggacacgatggtgcagcccagccccagtccctcggtcagccccagcgcgtcccccacggcgacggccacggactcgcccgtgcccagcgccgcccccaccatcacggataagggcatggaggcgggcgtgaacacggtggaggacgcgcagcgcgtcagcgatgaggtgtcggaagaggtggaaaagctttccgagctgaaaagcgcggaagccgtggtgatgggcaccatcgccgtggtgggcgtggaatacgacgcgcagtatcaggaagggatgaccgaccgcctgaaggaaatgatcgaagcccgggtacaggcagtggacaagagcatcgtcacggtccacgtgaaggacagcgaaagcgactaccaaaagctgatggagctgcgggaaaagctgtccaatcaggacctgaccttcgaacagctgcagacgcaggtgctcaatctggcgggaaacggccaggacacggcagtgggctgagcccacgccaaaggcgcggacaggacggaagcagcgtcgtgtccgcgtttttctgttgccctttacgccgtattattttgctttccagattcttagcagaaaatagataccatctacgattagaatgtgactgttaagaaagaagatcatctactgggatattcaacaccttacacaggctcaccagcgtctccagcgagggttttcgggagctgcgctcgatgtggccgatcagtgaacagctgacatgcattgcatccgccagctgcttttgcgtcatgcggcgttccagatggagatgccgaattttcatgcgcatatcgtcatgatccatcatcagcacctcagaatttctgctttttctaccttcttttttaggactatctgtcctttttgtcaatatgaaagatgacataatagcctcaaaaggagcggtgaggatgttgaatttgctgcgcttacgggaaaaaaggcggctgacacaagtggcgctgcatatcgccaccggcatcgaccagagccttttgtccaagtatgagcggggcgagcgtctgccctccgtcagcgacctgatgatcttggcggatttttcccacaccagtctggattttctgatggatcgcacggacgaggaagcaccctaccctcccgccgggaaaacccaagcgaaataagcgccttctttccccaaaagggcgcttattttctatccttaaaagggaaaaccatttgccggtcctctttccctgacttgcagggattttccttttttgatatactgtttccatcgcaaagctctttctttccgtcgcgtcgattcacaattttcccccgcagaggaacaggaggaaccccggatgaaaaaagcgcaacgtcttctttgcctactgacaactttgattctgctgctggcgcagctgcccgcgctggccgacggatatgttccgctgacgcagcaggagatcgcccaggcccgacagctgatcgccatggagggcgatattcagggctgggaaaaaggcatgaccccctctgcgtccatgaacgccctgcaaattcagcaatatctggaatggctgctttccgatgaggtcggcggcctgcttatgcgtatccgggacaaggctgagctgctgggcaaccaatcgctggaaggggtcgaagacctgctgcgccagttccgggatcagctggatcattaccgggatcgtctggaaacggggcggctgaccgtattcaacagcctgcaccagctggaggcggacgccgagctgacccagcgggaaaaacgccgcctgaccgacaaggtacgggaatatgtggcggaaatgcaaaccatcatgaacaccgtggttcgttactatcagcagtacgaagaagcggtcgattcccacgagctgaacttccttaacgtgctgcaggccgcggacacgccggacggcgccatcacccagcaggccgaggaaaagctgctggccgaggccgaagccctgaccaacgaagaacaggcccatatcgacgggcggaacagcgtggatttcagcgtagtcaccctgtccaccaagcagttcgggttcatcatccgggatcacgagggcaagctgctgaaagacgcgcaggtctccgtacaggcgacgggctatccccgctccctgaagaccgtcaccaccggggaaaacggactggcctcctttctggtggcggatttcgttcccacgtcgaaccggcgggtcacgctggacgtggtcgtcacccacagccagcacaacacccgggaaatgcgccgtctcactctgcggggcgggcaggcggagatcgtccgactggaaaaatacaccggcgttccctacctgcgcatggcttgctataacggcagcgacatcgtggtgcagcagaacaccatctattacaccgccaaaaacgacgcccagcagaccatcgacgtgatcttcaccaaccccggcaaaaaggtgctgaccggctctctgtacctgatctatcagacctacgacgaagacggaaagccccaggaagtggaagaaatgcggaagttcaccagcggcgaagcgaccaccttcgtgggcgaatactgccgcctgatcgttcccggctccaccgtttccatccgggcggagatcccctccacgggctacaaccgcaccttccagacccagttgaagatcgaaaaggcctacgtggaagagccggtattcaacaacgatcagttcatcagctttacccccggcgggctcagcttccagttcccggcggacacgcccttcgtaggcgacctgcagatgaatttgagtctgccgttcatccagtctcagatggtcatcgatcccagcggctacatccagtacgcctacggcaagaccttcgaaagcgaagaactgagctggaagcaggaaagtctgaaagacaagaccgagcgcatggacgaagcggcccgggagggcgagcgggacgcgaacgctgtcaacaatcaggtgtatcagaatcagggtgccagcaagcccgccaaattcctcggtaacatcaaggccatgctcacgccctttgccgccctgcaggggcgcatcaccgaggtgacgaccagcgagggtctgaaggaaaaagttggtctgaaaggcaacgccggcgtgcagatggccttcaagggcggctatacctatcccttcatgatctgggccattccctgcttctgcgcgatggacttcaccttctcgctgggcacggcgttcagcatcggtcttaccgccgactggcccagcatgtccaatatggcgctggacttcggcaccggcgtgaccatcgccattctggcggagctgggcgtcagcggcggcgtgggtgtaaaggactttttcagcctcgccgtccgtttctacggcaacatcaagccgcttttgcggctgggcaagagcagcggcgcgtccgttaccctgggcttcgggctggaggtcacggcgcagatgattctgctcaaattgaaaaggacgctctggaagggcagttggagctcttcctctaatggaacaagcgccctgaacgcggcgaacggagcggaaaacggcgaggtttcgcttaccgccctttccgccggggtcaacattcccgaaaagaaacagcttcccccggcaggcacgggaaaaaccggcgtgttccccacgacggaggaacagctgtttaagcagacggacgcgctggcgcaggaaattcagtacgtcaccctgcaatccggctccgaaaaggccacctttggcctgtggatcacccccacgggtcaggcgacgggccgtcaggccaagctgatctggtataatctggacgattcctcgcggcacggcgaaatttacccctccatgggcggcgacgcccagcggagcgcatcgggcaccgcgtccgattacgctttcgccatccgaagccatcaggatatggtggcggtaaacgtcctcagcggcgtgttcaccgaggggcaggatcacccctccaagagtaccatgacgctggcggtgctgcagcttcagaacggctcgctggtgatgaaaaaatacgcgccccacgtgacggaaacgccgaacgccgcgcggtatttgtcctccccgatcgtatacttcgtccggcacaacaacgccaccgcagctgccgaacctgtctggttcctgaacgcttcctgcgcccgggaggacatcaagagcggcgagatcaccgccgtccattccatggatctggatcagacctccgccgtctatgccgtcacctacgaccccacgcccgacggtattgaaaatgtgcagggcgtgcgccggatgacctccgccaaccccaccaacgccaccttcaccggcgattatattaccggctccaatggctccaaccccagcctttcctgctattactggctgaacgaaaagcagcagctttccgtccacttgaacaagaccaagcgggttctggacgaacacgtggtcttcatggaaaacatggtggaatatgccgtgaacgatgcgcgggagttcgttttctacctgaaggaaggcttcgcggaggacggctcggagtgctaccggctgatgggcgcgacccgtcagggaaacaaggaatttaccgtgcgggattacgacgtgtgcctgtacgcccagcgtttccagaccgcccacgtgaacgacggctcccggtacggcattcattacttgtactggacggagagcatcgcccccgaccccgacaacgccgatcaggaagaacgctaccgcgtcaagtgcgtgcgcttcgaccgggagaccaacaccatgagcgcgccctttacgctggtggagctgtcccactacccggccagcattcacctgctgccggacggtaccggctattacaccaccgatctggaacaggcccaaatgctgaatgaatccgccgtgaacagccgccggctgatccgctttgagttcgagctgaagatcgccgccgagcttaccggcgtggcttccagcgacccctgcgtgacggcgggcgaaagcgccgggctgcttttctccgtagaaaacaagggcaacctgcccatctcccgcttcggcgtcaccatcaagcagggcagcaagatcgttcagcaggttctggtggactgccagaatccccagaacagcgtgaacagcctgtttgcctccaacggccccggctattccgtcacccggctggaaaacgtctatgacgatatgaatggcgaccgttggctggtgaccactaccggcgacaacggtcagatggtagaggaagcgctccataccgaccttctgatgcccggcggcgttcatacctacgaagcggccattgaaattcccgacgactgggacggaaccatttcgctgaccgccgagctggaagccgtctacgccatgacccagtatgcctcgctgatgcagggaagcgccgtcacgcaagccaacgcggcgggggacacggctctgtacgaggtctgcgcccagcccacgggcgaagtgaccggctatgccatgaccaacgcgcccggccagatcggcgttggccgggccaatacgctgcccgaagacacctcgaaggagatcggtgtgggccagggcgacctgatgctggactgccagccctatgtggatgcggacggcgaggaatatgtgcgggtcagcatcgtggggcgctcccagacggacagcaccatcgcgccgaccctgaccgccacgatggacggcaaaatcgtcttcagtcacaccttcatgcgggccatcgaccgggacttcggctatacgctggacttgcccgccgaattgctgctggccggaaaggacagcggcgaagtcaccttcctgctgaccgacaacgaggagggcaacgagttttcaggctttgataacgagcgcaccgtatctctgggcaacgagctgcgcttcctgaagcagcctgaatccctgtctcggacggaaggggaagaagccgtgttcagcgtggcgctggccgggggcaagcagccctacgcctaccgctggcagcggatggaccccaacggcaaatggacggacatccccggagccactcaggccgagtaccgcattgccgccgttcaggcgaaggataacggcgctctgttccgctgcatcgtgcaggatcaggacggatgctctctgacctccgaggccgcttcgctggccgtgttcagtctgccgcccaccaccggcgactcggctcagcccgtactgtgggcgctgcttctgctggtgtgcgccgccggttggctgctgtgccgcaggaagaaggcctgatttcggacgaacggcccttcctttggaaggaaaatccgccctccgggacgaacataataggcgcagggcgttggctctgcgccttttcgcagtcattcctccaaagaaaggattcaagcattatgagactggataaatttttgaaggtatcccgcatcatcaagcggcgcacggtggccaacgaggcctgctccggcggccgcgtcagcatcaacggcaaggtagccaagcccgccgccgacgtgaaggagggggacgagctggaaattcgcttcggcaaccgggtaggcaagtataagatcctgagcgttaaggagaccgtccgcaaagaaaacgcgcaggatatgtatcaggtgctggaagaggatgcgcagaccaaagccgaacggagcgtgggcgaatgaaggcctgcgccgtgatcttgggcgggggcagcggctcccgcatgggcgcgaagcagaataaaatttttctgccgctgcggggcgtgcccgctatcgtgcgggcggcggctccctttaccggcctttgcgcggaggccgtcgtggtggcccgaccggaggaacaggacgaaatgaccgcccttctgcgccgctacgggctggattccttcgtgaagaaggtcgtgccaggcggcagcacccggcaggagtccgtccgccatgggctggacgcgctgccgaacgacacggacattgtgatgatccacgatggggctcgggcgctggtgacggaggacgtgatccggcgggcgctgcagtccgctgtggagcgtggctccggcgtggcggccattcccgtgacggacaccatcaagcgggcaggcgatgacgggcgggcgctggagaccctgaaccgggacgagctgcgggccatgcagaccccgcaggcctttcagctgccgctgcttcgccgtgcccacgaattggcggagcaggacggctttctgggcaccgacgacgctgccctgctggaacacgccggtctgcccgtctacctgacgctgggggacaaagaaaacctgaaactgaccaccccggcggacatggccttcggcgaggccattctgacccttcgccgggaaaaggaggcgctggcatgatccgcatcgggcatggcatggacgtacaccggctggtggagggccggaagctgatcctctgcggagtggaaatcccccacacgctggggctgctgggacacagcgacgcggacgtggcatctcacgctctgatggacgcgctgctgggcgcggcggcgctgggcgacatcggcaagctctttcccgatacggacgaacgctaccggggcgcggactccctcatgctgctggatcgggtgatggaggcgttgggtgaggcgggctaccgtcccgtcaacgcggacgtgaccatcgtggcgcaaaagcccaagctgcggccctatatcgaccagatgcgggtccatctggcccggcacatgggcgtggacgtatcgcaggtcagcgtgaaggccaccacctccgaaggcatgggctttgagggcgaagaaaagggcatgacggcccacgccgtgtgcctgatcgaatccatctgaatttccaatgaaatcaagtgcaaaagctgaccccatggggtcgtttggcatcacgcccatggagcgcaatcgctggatgctggcgctgggtccgtccttctgggcgggctgttttgccgcgccgcttttccagccgggcgcatggccgtgggcgctggctttggcgggcgtggggctgtttttgcttgcgcgctttggcgggcgaaagggctttgccggagccatgctgtgcgcggcggcgctggggctgctgtggacgacgccccgtctgacgcccgccgcgccttcgccgggaacgtatggggagatcaccgggttcgtttacggcgaaccaaagcagcgttcggacgaacgcctgacctttaccctgacggatattcggctggatggtgaacgcgtttcaggccgggcctactgctccctgtattacgagggagaggagccgccggagctgtacgacggagcggagctgcgctttgaggggcgagtctatcagccagacggcaaaagcggcgcgccccggttcgacttccgccaatggatgctgaaaaacggaatgcccttcggcatcaccatttccaagggcgtggaggtacgaaacaccccggagagcgcccgtccgcaggatgtggcgggccggttgcggcgcagtctgaacgctgccctgacccgggtcatgggcgaggaagcgggcgttgcctccgcgatgctctttaaccacaaggaagccatgagcgaagatgagaccgccgcctttcggacgctgggcatcgcccacatcacggcggtgtccggcctgcacgtgggcattctggcggcggcgctgctgccgctcctccgccgtttccgggcgggaagaaaagcccggtttgtgctgctggccctgttcctgttggcttatagctggctgaccggcttttccgccgccagtcttcgtgcgttggtcatgttcctgctggggcttctggcgcagggctggaatcgaaagccggagtccctgtctctgctgggcacggccatgatcgtggtgctgctgctccggccgctggacgcaaactccgccgggttcgttctctctttttccgccatgggcgcgatcctcctgctggcccccggttggcagcgctgggcggaacgccgctggccggaagcccacggacgttttcgcgggcaaaagctgcgcgcccggctgtcccatctggcccatcaggccaagcggggactgtgcgtctcgctggcggcacagttgggcgtactgctgcccacagcgctatattttcatcagctgcccctgtacggcgtagcggtcaacgtcctgctgctgccattgatcgggctgctggtgcccctctatgccgtcacgctgctttgctcgtggatccccgggctgggcactgccgtaggctttgccgccgctctgctgacgaagggctttaccggcatggtttccctgctctcccagctgccctatgcgtctgtccgtgtagcggagccgtcggccatctggctgatggctgcaccgcttctgctgatcttcctttcccctcgagtgtggctgaagccgctttcccgctgtgcggcaattttgttgactgtgctgattgccgtaggcggcacatggctgacccgtccccctgagacccgctatgttcagctgtccgtcggacaggccgacgcggcgctgctttttgacggggacaagactgtcgggatcgacatcgcttcggacggttccgccgtgatcgactatctgctggccgaagggcgcgatctggacgcactgtatctgacccacctgcatctggatcacgccggagggctaagcgaaattctggacgcgggcattcagattcgccaaatctatgtgccgtggaacgcggaggagcagcggctggacgagcgctcgctggccattctggcgctggcccgggaacgcggcattcccattacgtcccttgcgcggggcgacgagctgcgctacaataagaccgccattcaggtgaaatggcctgaccgggactgccgtcggggccagaacgccaacgatctgccgctggtgctccgcatcgatctggacggcgcgctcatcctcaacaccagcgacctgaccggctcctatgagcgctacgccgccgcgccctgcgacgtgctgaaagtggctcaccacggcagccgggattccagcggcgaagaatttcttgcttttgtcagccccaagctggccctcatcagctgcagctcgaccagccgttccctgccgggcgcggaaacgctggaacgtttggccgcgcagaacattcccgtactgcgcaccgaccagagcggcgacgtgaccctctttgtggaaaacggccggctgcaggtgcggccctatcgcttacgatccttaccgggaggcattgaatgaaccataccgcgttttttgagcaggtcaaaaagggaaacatccagcccgtctacctgatggagggcacggaggaatacatcaagcagcaggcggtgcgccagctgtgcgcgaagctgctgcccgccgggctggaggagctgaacctgaccgacctgaccgacccggaggccgacgcgctcattgccgccgccgaaacgctgcccttcatggcggacaggcgcatcgtcatcatccgggaatgcagccttctgaccgccgggaaaaaggcggaaaacgaggacaaagccgctcagatcgccgaatacgtggagcgtatcccgcccaccgcctgcgtggtgttttttgtcaagggcaaggccgacggacgcaagaagctgtacaccctgctgaaaaagaaaaacgccattgtggaattttcccccatgagcgacgcggaatgcgcggactgggcccggagaaccatggcgcggatgggcaagcagatgtctccccggacggcggacaagctggtcttcaccgtaggccgggacgcggcgctgctcaagcaggaaatggaaaagctggccgcctatctggccgaccggccagaagtgacggaagcggacatcgacgcgatctgcacccgttccaccgaatgcacggtattccagatggtggacgcgcaggtggcgggccgcaacgacgtggccttcggccttttgaaggacatggtgcgggccggggaggatcgcatcggcattctggccatgctgctgcgtcaataccgcattctgtaccacatgcgcagcctgatggacgagcgcgcaccccagcagagtcaggcttcgctgctgggcatcccgccctttgccgtcagccgcacccagcagcaggcccgccgctacgaccgggcccggctcaaggaggcctatgagagcctgctcgactacgagcagcagatcaagggcggcctgaccccgcaggagggctgcgccgaaaatgctctgctgcggctggaagccattttgcgggcataaaaacaatagaaaaaagagacgcatgggaagaaaaccctgcgcctcttttttaggttatcaaaattttcagccgcgaacagcggtcagtggtgcaaatttcgagcttgtgccgtttgaagccccttccatcggcagaatgcctttgggaaacccatgctggacgcttcgcgcctttgccggaaccttccgaatcgctgtccggccttttccctcgttttccttacagcttgccttgacggaaccgctcgatcagttcctgtgcgacgctaaaggtactggcaggggcggaaagctggccacgggacacccatttggcgtcagccagctcgctccgctgaatcttcaagggcagcgagctgtcggtctccccctgaaaggcgcacatcagcgacccgctgacgccccacggctggctgcccacataccgcaagtgatgaacgggcagtccgacctcctccatcacttcccggcggacggcctgttccagcgtttcgcccacttccacgtaacctgctaccagcccgtaatgtttccacgggctgttggcactcttcgccagcaggatagcgtcgccgcaggtcagtgccacgatgatcgccggggcgatcatgggatagttcacctgcccgcaggcggggcagcgcagggcccgttccgccccgtcgtgttccatccggccgccgcagccgccgcaaaagcgattccggcgcatccactgccacagatgatgggcggcggtcagcacagcgccggagcggcagtccatttcccgaaacagccgcatcggcccataggacaggccgtttccttgggggatggcctcgtcccccagcggatcgggcgtaaagaccgcctgtccgtccgacgtcagcagcgcgatcaggacggttccctccggcaacaggggtttgacctgccggtagaccggcagacagggaacgccctctttttcaaccaacagcacctgtcccggctgaaaacacagcaccgggctttcgtccttcggggcggcggcgcagggctgcaccgcgatcgtcacgtcctcaaacagcatcgtatctccttctttctgaacccattacaggaaccttgccgttacgctttcctgtacctgccgcacttcctccggcgtgccgacggccacgatccgtccgccttcttccccgccgccggggcccatgtcgatcaggtaatcggcgctgcggatcacgtccagatcatgctcgatgacgaccaccgtcgcgccgtggtccagcagcgcctgaaagacccgcagaagggtctgcacatccagcggatgcagaccgatggtgggctcgtcaaagatgaaaacggaatctgactgggtcttgcccatttcctcggccaatttcagccgttgagcctcgccgccggaaagactgggcgtttcttcacccagcgtcaggtagcccagccccagttccttgagtacctgcagccgttgccggatcagcttcagcccgtcgcaggcttccagcgccgtgttcacgtccatgtccatccagtccggcagggtatggtctccgtgccgcaccagctgggcttcccggctgtaacggcttccccggcattccgggcagggaatttccacatccgggaggaactgcacgtccagattgatgatccccgtgccgtcgcagaccgggcagcggagcttgccggtgttgtaggaaaaatccccggccttatacccaagcgtcttcgcgtccgccgtcctggcaaagaccttccgcagctcgtcatggacgttggcataagtggccacggtggagcgcacgttgatgccgatgggggctgcgtcgatcagcttcacctgccgaacgccctccgcctccactccggccacgtgctccggcagcttttcgccgtgaatggcggcgtttagcccgggcgcaaggctttccagcaccagcgtggtcttgccggagccggacacgcccgtcaccaccgtcagccgccccttgggcaggcggacttccagcggcttcaccgtatggatggcccgggtagacagacgaatcgtcccctgcgagaaaagctcctccaccgggcagtgcgtccgtgccacctgcgccgttcccgccagaaacggcccgatacgggacgcggaatcttcagcaagcgccgcgggcgtaccctgggcgatcacccggccgccgttggcccccgcctccggccccatctcgatcatccagtccgcctccgaaagcagctgcgtgtcatgatcgaccagcaccacggagttgccgtcggcgatcaagtcctgcatcacgccggtcaggcccgccagattggccggatgcagcccgatggagggctcgtccagcacgtatagcacgccggtggtacggttgcgcacggcgcgggccagctgcatccgctggcgctcgccggtggacagagtcgctgccgcccgatccagcgtcaggtaccccagtcccagctccagcagccgccgggccgtcaggtgaaaggagtcgcagatgctttgcgccatgggtctcatgctttccggcagggaagcgggcacatcggccacccactgattcagctggttcagcggcatttggcagacctccgccagcgtcagcccccgcatcttcggggcgcgggccttttccgacagacgggtgccgccgcattccgggcaggtctcctgtttcaggaaacgctccacccgcttcatgccgctttcgtccttcaccttggccagagcgttttccaccgtgtagacggcgctgtaataggtgaaatccagctccgccgcgtcgttggaattttttggtttatagaaaatgtgctttttcaccgccgggccgtgatagacgatctccttttcctccgccgtcagctcccggaagggcacgtccgtccgaacgcccatggcgcggcacacgtcggtcatcagcgaccacatcagcgttttccacggggcgaccgccccttcgtcgatggtcaggctgtcgtccggcaccagcgatgcgatatccaccgtgcgcaccgtgcccgtgccgtcgcaggaaggacacgcgccctgcgaattgaaggacagttcttccgcggacggggcgtaaaactttgcgccgcattccgggcagcaaagctcgtgcccggcggctacctccaaggtgggcggcagataatggccgttggggcagcggtgactggccaagcgggagaacatcagccgaaggctgttcagcagctccgttcccgtgccgaaggtgctacggatgccgggcacgccgggccgctggtgcagtgctagcgcagcggggacgtacagcacctcgtctacctgcgcctgtgcggcctgcgtcatgcgccgccgggtataggtggacagggattctagatagcgccgggagccttcggcatacagtacgcccagcgccagcgaggacttcccggagccggagaccccggcaatgcccacgatctggttcagcggtacgtctacatcgacgtttttcaaattatggacccgcgcgccgcgaatctgaatatgatcgatcatcggtttctcctatgccgttttcggcggtgatggttcggcgcttccgcgccgttccctcactatagcacaggaaagggcaaatgaaaacccgccgcgtatcgaagcggcgggacagtttccttattcgtccaaaattcgaccatcggtagaaatggtgaccacattccacggaatgaactttccgctttgctgcagcgccgtcttggcggcccgttccagtccgccgcagcagggtacctccatacgcgccacggtaacgctgcgaatgtcgttctgacggatgatctccgtcagcttgtccgcatagtccacatcgtccagcttggggcagcccaccagcacgatatgtccccgaatgaacttctgatggaaattggcgtaggcataggccgtacaatcggcggcgatcagcagcttggccccatcgaaatagggcgcattcaccggcaccagacggatctgcaccggccactgggaaagctggctgggcatctcctgcgtggcggcgggcgcgggggcgttttcccggcgaatggcccgggccatcatgccagggcagccgccgtgaacgggtttggcgtgttccagtgccttttccgcccgctccttcaggtgtttttccaccgccgcctcgtcataagcggccgcttcccgctccacaaaggtgatcgcgcccgtgggacaggcgggcaggcagttgcccagtccgtcgcagtaatcgtcccgcatcagccgggccttgccgtccaccatggcgatagcgccctcctgacaggcggacgcacacgcgccgcagccgttgcatttttcctcatcaatatggataattttgcgaatcatattcttccctcccaaaagttcggtcgcttcggggcaaggcccctgcggccccgcaaagccgattcttcgggagcgttatccccgcttgactttgcacgttcagtctactacaattcagctggattgtctgttgaattttcaacgaaaggaaaaagcccatgcgagaaattttaccgctgcttcgttccacatccctgtttacggggctgacggaagaggaaactgaatcccttctttcggcgctgcacggagaaatgcgtgcttttgaccgggaggagttactgttgcgggcaggacaacccgtccgggccttcggggtgctcttaagcggcggcgcgctggtgcggcaggaggatttctggggcaaccagaacatcctgtcctctctgcgtccgggggactgctttgccgagaccttcgcctgtctgcccggcgcggtgctgaacgtggatgtagcggccagccaaccctgcgaggcgctgtttctggaaacgcaggggcttttgaccggcggtctttccgcccatgcgggcggagcgcggtttttacagaattttctggtgaatctggcgggaaaaaatctccgtctgaacgagaagatcactcacatgggccagcgcagcacccgggcgaaggtcctttcctacttatcggcctgcgcccggcggcagggcggcgctgaatttgacattgccttttcacggcagcaattagcggactatttatcggtggatcgaagcggcttatcggcggaactttgtcatctgcgggacgaagggttattggagttccacagggagcattttcggctgataaagccgttggaggaaggatgggagtaaaggggataggggggattggcgcgccgactacggcgagggagtgggatttgacgtcccatgggtttcttgccaactttggcgtccgaaggtttccaaaggggaacgaagggaagcgggtatccagtggatacaaccgccgaaggcggttagcgacccggagttcaggcaaacaacaagcggagcgcacggcagtgcgaaccgcgccgattgtttgccccgaggaaagccctttggtgcgcccgcaggcgcatacccattgcctcgattggggcctgacgcgccgactacggcgcgaatggtggggctgccgccccgagaggggtagtactttctttcgaagcgaaagaaagtaccaaagaaagcacgcggcac

SEQ ID NO: 2347 - DNA, 16956 bp, Unknown
  16S sequences of unknown bacteria
aaaagtttttcaacttttttcaagccactcgatgtttgtcgaagttcgggttgatcttaccagctgatttgaggaggttcctttttaaggaagctctgctctcatcggcgatgtcaatctctcttgcccttcgctttacgcgacctttatattatatcatatcttcttgagtttgtcaagaggttttgaaaaagttttttaagtttttttcgaagcccttccagaagctctcgcttctgttcttgacgcgacttttatattatatcatatcttaagccgtttgtcaagtggttttcgaaaatttcttgaaattcttttttaaagctctttttgaactctgccggttcgctcgattgctttgctctctcgctcacagctttaatattataccacattcagcagcggatgtcaacccctttttcgacttttttcttgattcatcacatttgcttcatattcctatcgtttatgacgtttgaatgtacaaatgcaacagattctgataattctcgaaaaatttcgcaaaagctatttattttgaagtgtttttctgctataatatatttttgaaaggaatcgctatgaactactcatctattgtaaaacttctcaccgagcacggcatcgcctccgcgtcaaacgacgccgccgagctcatctcacatttcaacggcaaaccgccgtcctggtgcctcgcgaaccgcgaccagaaccttccaccggagataacgaaagccgccgaacgcctcgccgccggtacccctctccaatatataaccgggcgcgcgtggttcatgggagacaaatatttcgtctccccggacgtgcttattccccagcccgacacagagcatctcgccgaggcggcgctgaagcacctgaagcccggtatgcgtctccttgatctatgcaccggaagcggctgcataatcatttcggttctgaagcgtgtcatcgcgtccggaaccggagttgagctatccgcgccggctctggcagtcgcgagacgcaacgcggagatacacaagatcggctcgagacttgaactgcaggcggacgcgctcgattctgatatcgtgacaaagctcgtgtccgaagcggacgtcatcgtttcgaatccaccatatataaataccgacgtcattgataccctctccccgcaggtgcggagcgagccccgcctcgcgctcgacggcggaccggacggtatgcgcttctataaccgtttcataaccgattacacgcggcttatgaagccgggagcggtcatgctgcttgagatcggctatgaccaggcggaacgcgtcagggcactctgcgggagcgccggagtctcatgcgcgtttataaaagactattccggcatcgaccgggtcgcggtcgtcggctgaatcaaaccggcgccgcgcgaataaactatgttataaaaatctatttttggagttacagcaatatggaaaaaatcacgcttctcatcctcttcggaggcaaatcaaccgaatacgaggtatccctcatctccgcttcctctatcatcgaaaacgcggaccgcgaaaaatacgacattgtcaccgtcggaataacgaaggacggcgactggtatctctatgagggcggcacggcggcaatccgtgacggcagctggtgcaccgacatatcgaagctctcccgcgcggcgatctcgccgtccatgagcgatagggcgctcctcgtgatggatggggaaaagctcagaaagatccacgtcgacgtcgtattcccggtcatgcacggcgcgtactccgaggatggcacgcttcagggcgttttgcagatgagcggcatcccgtttgtaggctgcggctgcgagacctcggcgatctgcatggataagggaacgacgaagctcgtcctcaagaatttcggcatcccgcaggcgcactcgattatcgtaaacgccgccgccatgcgcgacaatctcgacatgataatcgcaggatgcgagaagatatccgcctacccgctctttgtaaagcccgcgaacgccggctcgtcggtcggcgcatcgaaggcgctctaccgcgacagcctcgtgaaggcgcttgaaaacgccgcgaaatacgactcgaagattatcgtcgaggagtatataaagggcaaggaatgcgaagtcgccgtgatgggcaacacgcacttcaaggtgtccacggtcggtcagatcgtcccaggcagcgagttctacgattattcgacaaagtacagctccgaaagcccggcgacctataatatccccgccgagatttccccggagagcgccgagacaataaagaagatggcgccgcgcatagccgcgatcctcggagtgaaggggctctcccgtgtcgacttcttcgtcaggaaggtcggcgcgcgcgaggaggtcatattcaacgagatcaacactctgccgggcttcaccgagatcagtatgtatccgaagctcttcatgaatgacggaatgacctacagtgagatcattgaccgtctcgtcgatctggcgctcggaaaggagctttgatttgatcggcatctttgacagcggactcggcgggctgaccgcgctcaaggaggtgcggcggctcatccccggcgaggatatagtctatttcggcgacaccggaagggtcccgtacggcagccgctcgcgggagacgataatcaaatacgcccttcaggacatgaattttctaatgtcgaaaaaggtggacgcggtcctcatagcctgcggaaccgtgagctcgaccgcgatcgacgtgatacgcgcggagtacccggaaacgccgatactcggcgtggttgacagcgccgcgcgcgaggcggtcagaataaccggaaacaagaagatcggcgtcatcgcgacggcgacgacgatcggcagtggcgcgttcagaaaaaaactgcttgaagccgaccccggcgttcaggtatacgagacggcgtgcccgctgttcgtaccgctcgtcgagaacgggttcatctcggacgacgacgaggtcgtgcggctcgtcgctgagcgctatctcgcggacataaaggcgagcggcgcggatacgctgatactcggctgcacgcattatccgataatcacgggtgtgatctcaaaggtccttcccggagtgaaaatagtgagctcatcaaaggcggcggcggaagacctcgcgaaaaagctgtcaccgtcggagaaaaagagcggaaccgtcgaatattacgtcagcgacgagccatacggcttcgagaagacagcctcgatcttcctcgagacgaagctcgacgacagtctcgtcacaagaatagatatagaaaaatactgagaaagaccggtatgccggtcagaaaggaacaagaaaaaatgtccgatacgctgcatgaactttacccgaagtttccgaagaacttcccgctcccgatgcttctcgacgcgtcgacaggcacgtcgctgatgcgcgacggtatgcccgccggcagctgcaccgagaagtgggtgctcgatcatccggacgtgctgaagagcatccagacgagctatgaggaaaacggctcggacgccctctacacgccgaccttcggcgcgaacagacctaccctcgctagggaaggctttgataacccggacgagatgaaccgtgagctcgcctcgctctctgtcggaaaagcgaagttcaccggcggcgatatgtccccgaccggtctgttcatcgagcccttcggcgacacgccgtttgacgaggtcgtcgcggtctaccgcgagcaggcaaaagtgcttgatgaagctggcgtcgactttttcattccggagacgaacataagccttcaggaggcgcgcgcggcggtgatcggcatacgagaggtgtcagacaagccgatattcgtcacgatgacggtcgacaacgagggcatgactctctctggcgacagtcttgtctcctgtctgctgtctctcgctgagctcgggataaacgcgttcggcacgaactgctcgcagggaccggacggaatgctcccgctgcttcagggtctcgcgccgtactcgcttgctctcggaataccgctgatagcgaagccgaacgccgggatgccgcacgaggagccggacgggtcgagacatttcgacctgaccgcggacgacttcgcgaagtatgttccgggctttctcgagtcgggaataccgataataggcggctgctgcggcaccgacgcggagttcataaagaagatgcgtgagtcgatggacgcgcacgcaggaaagctcgattattccggcatcgaaaaggcagacacggacaacatggcgtgcacgaaccgcgagactgtgatccctgacatagagtctctcggagacccgataccggcggacgaaaacttctttgacgaggcgtcgatggctgctggagatttcgtttacgtgagccttccggatgagatagcggctgatacattcatagagaacgcgccgatgctgacccttccctgtgtcgtgaccggtgatccgaccgcgatcgcgaaggcgaagagatactacaacggaaagctgcttgtggtcgaagaataatggattgaccagcagggctgtcagaaactgacagccctgcgtgaaaggaacggcatgagataccttggcaagaaattgtctcagcgataaaagccctgaacgacaccgagacaaaatccgcgtgtctgaagccctgcggagtgacctttgttttcacggcggagaggttatatcagaggaaactacgcagagcgatagatcgtgtgccgggatatcacgttcggatagaacagaaaagaaggcagtcacagcattgtagattctgtgactgccttttctgcgttttttactgtaatctgcccggcaagccgaatgccgtgccgcacggatcacttcttcaattgctcaaagtgataacgcggttttccgatactctttttcccgtactcgatcgccttcgcgggacaataacagatgcatgccatgcaatgtgtgcattccctgccccatacgggctttctgtccctgagactgatgttgttcatcggacagttcctcacacactgcccacagccggtgcaggcatcgctcacctgaaacgcgtccgctttgacgaaaaagcggtagaagatcggatttaccggaccactcatgaatcggtcatagagattgttccgcggcgcgtcaaataccttccccgccctgacgcgcgcgatggcgtcaacgatgtccggttccgctttctccacgatctttccggcttcgtcgacccgcggagcgtcaaacatagcgatatagttctccggcatgacaatccgagccgtgcccatataacagaggtgtttctgttccgcaagacggcgattgtactttgccgcgttaccgatctcgctgccgcagtccatcacgaaccagatacgcgccgcgccggtaagctctgttccggaaagccattcggacactatccgcggaatacgccaggcgtacgtcggtgtgacgacgatcacgtcgtttcccgtctgtatcggtgaatagtcaccagctttgattttttcgttcagatccgtgacttcatccggcagggcttccgcgagccgccatgcaatataacggctgtttccggttccggaaaaacagaaaatcataggttcacactcctccgcggctcgcgattcattcacatatccggaagatatatctgtccggttgttttatttcatactgtacttcccgcccgcgacacggtcgtaggtcagaagcctgtgcccgtcgacccattttctctggtcgtcggttatagtcttgtgaagacggatgttgtagtacggaagcgccctcgcgtaatcctcgaggtactccatatacggcgtgcgcggcgagcctatgagctcggcgactccgttcataaggttgtatgaggttatattgttgtcggtccccttgtgaagaacatcgctgtcgccgagatcgaagttcgcgtaaacgatgaacggcgtcgagtatatcttctcatacgactcctcgtcgtactccgcgccgatcatcccggactgcctgtaagccgccatattgccgccgagagtcgggagatggtcgccgaaccatacgagtatcgtgtcgcggtcgcggttgtcgatatagtccacaagacgcttcaggcacttgtccgcgtcggagactccggtcgtgaagttcgtgacggcgttcgcggtgctctcgtcgaaggcgtcgttcttcacctctatgtccggcgtctcgaacttgtccgggtacggctggtggttctccatgctgatgccgaagaggaacaccgggctgtccgagttcttatcgagatagtattctatcgcggacgcgaaggtgtcgtcggatatctgcctgccgcggatggtcagcccgagctcctccccgagcgcgtagatatcgtcgtcaaaatgcagctcgtcgataccgatcttcgggtacgccgccttgcggttatagaagctcgacgtgtacggatgcaccgccatggtcttgtacccgagtcccttatataccgagacatagctgtcggtgtcctcgagtatatactgccacggaacgcacccggacggcaggtagtcggtcgagagcccggtcagcacctcgaattccggtctgaccgttccgccgccgagcccggtcgtgaagaagcgtccggagatagtgttctcacgcgaggcgatctcgcggtaattctcgagcgggtcggcggagaatgtcgtcccggggagcagcgtcggatcccagaatgactcgctgagaacgagtatgatatccggagacgagaagttgtccgacttgtcctgttccgtgtatccgtcaagaagggcgtcgaccgcgtccttcgaataattgtcgggcttctggatgttcgacgaaaggatatttatcgtgaatgcgccgacaaagccgttcgcctgatagttagaggtctgaagcgccatgtcctcgagatacagcgcgttcttgttgagaagtctcgtgaccttttccggagtcgagactgaaaccgccatgcagacaacaacaacggcgagcgccggatatctgatgcaccacctgaccggcagctgcgcgcccgagaagaacacgatgaccgccatgacgaagacaaaaagtatcatagcgatatagagtaccggaaacggcacggtgatgaaattcttgagctcgccgagatgccccgcctgctcagcgaggtcccacggatagaagtagtcgcctgtcatcgagtatttgagatagtcggtcgtcgcgacggcgccgaagaacccgccgtatacagccgtcgcgagccatcctttcttaaggacgcagagcgcgcagaaccacagcaggtacagcaccgcgaggtcgaacagcacaacctcggtccgttcggtgaagaaagtgaagaccttcgccttgctcgcgtagtgtatatactcgaccatgccgagacagtaaacgggcaggagagcgattatcgcccagccgcatatgagaaggatgatcctgagcggcttgttttttatctccttcggcatccgcggcgccgtgtagagccacttcagccatttttttattttatccatatattctttccttttttctttggaatacactgaataaatcgggttttcgcagaaaaaagtccccggatttatgggctttttttctgcgaaaacaaccttaaatcagtgtttcctttttatagacagacgcgaacaggacgtcgtcacagctatcattctaccatacatttgacgttataatatgaacaatgttccgtttttgaaaaaaattaacaaaatccacgcaaaggaaaagaccgccggtcaatggcgcggcggtctgaggtgcgttgcttactgtttctttgtatccggaacgaagttcggcacgaagccctgtcctttcggctcggtcatgtcgcggaagaggtcgagcagctccctctcgccctttccggagactatgaacaccgactcggcgctctggagcttcatcgtgatcttcgtgtatatctcgccgcggtagttcacgagcgtcgactccgcgcggcgtatcttcccgttgtgcgggttccagaactctgggttcagctcgccgcggagaagtacatcgccctcataatccttcgccgtcgtgttcgagaagtagtacacgtcgcagttcgtctgcttcttgtggagtattccgaaaactccggtcttcagcaccgcgtcgcaggtgccagacttcttgtatagcgggcatatcaggctcagcgcgccgcactcgtcgagcgtcggcataccgatgacctcggcgtcatacgcgacgtcgaatttgccgagtatatccgcgatgagacggctctcgacatggtaggtgccgtccgccgcggtcttgtcggcggggagaaagtacgcctcgccgccgttctcgtttttgttgtagtaaacgtcctgaatgacagagcgttcgtctccggaaataccgaatataccggttatcagccggttaacctcgtcgtcggagtttttgtccggtgtgaactcgaacgccttcgtcggcagctcgacggtcgcgatgatctttccgccgctctcccagaacttctttatgagcctcaggttgtcgaggctgatcatcgacattccgggcaggatcagcacacggtatctctcgaagttatccttgttgtcgaggtagagaacgccgtcgtccgccgtcaccttctcgctcatcacctcaggatgtatgacggtgagatcgcgtccggcgtatgccattatgctgtttatcagcgtcatatagtcggtgttcgtcggagttatcgagtgctcgaagccgtccgcgtcagactcgtagagatacatctgcgagtggaccgaatatatcggataaagcatcgcgatatcgcatatatgccgcccgccgcggagcatcgcctggcatctcgtgacgaaatcgaggtattccggaagatcgttcctgaactcggggttcctgtgcgacacctcgtgcggtatccgcgcgtttccggagagccagagcgtgtgcgggacaagatagttcacaccgcgcgagaaggcgttcatcgcctcgcagtagagaacgcgcttgttcagcacctcatagtttccgtagatctcgcagaccaccgtgtcgatatcatagttattggcggcgctcatcgcgatcttgagcccgttgaagccgtacatataccagtgcacaaggtcgagcccgacggctccgccctgctttctccataagaacccgtcgccgaacagccacgagcaggaggcgtccttcggctccgcgacatgaccggtcgagatgagcccgttccgcctcgtgaaatcgccgaccgccttgaagaacccttcagcgaacatatgcgcgcggcagtccatgaacatcgccttgtagtgctcggtgtcaacgccgatgttctcccagagcgcgggataatacggcgccgggtcgaagccgtacctctcctcgaagacctcgttgaaatgtctgtcccacatccgcctgttcgggacattgtactggagatcgtcatagaacgtcattttcacgacgtcgcctatatagtcctgatacctgtcggtgaagcgcttgtaggtgaggttcacgaaatccatcgacgcgtcgtagtccatgaagttgacaaaagccgcgccgaatctgtcggcgggtcggcagacgtattcctcgatcgtccagtttccgtccggcaccgtccagacgagttttccgccgtccagaaactctctgaggtcgatgactatgcgcttgtcgtcctcgaccgcgacgatgctcataaggctgtagccgtccccggactggagagccctcgagacattctgcccctccatgcacttgtactcgaagcggctcagcatctgtgccgtcgagccgggatattcccgctgtatctcgcctccggcgcgcccgctcgggaaatcctcgtcgtcataatatatgacgctcattccgagctccttcgccttggcgagcagtgccccgtagtcctcgtaatattcgggcgtgccgaattccggctctgtgcccgcgtgcccgccctgcgctgagacagggagcggcacgataccgccgtatccgctctttttatataaagcgatattcttcgccacgtcctcggtgagcttcccgttctcggcaaagcgtccgtccatatggtagaacggcacgggtctgaactccatcggcatcgacgtgaaatcgcgtttcagttccttgtaattcctcgcgttcattacagatcaactccattcacatagcggcgtcccgccgccggatcaattatctttttcaaattactatctcagattgaaatgataccatatttataagataaagtcaatagaaaaactaaatattttcctgattttaacgttatacacaaaaacagcattcatattttatacattatgacatctatatatcactgccaaatagcatttgtcattttttctgtcggaatgtttccttaaatttatattttatattgacttttctgacaggagaatgtataatatttataatgcctgtcgcgcgtgcgctatatcgccggcgcgtcagacacagcccagtttgaaattcatggatcgcccgcaccgcgggatggtcttacacacgagaaagcgctgagttccgcaccggcgttttcctgacgaaaggagtgacaacattggtcgcactcgacaattacccggcggggctcatagaggcgatcgaccgccgcggcatctcagaggataagctgctgctcatcgcaaaatgcgacatgaacaaggaaggcacccactgcgactgctatctcgccgccacggcggacgagctcatgatcatctcaggtacgataacgctgaagggcaccgaggacaagctgaagcgcaccttcgccggtcccgccgcgagaaggcttgaggcgtcgttcaccgagctgtcctacgagtgtcatatgctctcggaccttgacgatttcgcggtggaggagcttctgtcttccggccgcctgacggctaagagcgggaagtccggcgggcgcatactgctcgcggtcttcacgaacacgtcgaagcagcagatgaatctcttctgcaagtacataaagaaggcgaaggaagggggacccttcgagctcgacaaggaggactcaaaggaggcgctgttctgcccgaaatgcggcgcgcgctaccccgacccgaaccggaagatctgcccgaggtgcatggacaagggcaagctcgtgaagcgcatgagcgtattcttcgtgaagtacaagcgtcagctgataatcgtgctgacgatgcttatacttatgagcgcgctcggcgttctgtcgccgtatgtcggctcggcattctattatgatcaggtgctcgacaagacaggctcattctatgggcagatactcctggtgctcgcgatcatactcggaatgaggatattcagcacgcttctgaatatgttcaacggaatcatcacctcgcgcatagcggcgctgataaactacgacctgaagcagacgatcttcaacgcgatccagcgcctgtcgatcagcttcttcaccggacgtcagaccggcggtctgatgacccaggtcaacaacgacgcgcagacgatatactggttcttctgcgacggcttcccgtggttcctcgtgaatgtcgttcaggttctggcgctcgttgtcataatgttcatactgaatcctctgctcgcgttcctgtcgctcatcacaatacccgcgttcgtcatcattgtgaagttcatatttgacaggctcgacaaacttcacgcgaagagatattcgagctcccgctcaatgaacggcgcgctgtcagacatactcggcggcatacgcgtcgtcaaggcgttctcgaaggagaagaacgagacaaggcgcttcaaccgctattcggagcgtctcgcgacgaacgagaagaacctgtcggatttccagaacatggcgttcccggcagcgagcttcatactctacctcggaaacataatcgtctggggagtcggcggatggatggtcataaacggcggcggaaacttcacgtacggtctgctcgcgacctttgtcgcctatatgaacatggtctatgacccgatgtatttcttcatagacatgacatactgggcggccgactgcctcaacgcctgctcgaggctctttgaggtcatggacgccgtgccggaggtcgttgagtcggagcacccggttccgatggagagagtcgacggacgcgtcacgttcaacaacgtggagttctcctacgagaagaaccgcaaggtcatcgacggcgtcagcttcgatatcgagcccggaaaggtcatcggcatcgtcggtcacaccggcgccggaaagtcgactttagcgaacctgctgatacgtctctacgacgtgtcgtcgggcgagatactgatagacggggtcaacgtgaaggacatatccttcgcggatctcaggaagaatatcgcgatagtgtcgcaggagacgtatctcttcatgggcacgatcctcgacaatatccgctacgcgagaccggacgccacactcgacgaggtcatcgaggcgtcgaagatcgcgggcgctcacgacttcataatgaagctcccggacgcctacgcgacgagaatcggcttcggctacaaggatctgtccggaggcgagagacagagagtctcaatcgcgagagcggtgctgagaaatccgcgcatactcattctcgatgaggctaccgcggcgatggacaccgagaccgagagacagatacagacagcgcttgaacgcctcgtcaagggccgcacgacgataatgatcgcgcaccgtctctcgacgcttcgcgacgccgacaagctcatcgtcatagagaacggaaagatgccggagttcggcacgcattccgagctcatcgcgaagaagggcatatacttcaacctctacaagatgcaggtcgaggcgctgaagaatatcggtatagaagaatagtgacaagatgaaagggatgacaaaatgcctgacatgacaaaacagacggataccccggcggggctctccggcatagtcaatataatctacctgaaccgtgacaactgtgagataaccgagaagaacggcttcataggtctgaaggctgtcgtcgacaagcccgacggctggacggctccggaggaaaagaaggacgagaagccgtcagacaaacccgacgaaaaggacgggaagaaagaagaaaagaagccggagaaaaaggcggtcgaggagcgtcttttagagaacggaaagctcgaaaagacagcggagcgcatattcctctcccgcgcgttcccgttcgatatgccgctcgagtacatctcggtgctcgaccgggacaagaaggagatcggcttcatccgctcgctcgacgacttcgacgagccggcgagaggtatgctgctgcacgagctcgaggcaaaatactacacgccgaagataaagaaaatatattcggtaaaggagcgctacggcttctcatactggaagaccgagtgcgagttcggtgagaagagcttcacgcttcaggacacgttcagaagcataatccgctcgcacctcgcggacggcaccgagcgggtgttcatcctcgacgtcgacggaaaccgctacgagatcgagaacgtcgaggctctcgacagacagagctacaagaagatagagctttacttatgaaaaactacgacaaggaccgctatacgtcgatcaattccgagacatgggacaaatgggcggaaaacggctgcgaatggacaatcccggtcacgcacgatgagttcctgtcggcaaaggagagcggaaaggtccgcgtgtatctgaccccgtgcgtcaccgtgccggacgagtggctcggagatctccgcgggaaacgccttctcggtctcgcgagcggcggggctcagcagatgccgctcttcgcggcggcgggcgcggtctgcaccgtgttcgacttttcggacagtcagctcgaaaaggaaaggatcatgtcggagcgcgagggctacgcgatagatatcgtgaagggcgatatgtcaaagccgcttcccttcccggacgacagctttgacatcattttccaccccgtctcgaactgctatgtgaaggacgtgagacatatctggcgcgagtgcgcgagactgcttgtcccgggcggaagactgctcgccgggttcgacaacgggctgaatttcctgttcgacgacacgctgaccgagccgctgacacttaagaaccgcctcccgttcgaccctctcgaaatggacgacaaagagttccgccgtatgcgcgacaacgccgagggaatacagttctcccattcgatggaggagcagataggcggacagctcgaggcggggctgtgtctgagggctctctatgaggaccgcgaccgtgacggagcgctgcggaactatgtcccgcagtatatggcgactctctcggtaaagcccggataacgccgctctatgaccttatgaaaggatgtgaaaatcaatgagcgaacacataaacgacctgaccggaagcgaggaagccgcgctcagacgcataaacgaccgcaaggacgccatgtggaaccgtcttcacaagaccgacgcgtcggtaaaacgtgaggacacggtcgtcattttcgactacgacctcgcgccgcgcgtcaccgggcagaacgaaaccgatcagcgcgcggacggtctctgctgcctgacgaaggactctctcatagtctacatgaacggcgagcgggtgcatgagatacctctcgcgtcggctgaggatttcaggataaccgccggggtcggaagcgtcgtctgcgagtgtactgtcgacggctccgacacactcatatgccgcagcgacgcctcgcacacctcggagcagggcgctgtcatgaaacggataaacaagtacaaggaaaccggcgagttcaggttcgactacataaacgagatcgtgcgtttctgcgagaaatgcggacgtccgctaccgcccggctcgaccgtctgcccgaggtgcgtcgacaagaagggcgtcatgaagcggctctgggacatcgcgaagccctataagtggtctctcgccgtgtctatgctgctgttcttcgtgataaccggcgtgaacctgatcacaccgtgggtcaaccggatactcgttgacgatttcatcaagtcgccgacgccggagaatgtcgttctctggcagttcgtgctcgtcatcgtctcgctcgccgcgatatatattgtgtcgagtctgctgtcggtgctccgcagcagcgtgctgatatcgacgagcaacaaggtcataataaagctccgtagcatggtcttcggaaagatacagcagatgtcgatcgcgcgtatctcaaagcgcaccgcgggagagctgatgaaccgcgtcaacagcgacacctcacagattcagtcgttcatcacgaacaccgtgccggatcttgtgcagcagtcgctgatacttgtctcggtgtcggtcatgctgttcatatatgactggcggctggcgctgatgatactgcttccggctccgttcgtgtcgctgtcgttcaggctgttctggcagttcatgcacaggctgtacaacaagtcgtggcatatcggctcgaagagcaatacaatacttcatgacatattctccggaatccgcgtcgttaaggcgttcggcatggaggcaagggaggcgaaaaggttcgacgacgcctcgaaggaggcaagggacatcaatatccgcaatgagaggctctgggcgaccgtgtggccgtggctgaacttcttcatgggtatcggtgagtttttcctgctctattacgccggaaacaagataatcggcggcgagatgacgcttggtcagatgacgcagttctccgcttatgtcgggatgatctacggaccgctgagatgggttgccaacctgccgaggcgtcttgtgcagttcatgacctcaacggcgaaggtctttgagatcatcgacgagaagatcgacgttccggacaaggagaacgccatggacataaagataaagggaacgatagatttcgagaacgtgtcgttcggatatgacgagacgaatgaggttctcaagaagatcaaccttcacgtcgagccgggcgagatgataggtatcgtcggacgttccggcgtcggaaagtcgacgctgataaatcttctgatgcggatgtatgacgttgacgagggctgtatcagggttgacggcgtcgatatacgtgatctgtcgcaggattgtctgaggtcgcagacgggcgtggtgcttcaggagacgttcctgttcgcggggactatctatgataatatcgcttacgcgaagccggacgcgagccgggatgagataatcacggcggctaagatcgcgggggcgcatgagtttatcatgaagctgccggacgcgtataatacgaaggtcggagagaaggggcataccttgtcgggcggagagaggcagagggtttcgatcgcgcgggcgctgctgcataatccgcggatattgattcttgacgaggcgacggcgtcgcttgacactgagactgagcggcagatacaggagtcgcttcagaagctgacgaaggacaggacgacgttcgcgatagcgcaccgtttgtcgacgctccgcaacgcgacgcggctgattgtgcttgacaagggcacgatcgccgagatgggcacgcacgacgagctgatgcgaaagaagggcatctactacggtctcgtgatggcgcagcgccagatgtcaaaaatgaagccgaaaacagcgtaaaaatgaacgccgaccgcgattgaacggtcggcgttgtttcttcatttaccgttgtatgaagtttacggaaggaagggggttcgggggagggaaaccgcttttc

SEQ ID NO: 2348 - DNA, 25572 bp, Unknown
  16S sequences of unknown bacteria
ggcgagcctatcccagccgctggaggcggatgggatcgtccgtctgctgtgcggctatgtgcaggaggacctgtgcggtgtctttgccgccagccggcagccagagggcggcttggtcacggatgtctttgccctgcggaacggcgcatttaccaatattaccctgcaggagggcagcgccgggacagcccgggagggcgagatcttcagcatggatatcgacgacgacggtttcgtcgagctgcccagtgtgcagtacctgcaaaagctggagaaccaggacacgcggacctattacctcgtcgactggtataatctggacgcagacggcggcaagcacacaaagctgacgacgtattacaacgtggagggcggctggtacctgaagctgccgccggcttggcggggcaaggtcctggtccactacggcgaggacgagagcggctacacgggctatggcttttatctctacgccgcagcgccggagcagacccagtgggcggcgacgatctatcaatttacggggccggacgcccagactcgcgccaatgaggatgggcgctttctgctggcagcccagggagacgtggcctttgccgcggccctgtcggacgacgcggggctgacagaggcggagcttgggcggctgttctgcctagtgcatctgcactggaacgccgcctaggcgaaattcccgccgctttcaaaaaagggggacaaccatgaaaaaggttttgatactggaagatgaagtgaatatccggagctttgtggtcatcaatctgcagcgcgccggttacgatacgatcgaggccggaacgggggcagaggcgctggagcagctgcggcagaacccggatatcggcgtggcgatcctggatatcatgctgccggatatcgacggcttcgaggtctgccgtaatatccgggcgacgaataagcagatcggcattattatgctaacggcccgcacccaggagatggacaaggtcacgggcctgatgaccggcgcggacgactatgtcacaaagccgttctccccggcggagctgacggcccgtatcgacgcactgtaccgccgcctcggcggcgacggcgcggcctcaccggagtttttgacctacggccccttccggctcaacacccggaaccggaccctggaaaaaaacaccgtgcgcatccgcctgacccaggtggagtacggtattatgaagctctttatgcaaaaccccggccgcgccctctcccgggaggaaatcctggccagcgtctgggggcgggattacaacggtgaattgaagatcgtggatgtcaatatccgccgcctgcggatcaaaattgaggatgatacctccaaccccgtctatatcacgacggattggggctacggctataaatggggtgcttgaggcagatggccggaaaaacgaagcgtcagaagcgaaaaaagctcggcggcattcagcgccgctggctggtgaatatcatcagctgggttgtgctgctggtcgtcgtctgcgtgtttgcgggggcgctggccattgcatcgtactattactccaatatgcgctacagcatggaggccaaggcccgggccacggcggattttttccgcggctacagcaatctgagttataatgaatactatgagacctgcgtgacctttacccagtcgtttgaggacaaaaacttcatggagctgcagtttattaaccctgacggctccgttgtcgtctcgtcctacggtcagtggtccggccagcagccaggcacgccggatatcaccgaggcggtgaaacgacagaagctttcctatttttccgggcggaacccccggacgggggagcgcattatggccgtctccacgccggtgcggtatattgacggcgaggtcatcggcgtgctgcgttatgtgacgagcctgcgggtggcggaccggcagatcctctgggtggtggtgctggctgtcctcatcggggcggtgtttatcacgctgattttgctgagcaacaaattcttcatccgctctatcctggacccggtgctggatatcacggcgacggccaagcgcatcgctgccgggagctacggtgtccagattcaaaagaaatatgacgacgagatcggcgagctggcggagacgatcaacgatatgtccaacaagatcagccagaacgggcagatgcagtcggaattcgtctcctctgtctcccacgaactgcggaccccgctgaccgccatcgccggttggggcgagacgcttctgtccgccgagcatatggacccggtggagacccgccgcgggatgctcatcatcctccgggagacgaagcggctgacccagctggtggaggagctgctggatttcacccgcattcaggatggccgctttaccctcaatgtccagatgagcgatattttggcggagtttgaggatacggtctttatgtacggcagcaggctccgccaggagggcatcgagctgcgctatattgagacgacggacgagattcccgagatcccctgcgacgcggcgcggctgcggcaggtgtttttgaacattcttgataacgctgccaagcacggcggcgaggggaagaagattactgcgtccatgcagctggaggatggcgccatcgtcgtccgcatccgggactttggccccggcattccggaggacgagctgccgcatgtcaaaatgaaattctataagggcagctccaaggcccggggcagcggcatcggcctcgctgtgtgcgacgagatcgtgacgatgcatggcggcaccctggagctgggaaacgccaccggcggcggtacgctggtgacgatccgcctgccggtggagcagccgtgaggggcggttatcagaaaggttgactatggagaaaaaacaaaccccggtacaagaaaaatttaaaaccatgatcggcgggcaggccctgatcgagggcattttgatgcgcgggccggaaaagcaggccattgtcgtccgcagccaggatggactggtggaaaaggtcgagccgctgcgggccaatcgtaagcgctgcccggtctggggctggccgctgatccgcggtgtcgtcaattttggcgggtcgatgtacagcggcgtcaaggcgctgatgttctccgccgattattaccaaggcgatgaggacctgtccgatgagccgacgaaatttgagcgctggatcgagaagcactttgggacgaaagccatggggcagtttatcctggtgctggctgtcgtgctgggcatcgggttttctatcggcctgttcttcctgctgccgatgctgctttcggaatttgccctggcgtggatcggcagtgattttgtgcgcaatctgatcgagggcgtcgtccgggtggcgattttcctcgggtatatgatcgccgtctcccggctgaaggatatgaagcgggtcttctcctaccatggcgcggagcacaagaccatccgctgctacgaggcaaagctcccgctgacggtggaaaacgtccggcccatgacgcggctgcacccgcgctgcgggacaagctttttgttcgtcgtgatgattgtgtcgatcctggtgttttctgtgttttcctcgatcttccatattaaggcgaagctgctgaaggtgctggtgaagcttttgctgctgccggtggtcgtctccatcagctatgaatttaaccgctttgtcggccggcatgacaatgctgtgacaagggcgctgtcctaccccggtatggcactgcagaattttacaacgaatgaacccgacgattccatgatcgaggttgccatccgggcgctggagctggtattgccggaacgggagggcgatgaccgatggtagagcaccgctatagcgatcttttcctcaccgcccgggaggccctgcgcccgacccagggcgaaaacgccgccaactgcgcccgggagctgctggctgctgcggcggggaagacgacggcggagatcatcgccagccgggatatttacgccccggcggatgtcgccgaagcgctgtcgggtatgctggcccggatgcagcgcgatgagccgctggcctatgtcctgggcgagtgggactttgccgggatgaccctggaggttacgccggaggtcctcatcccccgggatgacacgatggcggtgacggagctggccctggcctgcgccgggcagctgccggatcatccccgcattttggacttgtgcgcaggctccggctgtattggcctggccatcgcccagcgcatcccggatgcccatgtgatcctgggggatgtctcccccggcgcactgcgggtggccaggaagaatattggaaagcaaaagctgcaaagccgcgtcacggccatggcgctggatgccacccggcccgcgatgcgttttatcgggaaatttcatttgatcgtttccaatccgccttatatccccagcggccagctcccaacgttggaccgctccgtgcgggattacgagccccagctggcgctggacggcggcgccgatgggctggcgttttaccgcagcatcgtcgcctgctatacccatgcgctggagccgagcggcagcctgtgcttggaatttggcctggggcaggaggcggacgtcgccaaaatcttagaagaaggcggctatgaaattacacagtggaagcgcgacgcttccggcattatgcgcgcggtcctggcgtgcaagaaagaaaagggagagtaactatggcaaaagcaaaatcaccgtatgaagcaccggctcccgccagcgataagaaaaaggccctggagacagccctgcagcagatcgaaaagaatttcggcaagggcagtgtcatgcgcctgggggatacgccctctatgaatgtcgaggccatcccgacgggctccctggccctggacctggcgctaggcatcggcggtgtgccccggggcagaatcattgaaatctacggccctgagtcctccggtaagacgaccctggcgctgcatatcctggcccaggcccagaagcggggcggcgaggtcgcctttgtcgacgcggagcacgcgctggacccggtctatgccaaggccatcggcgtggatatcgactccatgctggtctcccagccggacaccggcgagcaggcactggagatcaccgatgccctggtgcgctccggcgcgctggacgccgtcgtcgtcgactctgtcgcggcgctgacgccccgggcggagatcgagggcgaaatgggcgatgcctttgtcggcctgcaggcccggctgatgagccaggcgctgcggaagctggcgggctccatcgccaagacgaactgcgtcgttatttttatcaaccagctgcgaatgaagatcggcgtcctttacggcaaccccgagacgacgacgggcggcaatgcgctgaaattctattcctccgtgcggatggacgtacgccggatcgaggccatcaagaatggcacccagctcatcggcaaccgcactcgggttaaggttatcaagaataaagtcgcgcctccgttcaaagaggcggtgtttgatatcatgtacggcgagggcatctcccgctatggcgagatggtcgatctgggcgtgcagctggacctcattcacaaggctggcagctggttctccatcgacggcgagcgcatcggccagggccgggacaatgcccgccaattcctgatggacaaccccaatcttgccgacgagctggaggagaagattcgggcgcagatgttccatctcaacggccgggcggcgccgaacgcgtctgccgcgcctgctgcatccccggcggagccggcggggtttgcggccccggagcggcctatgccccagggcgtgagtatcaccgccgatgattttaacgatgaggattgaaaaaatcacccagagcaagcagccgcaggtcgtctttctctgctttgacgatgagacgaagctgcgggtccgggcgtccgtggtgatggactacggcctttaccccggcatggagctggacgaagcgcagttggcggatttgaccgccggggcaaagaaggcctcggcccgggcccgggctgtgcggatgatctccgccgccgcgacgacggaggcggccctggagcgcaagcttgtgcaaaagggcgaggccgctgctgatgcccgccaggccgtgcagtggctgaaggacttacatttgctggatgatgcgcaggtggcccggcagctggctgaggctgccgctcgcaaaggctatggccctgcgcggctccggcagatcttatatgaaaaacaggtgccccggcagtattgggatgaggcgctggcgctgctgccggatatgtccggtgcgctggacgcgttcctgcaaaagcgctttgccggctgccagccggaccgcaaggaacgcgaccgggccgtccaggcgctgctgcgccgtggccaccggtgggacgatgtccgggcggcactggaccgctattgcgcgtcctgcggggaacaactggaggaaaacgaagactatgagctataaagttggctttatctccctgggctgtgccaaaaaccaggtggattgcgagcagatgatgttccggatgcaggaggcaggctttgccgtcctgccggaggtggacggcgcagacctcgtcgtcatcaatacctgcgggtttatcgatgcggcaaagagcgaggccattgaccatatcctggccatgggcaagctgaagcaggcagggcggattggcaaaattttagtcaccggctgcttggcgcagcgctatcaggatgaaattctaaaagagatgccggaggtggacggtgttctgggtacgggcagctattttgatgttgtcccggcggcgctggagctgctggaacggcccggcaccgtgcatcactacggcgatatcgacgcggccatgccggaatgcggccgcattttgacgacgcctgcccactatgcctatctcaagatcgccgagggctgcagcaaccgctgcgcctactgcgtcatcccccagctgcggggcaaataccgcagccgccagatggcggatgtgctgcaggaggcggagaatctggcgcagcagggcgtccgggagctgatcatcgtggcccaggatacgacgctttacggtgtcgatctgccgccgcaccggaagctgctgccggagctgctcacaaagctctgcaccatcgacggcatccactgggtgcgggtgcattacatgtaccccgaggtcatgacggacgagctcatcgagacctttgcccgggagaagaagctgacgccctattttgatatccccatccagcatgtcaacgacgatattctgaaggcgatgaaccgccggggaacgaagacgtatctgcaggcgttgtttgacaagatccgcagccgggtgccggactgcgttatccggacgagcctgatcgcgggcctgcccggcgagggcgaggcggaattcttagagctgtgcgacttcttgaagcgcaaccgcctagagcgggtcggcgcgtttgtctactccccggaggaggggacgcctgcggcagaaatgccccgccccgacgaggagacggccaaaacccgggcccagtacattgagcggctgcagtcccgtattatggacgaatggtgccaggagaaggttggcgcgtccattgaggtcctctgtgagggctttgatgacgagagcggcctgtattacggccggtcccagtgggattcgccggatatcgacagccgcgtctggtttacgggccgcaattttgtgcccggagaatttgtccaggtcgccgtgacggcggtccgggacggagaattgcagggcgcagcctgccaggaggaataatatgacgacagcgacaaaaattactttggtgcggatcgttttgatcccggtgtttatggtgctgctctattgcagcgccgatcagttcagtctgacctatgcggcgctggcggtctttatcattgccagtctgtccgactttgccgatggcaagatcgctagaaaatataaccaggtctcggacctgggaaaattcctggacccgctggccgataagctgctggtgctgtctgccatgtgcatcttctgccagtggggcatgttccccgcctgggcgctgatgatcgtgctggcgcgggagtttgccgtgacgggcctgcgactcatcgcggtggacaatggccgcgtcatcgcggcggcctggtccggcaagatcaagacggcctgcacgatggtcggcctctgccttgtcctggcctttggccgggggtacgattggagcgctaccctgaacctcgtggtcatgctcgtgatcgtggcgacgacgctgtactccggggcggagtattttataaaaaatgcggacgtcctgcgcgctgagcggcgtgtctgacccccgcttccattagaatttcctgctgcaaaaggagcgtttttatgtatctttataactccctctcccataaaaaggaagaatttatcccgaaccacccggatatcgtcaaaatgtatacctgcgggccgacggtctatcattttgcccacatcggcaacctgcgcagctatattatggaggacgtgctggagaaagccctgcgctatgagggctatccggtcaagcgggtcatgaatatcaccgacgtcggccatctggcgtcggacgccgataccggcgaggataaaatgctcaagggcgcccgccgggagcataaatccgtcatggagatcgcgaaattctataccaacgccttctttgccgactgtgagaagctgcgcatcaagcggcctgacgtcgtcgaaccggcgaccaattgcatcggcgagtatatcaagatcgtcgaaagcctgctggaaaagggctatgcctatcaggcggggggcaatgtctactttgatacgtcgaagcttgcccaatattatgtgtttcacgaccataaggaggaggacctggccgtcggcgtccgcgagggcgtcgaggaggatacgcacaagcgcaataagaacgacttcgtcctctggtttaccaagtccaaatttgaggaccaggcgctgaaatgggattccccctggggcgtcggctatcccggctggcatatcgagtgcaccggtatctgcatcaagcatctgggggaggacctggatatccactgcggcggcatcgacaacgccttcccgcatcatacgaacgagatcgctcagtctgagagctatctggggcacaagtggtgcaactactggttccatgtgctgcatctgaacacgaacgacgggaagatgtccaagtccaagggcgaatttttgacggtctccctgctggagtccaagggctatgacccgctggcctaccggttcttctgcctgcagagccattaccgccggaacttggtattctcctacgaaaatctggacaacgccgccgggaccttccagaagctcatcgccaagatcgcggcgctgcagccgtcgggcggcgaggcggtcgacgaggcggccctggccgccctgcaggccaaattccgcaaggcgttggacaatgacctcaatacctcccttgccatcacggcgatctacgacgccctcaaggccaagacgggcgctgccacgaagctggccgccatcggcgactttgaccgggtcctgagcctggacctgctggccaaggccgacgcagtgcgcaaggcccaggccacccaggtcaaggcggtgggtgagttcctcatcgacggcgagggcgacccgaccattgacgcgctggtcaagcgccgcatcgatgcgaaaaaggccaaggactttgccctggccgatcagctgcgcgacgagctcaaggcccagggcattgccgtcacggacctgcccaacggggcaaagtggcgccggatctgagggcgaaaggagcagcggcgatgaaactgatgatcctcgatggcaacagcgtcatcaaccgggcgttttacggcatccgccccctgacgacccgggacgggctgccgacgaatgcgatttttggctttctgaatatcctgcaccgggtcgaggcagaggagtcgccggatgcgctctgtgtcgcctttgacctcaaagccccgacgtttcgccataagcagtacgatggttacaaggccacccggcacgcgatgccggaggagctggcccagcagatgccagtcatgaaagaagttctgcaggcgctgcgtatcccgatcttcgagtgcgagggctgggaggcggacgatgtcatcggcaccgttgcccgtgtctgcaccgaggcggcgtgggactgcgttatcgtcaccggcgaccgcgacagcctgcagctggtgggcgaccgggtcacggtcaagctcgttatcaccaagagcgggcagacgacttcgacgaattacacgccgcagctgttccaggcggagtatggctttgcgccgccgatcttagtcgatctcaaggcgctgatgggcgatcactcggataatatccccggcgtcgccggggtcgggccaaaatcggccacggagctgctgctgcgcttcggcacgctggcaggtatttacgaaaatttacaagacgacaccatccgccccaagctgcgggaaaagctggaggccgggcgggaaatggcgtttttgtcctacgagctggcgacgatccggacagatgcgcccatcgtgtttgtcccggaagcttgccgctgccaggaaccggaccgggcggcgctttgtgaattgtttgcacggctggaatttgtcaagctgatggcccggtacgacctgcacccgccggtcgacgcggcagcgcctgcaccggtcctgacagagctcacctcgctgccgtcgccgggagcgccctgcgccatggcgtggagcgacgatctttcccaggccgctgtcgcgacagcggcgggtgtttgctgcgtagacgccgcggaaaaccgggatgcgctgcaggcgcttttgcaggccgcgacgcccaaatactgccacgactgcaaaacgttgctgcaccgtctgctggacgcgggctatgcgcccgatggctttgcctttgatacggccttggccgcctatctgctggacccggcgggcagcgattacagcttgcccaggcttgcggcccaatacctggctgcgccgctggacggcgagagcctggcgcagcaggcggcggcgatctggcatctgcaggccccgctgcgggtgcagcttgcagaccaggggatgctggacctgcttttgcagctggagctgcccctgtgccgggtcctggcgcagatggagcgggtcggcgtcgcggtggacgaggcggcgctggtggccttcgggcagatgctccagggcgagatcgatcgcagcagcggcgaggtataccgctacgccggggaggaatttaacatcaactcccccaaaaagctggggcaaattctatttgagcagctggagctgccccatgggaaaaagacgaagaccggctactcgaccaacgcggaagtgctggaaaagctgaagggcaagcaccctattgtcgcggaaatcctccgctatcggatgctgacgaagctgaaatcgacgtatgccgatggcctgctgaaggtcatcgcctcggatgggcgcattcatacgacgttccagaataccgtcaccgccacaggacgcctgtcgtcgacggacccaaatctgcagaatatccccgtccgcacggagctggggagcgagctgcggcggatgttcgtcgcccagccgggttgggtcctggtggatgcggactacagccagatcgagctgcgggtcctggcccatgtggcggatgataaaaatatgcaggcagcgtttttgtccggggaggatttccacaccgtgacggcggcccaggtgtttggcgtcccagtggaggaggtcacgccggagatgcgccgcagcgcgaaggctgtaaattttggcattgtctacggtatctccgattgggcgctggcggaggatctgggcgtcagcgtcgctgaggccaaggcgtatatcgaagggtacctggcccgctttgcgggcgtccgggcataccgggagaatatcgttgccgagggccgggagaagggctatgtgacgaccctgctgggccgccgccgcccgctgccggagctgcacagcaagaattttaacatccgcaccggggccgagcgcatggctttgaatacgcccatccagggcgcggcggcggatattatcaaggtggcgatgctccgggtggacggggcactgcgccgacagtcgctgcaggcgcggcttgtgctgcagatccacgacgaactcatcgtcgagtgcccgccctgggaggcggagctggtcatgcagatcgtgacggaggagatggcccgggctatggagctggccgtccccctcaaggccgaggccaagatgggcgcgacgtggtatgaggcaaaataaatggagatcacgcagatgacccgcgcccacgtggcgcagatcgcggcgctggaggggcaatgctttgcagacccgtggagtgagcgctctgtcgcgtcggagctggaaaatcccctgagcctgtggctcgtggcgctggaggatgggacagtcgccggttatgtcggcagccagagcgtcctgggtgaggcggatatgatgaacctggctgttgccccggcgtatcgccgccggggggtcgcccgggcgctgctggcggcattggagcaggcgctggacgctcggcaggtcggcagcctgtgcctggaggtgcgggcgggcaatgcgcctgccattgccctctatacggcctgcggctaccggcaggtcggcctgcggcctggctactaccggcacccccgggaggatgccttgatcttaaagaaacaatggaggcgcagcaatgaatattctggcgattgaatcctcctgcgatgagaccgccgtcgccgtcgtccgcgacgggcggacggtcctggcagactgtattgcctcgcaggtggcactgcataagatttacggcggcgtcgtgccggagatcgcgtcccggaagcatatcgaggccatctccgctctggcagacgaggctattgccaaggcggacgtggcaaaaacggcgctggacgccgtcgcggtgacctacgccccgggcctcatcggcgcggtgctggtgggggtgaactttgccaagggcgcggcgctggcactggaccggccgctgattccggtgcatcatatccgggggcatattgcggccaattatctggcgtttccggagctggagccgccgtttttgtgcctcgtcgtctctggcgggcatacgatgctggtggatgtgcaggattatacgaagatgaaaattctgggcggcacccgggatgacgccgcgggcgagtgcttcgacaaggtcgcccgggtcctgggaatgccctatcccggcggcgcgcagttggatgccaagagcaagcagggcgatgaaaatcgctaccccatgccccgcatccggctggaggggaacccctatgatatgtccttctccggcttgaagacggcggccatcaaccagctgcatcatctggatcagctgggcgagccggtggatattcccggcatgtgcgccagcttcagcaaggcggtttcggatatgctggtgccgcggacaatgcgggcgttggcagagacggggcacaaaaagctggccatcgccggcggcgtggcggccaattcccgtatccgggagacctttgacgcggagacggcccgggttggggtccagatgtacgtcccgccgctgcagctgtgcggcgataacgccgccatgatcggcgcccagggctattacgaatatttggccggaaacctggccgaccagactctcaatgcctacgcaacaaagtccatggagggtgagcggctctaacgcgccggatcatcatttttgccaagcccaaaaaaggacctgctgcatgattgcagcaggtcctttttgcttttcgttggatggaggcttattcgccgtcggccggtgcggcttcgtcggatgcgcaggtgcagggcgcgtcgcagcaggcggtgtcttctgcaggtgcttctgcgggggcctctgcagctgcttctgcggcttcggcttccggcgtctcggcggcctcgtcgggataggcgacgtcgaccgggacgatcacatagtcatccccggcgtccttcgcagcgtcgatctcggcgcgcagggcttcgatcgtcttgcgggaagcggtaatcttatcacaccaggggaggtattcggcctcgtccggctcctcttccatgataaaatccttgtaatagagcttgcccagctccgtgtgggcttttttaatcttgtcttcctcggcgagaatggccaagttggcctttgtaacggaaatcagctgccgcgtcttcttggcggccgactgcgcaacaaccgcagccgtgctcttgatggtgtcaaaattatctttccatgccatagtgattgcccctttcgcttgcggtgtaagtttgcttttgcgccgggtgtggcgctttcttagtttcattatagcacgctttcccggtgcgggaaagcgaaaatggtgaattttctgtaaaatattccgatgagaggcggcgtggtgcttaaaatgtctgcctcaagcctcactctggtctgcctgggcctccggcttttgccggttgacgaacagctgcgatgcatcatgcttgcggaagaaggtctggacaatgaaaagggccgttgccccgacgaaggtcaccgccgccagcaactggctgacgcggatgcttgtcccggggagatacaagctgtctgtccgcagaccctcgatgaacatccggccaaagccgtaccaagccacgtacatcgtggcaatctgcccatcatatttacgccgcttggaataaaaatgcagcaggacaaagcccagcaggttccagcaggattcatacaaaaaggtcgggtgatagtaagcaacgtgacccgccgcgtcggtcaggcccatgcgcaggaagctgtcggtctcgtagccgtgggcttctcggttgaagaagttgccccagcggcccatggcctggccgatgagaaagccgaggctggtgatgtccaggatcgtccccaccggcagcttccgcacgcggctgaagaccaggatgccgatggctgcgccgatgatcccgccgtaaatggcaaggccgccgtcccagatgtacaggcaagagatggggttatctcggtagaggtcccagtagaaaatacagtagtaggcccgggtgcagacgatggcgaagggcgtcacccacagaacgccgtccagcaggtcgtcctgccgcagaccgaaggccttgcagcggcgcagggcgtagagcaccgccagcagaaagccgatggcgatgatgatgccgtacaagtaaatgggcttttgccccaggtaaaaggcgatccggggcgggtcgacggagatccctaagccggggaaggtaatgggagagagaatcatacgccgccctccgtctccttgggcaggatgacagacagcgctgcccgctcgggctgcacggcgtcgcggaggaagtctgccacgtcctgcagctggatcgatgcgtaaatgccggggaagctgaaatagtcgcagccttcaaaatgataggcgcaggtccggtagcagatggattcgaagctgtccaggtcccgcaaacggcggcccagggcggattttttcagccggtcgaattctgcctggtccagcccctggcggagcaggcggtctgcttcgtccagcagggcttggcggacggcgtccggatcccggctgtcgccgtcggcatttaagaaggccgcgccccgcaggctctcgtagccgatggaaaagtcggcgtcgatgagcccggcgtcatagagcttgccataaagggcggagccttctccagccagcatctcggcggccagctccccggcaatctccgcccggaaggcgtcgatgccgcgggctgagggccgggccttgaacccggcgctgaaggcgggcatggcaatctccatgcgacgtgacagcttagaatggacgggggtcagcgcttcgggcgcgccgtagtccttctgggggacggggcgggtatgctgcggcataagcgcggcggcaaggtcgcagatgcgctggggtgagacatcgcccacgacgcagagcatcaggttggccgggtcgtaaaacgacgcgtggcagcggtagagcagctctggtgtgatggcttggatgctctccaccgtcccggcgatggggacacgtagcgggtgatgggcatacatggcctgggccagctgctcaaagcaggcggacccggcactgtcctcatacatgcggatctcctgggcgatgatgctgcgttctttttcaacgctctcctgggtgaagtacggggttgtgacgaaatgcagcaaaagccgcaggttttcctcgaaacggtcggtgcagtcgaagtagtacgccgtcatggcgtagctggtgaaggcgttggggctggcaccggtggcagcaaattgctgcatggcgttgccctcgggcaggtcgaacattttgtgttccagataatgcgccacgccagccggggcctggacgagctcgtctccgtcgcggaaggtcatgtcgacagagccgtagttggcggccaggaaggcgtaggttttcgcaaagccccgtttggggatcacgcggatctccagcccgcagggcagcgtatgggcgtagaccgcttcgcccagcagcggatattctgtcttattcatgcctcggccccctttaagaaatagaccgtatcgagcacgatgcggtttgctgcgtcaatcacctgctgcagtgtgacgcgctccagcagcgcaatccggtcctcgatcgttgcctctgagcggcagatggcttggcccagatagaagtcgtcaatgcggcccggggcatccagactggcgcgccaggcagagcgcaggtagcgacgggcggtctccaattcgtcccaggtgatctggccttgcttgcaggcgtccagctgctgcaggatcgcatcccgcgcggcgccgaattggctaaagtcgatgccggaggagatgagcatgatgcccttgcagcgctccaggctggacgaggcgtagtagcaaagccccagctcctcccgcacatgcaaaaacagcttgctgttgatgccgctgccgaagatgacattgagcagctgcagggcgacgaaggcgggctcatcggccccatcacaatttgtccgcaggccgatgcacagcttgccctgggtgacgtccagctgctcggtgatggtccggggtgtgggcgtgccgggcatgggccggtagctgacgggctggacctgccgcttgggcaacggggatagcgcctgggtcatttgctctgcgacagcctccggtgtttgccgccccatgtagaagagctccaccggggcgctgcgcagcagcgtctcatagtgcgcttgcagggcctggggcgtcacggcctgggccgtctccagatcgcccaggcgggggatgccatagggctcgtccgcgcacatagctgccagcagctgccagactgcgtagctgcgcttgtcattgatccgggcggcgatggcgttgcagaggttctgccgctccccctcgacaaaggcgggcaggaattgcccgtccgctgtccggcagggggcaaagagcagctccgccaggaagtccgtcatggcggagaacaccggcatggcgtccggcgtgaattggtcttcgataaaatcggcgtagaatccgctcgtgacgatatcgcctcgcttgcgtaccagggtgccgaagctggcgccgtagcagtcgtcaagatgggcggagatatcccggattgtcgggtaatgctgggtgccgcgcagcagtacgctgggcagcagcgcattgactggcgccagctgcttcgtcagcggctggagaaaattgacgctgaagcaagccgttttaaatttctctgcctggattgcgcgcagatacacgccgggcaggagctcaatcctttccatggggtatgtccttctttcgctatcaaaatctgacaatttcctctattatacaccaacctggggaaaagaaaaaggggcaattcaaaagaatcccttgttatttcccgccgtgtccggtaaaatagaagaaaaactgacgcaggaggcagacgcagatgcaatggctggaattgacggtccataccaccacagcggcgatcgacctgttggccgcggagctgacagtgctggggtatgacagctttattatagacgaccaggcggattttcataagtttttggaggagaaccgccagtattgggactatgtcgatgcggaattggaggagcggatgcggggcctttcccagattcgcctctatttggaggagaatgccggggtgatggatgaggtcgcggcactgcggctggcgctggcgcactggcgcacgcgctgccccgtcgacccgggcacgctggagatcacctgcacggccatgcagaatgaggactgggagaacaactggaagcagtattaccagcccatcgccatcggtgcgcggctgctggtcgtgccccaatggctgacgccggagaacccggaacaccgcgtcgaggtccggctggacccgggtatgatcttcggcaccggggcccacgcctcgacgcagatgtgcatgcaggcgctggagcaggcggtgcacggcggcgagcgggtcatcgacttgggcagtggcagcggcatcctctccatcacggcgctgctgctgggggcagccagcgccaccggcgtcgatatcgacccgaaggcggaggacatcgcccgggccaacgccgccatgaatgggctgacggacgagaaattccaggccgtcaccgccgacgtgctggcggaccgggggcagatggacgccctcagcgccggggggtatgagatcgttctggccaatatcgtggcggatgtcattatcccgctctcggccgtcgtcccgcagtttttgcgtccgggcgggctgttcctctgctctggtatcctggaccggcggctggacgaagtgcaggcggccattggcgccgcagggctggagatcctgcaggtccggacgatggaagactggtgccagatcacagcgcgcaaagtgtgagtgggacgtgcgcggatttgccccctgcacggctcgtttgccgcgcggggggatttttgacggatcgagtttaccgtaatttttgaaaacgtaacgacgcagatgctggttatgcacatgttccacagagttatacacaaagactgccggaattatcccggtttttcctcaaaaatccttgaaaaaaatacaagaaatttatattctccccctgctgaggcgttgcagaaggtgacataatgcatttttcgccctgcgcggggtgcagagcacaaaaaaatgccgtttaccggggaaactggcgaaacaggtttctttttgcacaggggtgtgttataatagcaagccgcaacccatatggaaagaagatgtagtatgccaaagacaaaaatgcaggagtttctccggggcatgaagacgggcattcccgtcagcctgggatacctggccgtgtcgtttaccctgggtatcacagcaaagcgcgcagggctgacggcactgcaggcggcgtgtacaagcctgctcgtcaatgcttcggcgggggagtacgcggcgtttacgctgattgccgcccaggccagctatttggagctcgccatcatggagctggtggccaacgcacggtatttgctgatgtcctgcgccctgagccagaagctggaccataagacgggcctggggcaccggatggccatcggctttgctgtcacagatgagctgttcggcctgtcgattttggagccagagaagctgaaccccatgttttattacgggatgatggcctgtgtgatgcccggttgggcattggggacgtttttgggcgttgtcatgggcagcgtgctgcctgccagcgtcgtcagcgccctgagtgtcgggctgtacgggatgttcctggcggtcattattccccagagcaggaagagccggacgatcttaattgtcgtcgtgctgtccatggcggcgagcctgggctttgacctgctgccgagcctggcggccatctccagcggcacgaagacgatcatcctgaccctggtcattgcctcgggcgctgcaatcctggcgccggtggccccgtcgccggaatggggggaggggccggatgaagcataatatttatctctatatcctggtcatcaccgtcgtgacgtacctcatccgcgtcctgccgctgacgctgatccggcgggagatccgcaaccggtttttgcggtcgtttttgtactatgtgccgtatgtgacgctggcggtcatgaccttcccggccatgatttacgcgacggatcatctttggtccggcatcggtgcgcttgttgtgggtgtgctcgtcgcctggtgcagcgggaatctctttctggttgcctccagcgcctgcgcggtggtttttctgttggaattatttttgtaatagcagcgaaaacggacgaagtatgtgcttcgtccgtttttgctatattttctgcagcagcaagagcagaccgtagagaaggggctggtggagaagatagatcgccagactgtggcggccgcagagacagaaaaagcgtaccggggcagcggtttgccagcacactggaagccgcgtccggggcgtggggttcagcgcccggcccaggcacatgcccaggccataccagccgaggttcggcaggagcgggaaccagtcgacactggcaaacgacggggctgccagccccagggggaagagatagggggcgcggacggggatctgattgcaccaatagcctgccgccagcaggcagagggcgcacagggccagggcccggctggggagccggtcaagcagtggcgtcagcagcatggctgtgcccagcaggtgcaaaatgccgaagggaataaacatctgcggcgcggccaggtccagggcgcacaaaagccccgttaccagtgtgatgagcatcccgccgccgaggacgataagcccccgccgcaccggatgatgccccagcgtgctgcacaggccggacagggcaataaaaatgagccccccgccgatgcgcacggcctggaacagccaggaggccggcgctggcaaaacccccatccaaccggcgttgatgcaaaaatggacggacaccatgccgcagatgcacaggccccgcagggcgtccagctcccaaatgcgttgcttttccataccatctttccccatcacggattcagaatgcgcgccgggagggggcgggcgatccgcatggctccctgggggcaaaattcctggcagcagaagcagcggatgcaggcgctgcggttgatgaccggcttgccgctccgcagcgtgatggcccgggccgggcagatgcgggcacactggccgcagccggtgcagcgcccggtgtgcagcttcggctttgccgtcaggcagcgggccgcgacggtgccgaaggcgttgccccagcggccgcggagcgtatcgcgaaacagcaggctcgccgggatcggggcgacctggaaatccttctgctggaaggcgtcggggttgccaaagaaggtcaggtcctggagcgacgacgggatcaggccccgctggcaggcagcctgcagcgtcgggacctgggcaggcgtcaggcccatcaggtgggcgcagaccagatccagcgcgttggggtcggcggcggccagcaggcagccgatgggccggggcgtgccctgggtcgggccgttgccctccatggcgacgacggcgtcgcacagggtgagccggggcttaaaatagaggttcaggtccaccagcatctgggcgaagcgggcggggtccgggtattgaaaatggtactcgggcttgcgggtcccggggatgacgccgaagaggtttttcaccccggcggacagggccatcatgccgtgggacttcagcttgcagaaattgatgatggcgtcgcagtcatcgagccaggcggtgtattggaacgtttttgcctcctgtgcgtctttaaagtgggcggttttctgggcaaagttccagttgagccgcacgccggggccctccaggtcgagcaggcccgtggcccggtagatgcggcgcagggccgcttcgttgtagagcccgccagggctgtcgccgaggatgacctgggcgccgcgctcgcgcaggagctggcacagagccgccagcaggcgcggatgcgtcgtgactgcgtcgtccggcgcgtgggcggcgacgagatttgctttgatgcccactgtcatgcctgggcgcagccaggcaaggacgtccagcgcctccagggcttggcacagggctgcgcggcaggcatcctgcgtataatctgcgcagggcacgcaggcgacgtcgtaatgtttttgtgtcatggctgtcaaaccgccttttgtcagggtgtcctcgccgcgggggcagcggggggcttctgtattgtagcataggttttctggcgcagcaatgcgattttggccgtgacagggcagatttttgtttacagcggcggcgttttgcggtaaaatatactagatatagaagaaatcgacggataagatgggaggtaagcctatgggacgtcgtgaggatccccgtgaaagaagacgtgcggcgcaggaggatgacccctacgagcacctgatggacaatattgatacgctcctgcaggacgatgaatacgaaggcccggacagcaggcggccccagcgccgcagcgcgccggaccagtggtacgatgcctacggagacgagaacgattacaacgattacaataccggttatgatcccggctacggatatccggagcagccccgccgcccggaatttcgggcctataatgtcgattttgagcagccgcctcggcaaaagcgccgcccgcggccccaggagaaccacccggagtattatggcggcgacgctggcgcccgggcctccggccagccgcggaaaaagaaggcgcggaacgatgcgccgcgccgcagcgcgccgcggcccgcgaaaaagcggcggcacccgattctgaagctcctgctggggctgctgatcgtcctggtcattgcctgcgcggcgctttggatctttgccaagcagccggtctccagtgacgccttgggggcgcgcaagcccggctgcagcacgatcctcctggccgggacagacgccgacggcacccggacggacacgatgatgctgctgtatctcgacagcaagaacggccagatgagcctgatgtccctgccccgggatacgtataccgatgccagctggtccgtgccgaagctcaactccgtctacggcgtgaacgacggcggcaaggaaggcatggaagtgctgctggactatgtcaaaaaatgcatcggctaccggccggatgggtatatccttgtcgacctggactgctttgaaaagctggtggatctaatgggcggcgtgcgctttaatgtccccatggatatgtcctattcagacccgtcccaggagctggagatcaatctgacagccggggagcagacgctgagcggccagcagtccatgtgggtcgtccggttccgttccggctatgccatggcggacctgcagcgcgtgcaggtccagcgggacttcatgcaggcggcgatggcccagtggtccaagccgacgaaattcctgcgttatccggcggcagccagcctgcttgcctcgaatacgacgacaaatctctccctgcggaacctggtctgggtcggaaaggccgtcctcaaggccaaggcgaacgggatgcgcatggagacgctgcccggtgaaccggccatgatcagcggcggctcctattatgtcgaatggccggagacgacggcgaacctcatcaacgaggcgttcaatccctatgaggtcccggtctcgaaggaaaacatttacagcccctggtactgagccggggcggaggggaacacgcaaatgaaacgtgatcttttggtgcttgtaccgtacccggagaaggacctggctcagctgcaagctgccgccggggacctgcgggtcgtgaccctgccggagacagcgccggaggggcagctgcgccaggcgctggaatcggcccgggccgtcatcggcgaaccgccggtggcactgctgcaggatctgccggagctggcgtggattcagatgacttgggccggagcggaccgctatacgtctgaccctgccttcccgcagcatgtacgcctgagtgtcgccgccggggtctatggcccgacgatcgccgagcatgtgctggcgatgctgttggcgctgaaccggcggctgccggcctatcagctgcagcagcgccagggcggctgggaggatctgggctctgagcgggtcctggaggggcagactgtcgtcatccttggcaccgggaatatcggccgggagacggcccaccggctgcaggtattcggcgcggcgaccatcggcgttcgccgcaccggagcaggggagatgatccccggcttcactactgtgacgaccctgtcgcagctggaccggctgctcccccaggccgatacgctcatctgctgcctgccggagacggcggagacccggggcctgctgtcccggaagcgcatcgcgcagatgaagcagggcagcgtcctcatcaatgtcggccgcggtagcttggtggatacggaggcgctgacccaggcgctgcaggccggctgcttggcaggcgctgggctggatgtgacggacccggagccgctgcctgcggaccatccgctgcgcaggatgccccaggtcatcctgacgccccatgtcgcgggtgtcggctttggccacctaccgctgacggagcggcgcatccggatgctctgcctggaaaatgtccggcgttttgtcggcggcatggcgccgaattatttggtagattttaagacgggctatcaggcccggccggaaggagtgtgaccgcatgggaaagatcggcttgatctacgccatggaggcggagctggagagcctgctggagcgcagcggcgccgagaaattggagacagtcgcgggcgtgccgttttacgccgtcgcgccggggatcgtcgcctgcgccggcggcattggcaaggtcaatatcgccatggcgacgcagctgctgctgacgcgctacgcgccggacctggttttgaacgcaggcgtcgccggagcgatggagaacctgcccgtcggcacgctggtgctggcagagcaattcgtccagcatgatatggatacctccgccgtgggcgacccggtggggctggtctcgacggtcaatgtgaccgaatttccctgcaccggcgcagcgctgcttgcgcggcagctgcagcagatgcaggtcccgtatcagcgcggtaccgttgccaccggtgactggttcgcgacggactgcccccgggcgcacagcatctgcgagacgttccaccccaccctctgcgagatggagggctgcgcggtggcac

SEQ ID NO: 2349 - DNA, 3960 bp, Unknown
  16S sequences of unknown bacteria
cagcgaagcgggtcgcatttgagagcgtgtcaaaaatacttttttgacacgctcaaagctccggctctacaaatcgtagagctggagcttcgtgtgaaagcaccgtcaagatggcctgctcagcgggtcattgcccgcaggacacggaattgatccgggtcgatgtgctttgtcatctccaggccctcgtccatgtccacatcgtggatctgctcggatttgcagcagacgatgcggttcgtcttgccctctgccagcagggccacggcgtggtagcccatctgggtggcaatcagccggtcgcggaccgtcggggagccgccgcgctggatatggcccaggaccgtcaggcggacctcaatgcccatcttctccttgatctgctggacgatctccgccgtattgccgacgccttccgccacgacgatcatataatgggtgcggccattcagccgggcctcccggatcgtctcgaccagatcgtcgatcttcgtcggccgttcggggaccaagaccgccgtcgcaccggaggccaggccgacggccagggccagatacccggcattgcgccccatgacctccgcgacagagcagcgctcatgggactgcatcgtatcacgcaggcggtcaatgcaggagacggccgtattggccgcagtatcgaagccgatgcaatagcgggtacaggcaatatcattatcgatcgtcgccgggatgccgatgacattgacgccgaattttgaaagcgcccgggccccacggaacgtgccgtcgccgccgatggcgatcacgccgtccagcccgaagaatttgcagttgttatacgccttctcctgccctgccggggtgcggaattcctcgctgcgggctgtatagagcaccgtgccgccccggtcgatgatatgagagacggacagcgggtccatccgctcgatatccccgttgatcaggccgctccagccccgccggatgccgatgcactcgagcccccggtccatgcaggagcggacgacagcgcgaactgccgcattcatccccggcgcgtcgccgccgctggtcagaacgccgatccgtttgattttcttttccatctgaaaaacctcctatcaccagcagaaagcgccccgattggggccctctccgtgtcaagtaaccgatctcacaagcgccggatgcgctgccggttttgcagactttttcagcgcaaactcccgtgccgccggcatggcagggcacttgtcgctccaatgactattatagcacaatcgtagcaaagcgcaagattatcgttttaggaattgcaaatatgcacgagaacgggtacaataaataatattgaggtatcacttgcattttatttgctgggagggacgtttcgtgctgtttccgtttgtattggctgggcttgtgctggctgcagcgtctggcgtgctgctgcagcttagcgggtggcagattgtttgggccggtctgctgctctgggcggcgggcattttggtaagcctcctgctgtatgccctggtactgctggtcgtgagcctgtttttgccgacggaccgccccccaaagcgggaccaccccttctgccgccgcgtgacgacggcgacgatgggtctgctctgcaagctcatgcggattcgcatccaagccaccgggctggaccagctgccgcaggacacgccgtttttgctggtctgcaaccaccgctccaatttcgatcctctgatcgctgcgtggcttttgcggcgctatccgatggcatttgtcatgaaggcccaaattttaaaattcccaatcgccgggccgtttgcgttccagagcggctatatccccatcgaccgggagaacgaccgcgctgccctcaagagcattctgcgggccgtggccgagatcaaaaacaacggccttagcatcggcatcttccccgaggggacgcggaaccacggcgagggtctgctgccgctgcgcagcggtgcgtttaagatcgcccaaaaggcgcaggttcccatcgtcgtcgcccggctggacggcgtcgatgcagcggcgcgcaatttcccgttccggtcaacacgggtccaatttgccatccgccaggtcctgccctatgccgcccttgcgggccacacgacagcccagattagccagaccgtcagcgaatttatgcgctgacgcccgggcggcgatacggaatcttcacacaaaacacattgacttcaatttctgcccgtgttatagtttatattagtatatttctgctaatctggaacactgggtgaatctatggaagatttgaaacaaattgtcgcggaaaatattacgcggctgcgcacggcagccaatctgacccaggcggagctgggggcaatggtcaattattcggataaatctatttcaaaatgggagcgcggcgatgcaatccctgacgtccgcgtgctgctgcagctggcgcagattttcggcgtcacggtggacgatctgctcaagccccatgatgggcagcagccgctgcggtccagcggccagtggcacagccgctacagcagcacggtcatcaccatggtcgccatcgctgggatctggaccctggccctgctgatttttgccctgctttggatgtccggcacgatctactggctcgtcttcgtctttgccgtgccgctgaccttggtgacatggctgattctcaactctgtttggaaggcagggcggtataattactttatcgtctccgggctgattctcagcatcaccctggccatctatctggcctttttgccccacaactggtggcagctctttctcccggcgatcccagcagagctgatcgcctatctaagctttcatatcaaacgcaagcgaaaaacctgaaaaaccccgtcaaaatgcggctctacgattcgtagagccgcatttttgcattggtagagtgaaaatttttgtctctaccgccagcaagccccggagtatagccccgcatgccgggagtattttgcaaagcgcccctcggtatgctacactaacaaaaaatccggcaaaggagagaccccatggctgatttcattttgagctgctgttccacggcagatttgagcaaagagcattttgagcgcagacagattcattacatttgcttccattacacgctggacggtgtggagtaccccgacgacctgggccaaagcgtgagctttgatcgcttctaccaggcgatggcagacggcgcccaaaccagcacctcacaggtaaatgtccaggagtatttggagtacttcaccgattttctggaagccgggaaggacctcctgcacgtgaccctctcgtccgggatctccggctcctatcagtccgcgtgcatcgcggcggagcagctacgggagaaataccccgagcggcgcattgacatcgtcgattccctcggcgcctcctccggctatggcctgtttatggataccctggctgacctgcgggacagcggcatgggccaagcggagctagcccagtgggcggaagaaaatcggttaaagctgcaccactggttcttctcgacggacctgaccttctatataaagggcggccgcgtctctaagacgtctggcaccattggcatgctgctggggatctgcccgctgctgaatatggaccatcttggccgcctgatcccccgggcaaagattcgctccaagaaacgggtcatccaggagatcgtcaagcgcatggaagagcacgcccaagacgggcttgactacagcggaaaatgctacctgtgccagtcagcctgcctggaggatgcccaggccgtcgccgcagcagtggaggcacgctttcccaagctgaacggcaaatgtgtcatcaaccccatcgggacgaccatcggctcccacaccggtccggggaccgtcgccctcttcttctggggcgatccgcgggtcgattgagcccatagcaaaacagatcgccccc

SEQ ID NO: 2350 - DNA, 2966 bp, Unknown
  16S sequences of unknown bacteria
atacagtttagcggcttcttttctgtttatgtaataaagagccgtctgcccgctgttgtgtctgttgatcgcgtttgtaagcagagaggtgaccgcgttctttcttccgtatatgctcgttacggcattgctgtctattacaagtgagttttgaatgccgaatccgtccacatataccggagcgacaacggttttgccgttgaccgtgaaaggcagcagcgcaacgacacttgtgccggaggcagtttcggaggcgatcacggcgaccgggtgttcaagtgcgttcggaagctgcttcagcatatttgcgcccatatagtgatccgcattctttgatccgctcacggcatagtcaacgtgggtctgattgatggtgaccggaagcttgttgaagccgatgtcgagaaatacctgcggcgtcggacccacaacaagcgtatcttttttcggaaactttccggcgatccaatcgtcaacctgatcgctgaacggcttgctgaaatcatacgaggctgtgctcgaatacgaattcttccgcccgctctcgcgcgctttgctctccgcatcgcgcgccttcgcttcgcgcaccgcacggccccacagctctctcgcgtactgcacatccttcaggatgcgggagctgaccgcacggacgcgccccgtcagacgtcggatgatctcatcgagaaacgcaatgatcttccgcccgagcgacggcttgtaatccaccgccgcgcgtatctgcgcaacatcgccgaagagataccgccccacatactcctcgcacagctcgaagtccacaccgtccgcgtcgaggttctcaccgtgcgcggcatacgtctccttcttctgcgcccgaagcttgtcaaggctcatccccttttcacgcgaaagctcgcgcagcgcaagctcacgcagcgcgccgtagtccgacgtggtctcgatcgcatgagtcatctccgaggcaatgatcgatgcgacggtgcgccccgacgcggcgtttacatggatcgtgccgtttttgtaatatccgtttaccgtcggatcgtcgctgcggaaaaagactatgcgccggtcgagtatgtgcgaaagctcctccgccgctgcctgctgagccggagacgcaccgtattcgcgccccgtcctcgtcgcttcgtttatcgcaataactctcgtctgctccgtcggagtgtatccctcgcggtcaagcgcttcgtcaccgaacgcagcggaagcttccgagccttcgcggtcgactgcaaaatcgccttcgtccgcgccgttttccgccgtgtccgcgccgttttctgccgtgtccgctgcatcattttcgctttcctgcgtatactgactgttgacagcggcgttgttttgtgatatactgttgtcggtggttgctgggcctgatttgatgggcccctccaccttagaggacttcccgtagtctccggtcatcccggcttcgccgcgacccggttggcgggaggtcctctcttttacggaaaatgtgtccggcttgaagtttacaatgtcgtacagaagcatttctccgtttttcgtatacccgacgacgacctcggcattgtagtcgttctgcccgacgcgcatgagcacgcgtccgcgcgcaaattccttgatgttgtcctttcgcggatgctttatctcctcgtttacatagtccgtcgaggcgcgcacggcttcgtcgagatttcccgccgcacgaagcttgtcatcgtaaacctgtccgtcgtttctttcgatgtactgcgagtatccggatcgcgtatactccttcccggtctttccggtgatctcaataacactgtttcccacgcggatgccgttcggataattctgagataatgccgcacttgcagcgggacgccggatgtgatataatctttgcaaaagcctccacatcgtgcgaatccgagaccgatcgaggcgcggcagcagatttcgaaaggagcgaaagctatgctggaaacgaaaagactgatactgaggaagtggaccgaggcggatgatgccgatctttttgaatacgcaaaggatccggatgtcggtccgattgcgggctggcctccgcacaaatccgtcgaggaaagcagaaatgtgataaaaaacgtattaaacggcgcggaatgctacgcggtatgcgaaaaaggcagcaacaccgcaatcggcgctatcgaacttatattgaacgggcatacggatgtaacaaagcgtgacgacgaatgcgagctcggatattggctcggcaagccgttttgggggagaggatacatccccgaagccgccgcggaacttatcagaagaggatttgaggacctcggtatgacgacggtgtggtgccgttatttcgacggaaatcaaaaatcaaagcgggttcaggaaaaattgggatttgtatttcatcatacggacagtgaggttcccgttccgcttctcgatgaggtaagaaccgatcacacaaacatcctgacgaaagaacgttgggagaagatgaaataaagcataatttgccgttcgacgcggcatggcaaatcacgacgtttttcgtgcccccgctcacgcgcttgccctgcagcgtaaaatgtattttgataatttggcgcaaaacacttgacacattaagaagtatgtgctataatatagtgcgttcggatgaaggttttcgtatgccggagtggcgaaattggcagacgcccgggacttaaaatcccgtgtgacgaaagtcacgtaccggttcgagcccggtttccggcaccaatcttacttttcagatttgccggtaccgcaagacagacgttatttcatccgaaaagacaatatcgcggggtagagcagttggtagctcgtcgggctcataacccggaggtcgtgtggttcaagtcccacccccgcaaccataaaagaaacctcttttgtctaccaagacaagagaggttttttcttgcttt

SEQ ID NO: 2351 - DNA, 26498 bp, Unknown
  16S sequences of unknown bacteria
aatttgtatccttggacaagctgcggggcgatgactcggacacagataaccacgagagatattcagataacaggtgggaggaagaatatatattggataagctccaagctgaggaactgcataaggcgatagagcagctcaccgaaaaggaaaaaagaacctttgatgtaatagcgttcgccgttttgcagggtatcagcgaaagggaacttgcagtatctttgggtattcctcaaaagaccttaaataaccgaaaaagaaaaatttttgagaaaatccgaaaaaagttggctcaaaccgagtaaaaccgtactgtaatatagtagagggcaaaaaacgacctctgcgaacattgaaaacagaatagtacagcgcatcttttaccttccttctgctgtcgggcaaccgataagccacttggactctgcccagacggtacggcgcaaccgtaacgatggcgatgacaggcagaagaattaaagatacttccgtcacgagagatcgggcggcctgcggagatcccgggggtggtgagattccaatgaggcaaaatgcattgccggagggtacgttcccagtgttcggggcgtcgtggacaaatacggacgaaacaaacgattgatacaataattatttaaggacggtcgtgttgctttattttcggattattatataatttgcaaaatcgcatccgaccgtcttttttaagccgtaaaaaggcgaaatgcagacaaacggataaatatataaatttcggctttttggggcttaaaaaacaaaattattcggagggttttgaaatggataaaagggtagaaaacaacacttcttttgcttacagcgtaaacctgctgcgaatgcttttgaaaatggacttaataaccgatgacgaatacggtaaaatagttaaaatcagcgctgagcattacggcacagagataatatgtgtctgaatttttaaatttaaagttttaggaaaattgtgctggaagtattcgtactctcgtggtattgttgtgttgccgaagggtaaaaacagcaaggcagcttacttgcggaaaggacaaggaatatgaacattacggaaattacaagagtcaaaaagcagataaacggacggtcgcgattagctccgtattgtcgggtatcaagcgactctgccgatcagcttcattcctttgcagcacaaataagatattacagcgagtacgcaaagaaccaccccgaatatgagcttgcagatatttacgcggacgagggtattacgggaacagaaatgaaaaagcgtgatgagcttaaccgccttataaccgattgcaggaaagacaagattgaccgtgttatcgttaaatcggtttcaagactggctcggaacaccgaggaactgcttgtgctgctgcgattgtttaaggatctcggcgtaagcgtgtattttgaggagcagggcatagatacagagaaacttaatatggaaatgattgtaacattccccggtatggccgcacagcaggaaagtgcgaacatatcggggaatatgcgttggagctaccaaaaacgaatgcagtcgggagatttcaactgtacctaccccgcatatgggtttgagcttaaaaatgggcatatgactgttaatgaagacgaggcggcggttgtgcgcagaatatttgacctgtacctgcaaggctatggtattcaaaacattgccgaaatactgaataaggacggagcgcctcggcggtatggtcacagcaaatggtactatggtacggttagatatatcttgacaaacgaacgttatataggcgacgcgcttctgcagaaaaagtttaccacagatacattgccgtataaaagaaagagcaataacggtcagaaacctaaatactatgtagaaaacagcaatcctgccattgtcaacagggaaacatttgaagctgtgcaggagcttatgaaatcacggaaaacagaaggctgcaaaagaacggtatatccgcttacaggaaagctgcgctgccccgaatgcggatttgcattccgccgacagataacaaggaatattccgtattggatctgctccggcagatcaacggcaactgccgattgccaaagccatcgggtaaaggaagacgcggtgtatgaaacttttaataaaatgatattcaagctgaaatcctatcggtctgaactgctcggtacccttatacgccaaattgaaaacatgcaggatcgcacaaatataagcagggaacgcatacggcaaatagatagggaaatagccgacttgggagcaaggaacatagttattgcaagactgcacacaagcggcgttttaaatgctgccgaacattccatgcaaaccgcagaaataaacaacaaaattaccgaattgcggactgaacgccgaaagcgattatccgaggacgaaaatgacgagctgatagatacccttaaagacttaaatgaaatacttgaagaatatgaactgacgaccgaatttgacagcgagctgttcgggcaagtcatagagagtattaccgtagacggcaattcacagcttatatttgaacttgtaggcggaataaggcttaccgagcaaatagacgaaaaagggagatgtaaatcggtatgaagaacagaatcctgccttacggctattgctgcgaaaagggtgaaattgtattgcaaccgcaggagagtaaaatattagtgcagatatataaagagtataccgatggcggatcgctttcgggcattgcaaaacagcttaataatgacggggttgagtacacagctggcgttgccgcgtggaataaaggaagacttaaaagacttcttgaggataaacggtatctcggcacagaaaattacccaccgataatagacaaagaaatatatgaggccgttcaaaacctaaaaagcgaacgcaataaccaaaaggaaacagataggaaaaatggtgttttcagattgtcagtgccgatcaaatgccccgactgcgggagcacaatgcatcgtaggcatgacggcaggtgtaaatgtcagcagcgttggagctgtaagaataagaattgcaacacaataatagatatagcggataacgacctgctgaaagaactatgtgaattgttagaaacggtaaaacccgaaaatattgaaaggcttgataaaaagccgtttctgccgagtgatgaggtaaacaggcttaacaatgagataaaccgagtgttcgattcggtagaaatcaacagggaagcacttcgaaataaaatgtttaactgcgtaagtgaaaaatataattgccttgataatgatttatacacaacccaaaagctgcagcttgaatttgaactacccattacagatgattggatgcaaaaattcaaccgcatcgtaagagaaataaggctgtataagaataaagcaataggcattgtgctgttaaacggacaactaataagaaaggagcagaaaaatggaacagacggctgtattaaatccgccgaaagtggttcatgtaattgaaccgacaatatcggtaagggaaagcgtaaaaagcggttaccgactgctgcgtgtagccgcttactgtcgggtatctaccaagcaggaagaacagttgaacagctatgaaaaccaagtggagcattacacaaaccgaatcaatgcagaaaacggatggacacttgagggtatttatgcggataagggtatatccggtacaagcgttaaaaaccgcgacgagtttaaccgtatgatacgccgctgcaagcaaggcaaaattgatatgataataacgaaatccattgcaaggtttgcaagaaataccgttgactgcttaaaatatgtccgactgcttaatgatctcggagtggatgtatacttcgaagagcaggggatacacagcaatcagcccggcgcggagttttacataacaatatacggcagtatagctcaaagcgaatccgaaaatataagcgcgaatgtgaagtggggtaaagcgcaggcggcaaaggaaggtaaggtgatatttcggtataataactttctcggctaccgcaagggcgatgacggaaagcccgaaatcgtacccgaagaagccgatattatccgacttatatatgaccgcttcctcgtgggcgacagtcttaacggaattgccgagctgcttgaatcaaaaggggtcgcaagcccgtcaggaaaagataaatggcaactgtctacaatacagtccattctttcaaacgaaaaatacaaaggtgatgccgtaataaacaaaacatatatacgggactgcatatccaaaaaggttatggtaaataacggcgaacgccctaagtattatgtggagaacaatcaccccgctattatagacgccgttacattcggcaaggtacaggaagaacttgcacggcgctcatgtaagcgcaaagtcaagcaaaagggtacaaagaccgagcagggaaagtattcaagcaaatatgcgctgaccgacctgcttgtatgcggagaatgtaagacaccttaccgccgctgtacatggacggcgggcggcaaaaagaaaatagtgtggcgctgtataaaccgacttgatttcggtaagaaatactgtcataactcaccgactttggaagaaagcgtgttgcaaagggctgtaatggcggcgattatgaaaattgctgatatgaacgcagagagccttaaaatgctgaagctgcatataggaatgggattacaaaatgagaggtgtgaggataacagccttgatatacaaatacgaattgcggaaatagacgcggaattcaaaaaaatgcttgaccgtgtaaccgatgatacattggaagcctttgacgatgaaaccgccacacggcttatggatgaaaaaagccgtctgcaacagcagcttgacaatatagccaccgctgaacaacagagagaaaatgcagagtctcggcttgacgacatctacacgatactggacggcataaagaaccgcccgatggaatacgacgaccaaatcgtccggcaattgctcgaatgtgtagtggtcgactcaaaagaacagattaccgtgatatttaagggtgggattaaggtggtagaaaaaattgaatattagaaattgcaagaaatgcagaaatatgttataattaaattgaaattttcagattaggggaaatacaattgaaaatggttaccgaaaacttattcaatttgttaagaacaagagaaataatagatattttagatggggataaatgttttggcgattcccctttgtctagcggggatacagtccaagtgaaaatgccatatttgaatgggcccagtttatgtgacttatctacaatgtttggtttgcctgtaacttacacgtggggaggttcaaaccccagtcgttggcagtatttggataatttgttgaatcactgtgcaaagaataataaatgctcagacttgctatcgcatctgttttcaaaaaaacagtttgtaagtcctcttagtggtagcactcctaaagtaatagatgagtcttataaacttattgtcggagaagtaatttctagaataaatggtttgctatatttcgggggcaatgaattggcaatagtgggtgatcgtttcattgttcgaaaaattggagagaagatagaaatacaagcaccaaaaatcaaatcaataaaccgtgagtatataaaaagcatatcgagtcgtgctattgaagacatcgagaaaaagaattttgacagtgctattacaaaaagcagaacattactagaagaggtgttttgctatgcaattgagaaaaaaggggatacaccgacaacatccggtaatatgtcagaactatataaacaagtgaagggtcactacaacatgcatactgaccctaatgtagatagacgtataaatacactgctatcaggtcttgaaaaaatagtatcttctatttcggaaatgcgcaataaagatagtgatgcacatggagtgggttcagctaggataaacattgaggaacaccacgctcgactatttgtaaactctgcagtgttaatggctgactttattttatcaatagaacagaattcaaatcagtgatatgatatttcatattgtaacaacatctaacagattgtaaacaaagaggtaactcattttgaaacgaaattattttaaagatttgaagtggcatatcatttattattaagtccgttttttgcggtttttcgatgtcgcattttcttttgccgtttgaatttaaaacagaaaaagtgcgaaattcataaattggattacttaaaacaaaccttttcgagccccatggtctatttgtattcatcttttaagtttgggaagatgtgtgagtatcaaaataattttagtatgcggtggaaattcttttgaaaatatggtataatgcagataataaaacaatactgcgaggtaaacatgaaaaaaaaacagcctccttttcaaattacgaataaaatcattgatgatgtcgcgaagatttccgaactgataggcaggctttctgctcgtaatcatctttccgccaatccgaatctgcggcgcaccaaccgtattcgtactatttacggctcacttgctattgagcaaaacaccctaagccttgaacaggttacagccgttctgaacggcaagcatgttttagctccgcccaaggatattgccgaggtcaaaaacgcctatgagatttacgaacatatggacgagcttgacccttattctgtggatgatttgctgacggcgcacggaattatgacgcgcggattggtggttgagtccggtatgtttcgtacaagacccgttggtgttgtgaatcaggatggacaggttgtgcatctcggtacgttgccgcagtatgttccggattcagttacggagcttctggattggacaaagcacagcgatttgcatatgctgattaaaagctgcgtgtttcattatgaatttgaattgatacatccattcgcagacggcaacggccgcgttggacggctttggcatacgctgttgctctcaaaatggaatccgacatttgcatggctgccggttgaatccatcatccatgaccgccagcaggattactacaacgctattaacgcgagcaacaacgcaggagagtcaaccgcatttattgaatttatgctttccgctatcaaggcatcactcattgacgcgaccgaaatgagtgatgatatgagcgatgaaaaattagataaaaaaaccttgcgcttaaagaagattgaacagttcctgcggacgcacgaatacattatgaacgccgatgtacgggagttatgcggcgtgtcggcagcaacggcgaacagagtattggcgggattgacagaaacgggagtactcaaaaaataccatataaacggatattggaaatataagtcggcaaaaaataatctatgaaaacagcaagagtttatttgccaaagaaaaaactatgtgaaagttcggggtcatatgtaaatccttccaaaaatctttttcgtagtcctgctacaaccgagtgcctcggtacgcagacgcgtatcggggtttcttcttttatagggcttaatcctcgcgtttaggcggatatgttttccatagcattatattttccgatatcctttttagggtatcggtttttcttttaccacttcaacaataaagtctacccctaccctcagtcagcttaaataaaggggcggcgaaaagtgacctaaaaatcgcgctataaattaccgaccccatatcagctaaaaccaaagcctatcaataggttttggtttaattatttttgggagcgaatcgggagcaaaaacataaatcatatataatatttatttaaaagacctatgctttgtactttcagagtataagtcttctatatgaatttaatagtttatttactgtttcacataacaataattaaaataatttattccaatattgacaactgtaaaaaaacatgatataatatagtcaaggaggtagtaccaatgaacaatagtattttaaccaaatgccccgcctgcaatgaaaaactttacatatcttctctcaaatgccaaaaatgtgggttggaattaaaaaacgattttgagataagcaagtatgatttgcttgataaggaacaactgaatttcttagagacatttttagcttgcgagggtaatcttaaaggattacaaaatcgaatgaatatatcatatcctttagcaaaaaagaaactattcgaattgttggtggcactgcaaataaaagaaagaaataataccgaggtagtaaatgtggaaaatactttaatatgtaacaacggtcacacggctgccgacataataagaaataaattaattgaaaacggcggatgtgcgacctattatacttatgacggtacagaacacaaggtttatgcaataaaaaacggaactgaatttgcaactgacgcactgcccgttaatataacatacagctttgaaatatttaattgcgtttctgacgctataaaagaaaacggcggcaaggcaagaaaaggaatggcacggggaaatagggttggtgatgtgaattttgacgaaaaaactgtttcaggttatttggcaattcattttttcggaaaacactatggagaaacttctgttgacccaagcttttttctgttcggaattatggaatgggctaaaataataggcaataatcgcggttatgttgaatttgaagattggtataaggaagaattagaaaaacaatgcatataataataggctttttgtatggactgtttaaagaattgttatatcccaaaaggcgtaaatagattttgctcaaaaaattccgaataaataaaaattttaaaacggatatttattctgcaagtcggcgcagaagaacgttgctgcgcttcagcttgcaactgccgactgcgacgttttggtttacttgctgtatcatccgcaggatgcgctcgcaacctcgcccatcacccgttccgaaagtcctcaattcgtaggaacggggatttccgactgtagacaagccttaagagaggcttgccgtttcggtttatagatgattaaaaaacacgtttaaaagaattctgatttttcttttttatattatgatgagttgccgcgtttttttgctttcttctttcgagcaaaagaaaaataagtatgattgtaaacggtaaaaaacaactgtagttttccaaaattaccgccctccaagcaggtttgaaagctctgccaattctttaagcgacagttgctccgagcgcaccgtttcggaaatgcctaatgtatcaagtgcgtttcttatgcgctccttttcaatgcccgcagtgtttgaaacggtgtttacaagcgttttgcggcgctgtgcaaagcagcatttaacaaggcggaagaacgccctttcgtcatttaccttaaccggcggtttttcgagtattttaagctttataacggcggaatccaccttcggcggcggcataaagctttccttatcaactccgaaaaggatttccggctttgagtagtagctcacggcaacgctcaccgcgcctgcctctcttgttcccacctcggcgcagagcctttcggccgcttccttttgcaccattacggtgacggtgtctatcggcagtctgctttcaagcagggtcataattacgggcgaggttatgtaataggggagattggcgcacaccgcgaccctctcgcaatccgcgaaatgctcttttatgagcgctttcaggtcaagctttaaggcgtcgccgtaaattacttcaacatttttacagtcggcaagggtttcgggcagcacctttttcagccgttcatcaagctcaattgccacaacccgttttgcggtttttgagagctccgctgtgagcacgccgaagcccgggcctatttcaagtactcccgtattttcatcacaggcggcgcgcgccatggcagggcagacctccgggtctgttaaaaaattctgcccgagcgattttttaaaggtaaagccgttctttgcaagcagcgaacggacggtatttatatcggataaattcatagcaaaactcctaacaaacaaattatatcgcagaaaaatattatttgcaataaatttttgttgagaaaccgaaggatatattgtataatggaagtatacaacagaatgtaggtgaatttcaattggataacaggtattatgaaaaggtaattgaggaaatgcagccattcctcgatgagcagggctttaaggcgcaggaaaacggaaatttcaaaaatgacaagcgcgaaataaagattgcttatgatgaggcacggcagatgtatacgctgtcggcggcggatataggcgaagagggcgacggcgagctgaaggaaatagaagcgtggctttttgacgacagccaaaatgccaaggacgcagcggcggtcggtgtggatttcaccgctacgctccgcaaaaacatgggcatacgcttaaagcgcacggcggacggcagcaatgttgaattaccgtctttttcaaagggcggcagcattaccgtcacgggctttgcaaagaaaatgctcgatttcttcccggcgcttaaggatgagtataagaatcacatagcggtaaacggcaactttttgtatctcaactttttcggcgagtatttggtgccgaacatcaagcaggtaatggcttcgggcaataaaaagcagattaaaaagctttacgatattttagaggatatgtatgtaaagggcgaccgcgataccgtaaattccgttgtggcggtgctttgcgccgctgcgtataacgatgagaaggcgactgccgcaattaaagaaatgcttgatacggataagcatttcctttcatcctttgaaagctttatgcctatgcttgctaaaaacaaaaagcttacggctgcgcttctaaaataaaaatatatcgggggtaattttatggagtatgtaattatcggaatcattgtgctggcgctgatacttttatttgcaaatgtaagggtagtgccgcaggcaaccgagtatgtaattgagtttttaggtaaatacaaaactacatggggcgcgggtctgcacgttaaagtgccgtttatagagactatcgccaaaaagataaccttaaaggaacaggtgcttgattcgccaccgcagcctgttatcaccaaggataatgttacaatgcagatagacacggtggtttatttcagaatttatgacgcaaagctttatacctacggtgttgtaagcccgcttaacgctttgcaaaaccttaccgccaccacgcttcgtaaccttgtgggtgagctggagcttgacggaacgcttacctcaagagatactatcaacgcgaaaatgaccgcgatacttgacgaggcaaccgacaaatggggcatgaaggtaaaccgtgttgagcttaaaaacattattccgcccgctgaaattcagaatgcgatggaaaagcagatgaaggcagagcgcgagcgccgcgaaacgcttttacaggcagagggtcacaaggcggcagctattacccgtgccgagggtgataaacaggctatgatattggcggcagaaggcgaacgcgatgcgcgcattgcaagagccgagggtgaggcaaaggctatttatcttaataaaaaggctgaggctgacggtatccgcgccataaaggaggcagcggcagacgcggcggtgcttgaaataaagcgccttgaaacccttgcggaaatttcaaacggcactgcggcgaagcttataattccgacagacgctgtaaatatggtaacaaaaaatacggtgttcaccgaaaccacgggcataggcgatgtaacgcacgaggcaccgaagcccgtagtgccgcccaaaaaggacgagtgctgcgacgattaaaaatatttgacaaacgcggtatagtgtgttatactgtattaaattgaaagagcaaaggcgctcataaagggatataattctctttatgggcgcttaatttttttaaaacgggggaattacaatgaccgaaaagggactttaccgacagcaattcgagcacgacgcctgcggtataggcgcggttgtgaatgtggacggcacaaaaagccacaaggtggttgataacgcgttgtctatagttgaaaagctggagcaccgtgccgggaaggacgcgtcgggcgagacgggcgacggcgtaggaatactggtgcagatatcccataaattttttaaaaaagccgcaaaggaaataggtatagacctgccgggcgagcgtgaatacggcgtgggaatgttcttttttccgcaggacactttaaagcgcaatcaggctaaaaaaatgcttgaggttatagccgaaaaagagggcgttgagtttttaggctggcgagatgtgcctacaaaaagcgagattttggggcagaaagcactcagctgcatgccgcacattatgcagtgctttttaaaaaagcctgccgatactgccaagggtcttgactttgaccgaaagctttacataatccgccgcgtgttcgagcagagcaacgataatacatatgtcgtctcattatcaagccgaacaatagtatacaagggtatgtttttggtggggcagctgcgccgattttaccttgatttgcaggacacggcatatgaaagcgcaatagctcttgttcactcgcgcttttccaccaacacaacgcccagctgggagcgcgcccacccgaaccgctttatactgcacaacggtgaaataaacaccattcgcggcaatgtagaccgtatgcttgcgcgtgaggaaacaatggaaagcgccgttatggaggatgatatggataaaatcctgcctgttgtaaacgcggcgggctcagactctgcaatgctcgataacacgctggaatttcttgttatgaacggaatggatttgccgcttgccgtaatggttactatccccgagccgtggcgcaacagcaagaccataaccagagctaaaagagatttttatcactattactctacaatgatggagccgtgggacggccccgccgccatacttttttctgatggcgataccgtaggcgcggtgcttgaccgaaacgggctgcgtccctctcgctactatataaccgatgacaatacgcttattttgtcttccgaagtaggcgtgcttgatattcctgcggagcatattgttaaaaaaagccgcttggagccgggtaaaatgctgcttgtggatacggcgaaaaagcgtattatatccgatgaagagtgcaagcgttattatgccacaagaaagccctacggcgagtggctcgaccagaatttagtgcggctttccgaccttaaaatgcctaactgccgcatagagcgctacgattcaaagacccgcgacaggctttacaaggcgttcggttacacctatgaggatatgcgcaacgctattataccaatggcgaaaaacggtgcggaggctaccgccgctatgggcacggatattccgcttgcaatgctttcggataagcatcagccgcttttcaattacttcaagcagcttttcgcgcaggttaccaatccgcctatcgacgctatacgcgaggaggttgtaaccgatacctgcgtttatgtggggtcggatggtaacctactgaatgagactgccgcaaactgtggggttttggagctgccgaacccgattataacctccgccgagcttgtaaaaataaaggctataaaccgccccggctttaaggtggaaacggtttccttactttattatacaaacacgccgcttgaacgcgcgctcgatcacctgtttgtggagtgtgaccgcgcttacaaaaagggcgctaatatactcatactttccgaccgcggggttgatgaaaaccacgttgcaattccgtcgcttttggcggtttcggctattgagcagcaccttatacgcaccaaaaagcgcacggcgctctctgttatacttgaaagcgcagagccgcgcgatgttcatcacttcgcaacgctcttaggctacggcgcgagggcagtaaacccctatttagcagaggaatgtataaccgagcttattgataaaaagctgcttgataaggattaccacaccgcaatacgagattataacagcgccatacttcacggcatagtaaaaatcgcctctaaaatgggtatttccacaattcagtcttaccagtcgtcgcagatatttgaggcgataggcataagcaaagaggttattgataaatatttcacaaatactgtaagccgtgtgggcggcataggtcttgaagaaatcaacgagggcgttgagtaccgccacagccatgcatttgacccgctgggactcggcgttgataccacacttgacagctttggcgagcataagctgcgctcgggagcggataaggaagaccatatgtacagccccgaaacggtgatagccctgcgcgaggcaacgcagctcggctcatatgtgcggtttaaggaatacaccgcaatggtggataacgagcgccgcccgcacacgctgcgcggattgcttgagtttaataccgagggtgtaacacccattccgcttgacgaggtagaacctgcaagcgaaattgtaaaacgctttaaaacgggcgctatgtcctacggctcgatttcgcaggaggcgcacgaatgtatggcaattgccatgaaccgcctcggcggaaaatcaaactcgggcgaaggcggcgaacgccccgaaagactgggaaccgagcgcggcagcgcaattaagcaggtggcttccggccgtttcggcgttacaagcgaatatttggtttcggcaaaggaaattcaaattaaaatggcgcagggcgcaaagccgggcgagggtgggcatctgccgggtaaaaaggtttacccgtggattgcgaaaacgcgttattccacccccggtgtatcgcttatttctccgccgccgcaccacgatatttattcaattgaagatttagcacagcttattttcgaccttaaaaacgccaaccgcgacgcgcgcatttcggtaaaattggtgtcagaggcgggcgtcggcacgattgccgcgggcgttgccaaggcgggcgcacaggtggtgcttatctcaggctacgacggcggcacgggcgccgcaccgcaaagctccatacacaatgcggggcttccgtgggagttagggctttccgaggcgcaccaaacgcttattcaaaacgggctgcgttcacgcgttatacttgaaaccgacggtaagcttatgagcggcagagacgtagcgattgcagccattttgggtgcggaggaattcggttttgcaaccgcgccgcttattaccatgggctgcattatgatgcgcgtatgcaatcttgatacatgcccctgcggtattgccacgcaaaaccccgagcttagaaagcgcttctgcggcaagcccgaatacgttataaactttatgatgtatattgccgaagaactgcgcgagataatggcaaagctgggcgttcgcacggttgaggagcttgtggggcgcaccgaccttataaaggtgcgcgaaaaaaccgttacaaagcgcgcggcaatggctgatctttcgcaaattctttacagcgataagtcagccccgcaggaggataagcattttaaagccgataacgtatttaactttgagcttgaaaagaccgtggacgaagcggttataattcccgcctttaaatcggcgcttaaagcaggcaagccgaaggctatcgatattgaggtatcgagtaccaaccgaacgctcggcactattttcggctcggaaattacaaagaaatataaaaacaccttgcccgatgatacctacacaataaactgcaagggcggcggcggtcagtccttcggggcgtttattccgaaagggcttacaatacgccttatcggcgacagcaacgattatttcggcaagggcttatcgggcggtaagcttattgtggcaccccccgaaaacgcaaaatacagggcggaagaaaacattataataggcaacgtggcgctttacggcgcgacctcgggcgaggcttatataaacggtattgcgggtgagcgtttctgtgtcagaaactcaggcgcatacgctgtttgcgagggcacgggcgaccacggctgcgagtatatgacgggcggcagagccgtaattttggggcctacgggcaaaaactttgccgcgggcatgagcggcggcattgcctatgtgctggatgaaaactacgacttttatttaaggcttaacaaggagcttgttacaatgacgggtgtagaggaaaagcacgatatcgaggagcttaaaaccatgatagaaaagcatgttgccgccacgggctcgcccaaaggcacacgcatactccatgattttgcaaattatctgccttactttaaaaagatagtgccgaacgattacagccgtatgttacaggaaataagccgctttgaggaaaagggtctgccctataaggaagccgagcttgaagccttttattcggtacagaaataagaaaggggaataaaaatgggaaaaccaacaggatttttggattacgagagagaaaacaataaatcggtaaaaccgcttgaaagaataaaaaatttcaatgaatttcattccccaatgcaaaaggcggagcgccaaaaacaaggcgcgcgctgtatgaactgcggcgtgccgttctgtcagtcggcaatgaagctcggcggaatggtatcgggctgtccgctgcataaccttatccctgagtggaacgatgaaatttataacggcaactgggagtacgctttagcgcggcttaccaaaaccgcaagcttccccgagtttacgggcagggtatgccccgcgctttgcgaggcggcttgctcctgcgggctttacggcagctcggtgaccgttaaggaaaacgagcttgcaattattgaagagggctacaaaaacggctgggtgaagccccacccgcccgaggtaagaacaggcaagcgcgtggcggtggtaggctcaggcccctcggggcttgcttgcgcgcagcggcttaacagccgcggtcacagcgttaccgtttatgaaaaggatgaccgcataggcgggcttttaatgtacggcataccgaatatgaagcttgaaaagcagattgttgaccgccgcgtaaagcttatgaccgacgagggcatagagtttaaaacgggcgtagacgtaggcaaggatatatccgccgacgagcttttaaagacctatgacgcggtggtgctttgctgcggtgcgggtaacccgcgcgaccttaaagccgaaaaccgcgacattaagggaatttactttgcggtcgattttcttaaatcaacaacaaaggcgctgcttgataataagcttcaatcgggctttatatccgcaaagggtaaggacgttataattgtgggcggcggtgatacgggaaacgactgcgtaggcacctgcatacgccacggctgcaaatcggtaacccagcttgaaatgatgccgaaattacccgacagcagggcagtgactaacccttggccgcaatatccgagggtatgcaagaccgattacggtcaggaggaggcaatagccgtttttgggcatgatccgcgcgtttactgcaccacagttaaagcctttgtgccggataacggcggcaatataaaggctgtggtaacggttgaacttaaacccgaaagggatgaaaagaccggcagaaccgttatgaccgaaattccgggcagcgagaaaacgcttgattgctcgcttttgcttatagctgcgggatttttaggacccaagccttatatcgcagaagtcttcggggctgaaaccgacggtcgcagcaatattgcgactgccgcaggctcttacaaaacaagcgttgataagcttttcacggcaggggacagccgccgcgggcagtcgctcgttgtgtgggcgatagccgagggcagagccgccgcaaaggaaattgacgaatatttaatgggatatacaaatttggtttaataaaagcaagactgtatatcgacatataaataaaacgacatcgaaggccgtgagttaggcttccgacgtcgttttttatatgtgtatttttatcaaagggtattcaaaatatcaagcacgcattcaagctcctcgggcttgaccttatcgggaaagctgccgttttcaacgcaatcggtgaaatagcgaatctcgttggcgtaggcgtcacttgcgggaagaccgatgttcccggcatcaagcccatctccgcccgaaatgggagaccaaattttgccgttctcctcataaatcttcatttcgccgttttcccaggctgccacggcgtgctcaaactggaagcggaacgccgccttaaacgggtagggggatgcataccacgatgcctcggtggttatgaaaaacccgtcgtattgataaaccgtattcaggtagtcttgtgtttccgtagtggatttaaaagcgtttgttttggcgggtttgccgaaggcgtaaaccataaagtccaaatcgtgaatgtgaaggtcaaagggtaccaagccgctgcggtttttatcggtcatccagttatcccagctccatttcgggcggcagccgaggcggatcatagagccggaaagcagattaccgtaggtcttttcgtcataaatctttttaactatttcatactcgggccaaaaacgcagaacctgcgctatcataaatttaacgttattcttttttgccgtgccgtaaacgcgcgcaacatcctcttttttaagcgaaacaggcttttcgcagaggacattaatgcccctttccattgcctttatcgagaaatccgcatgaagataggtgggaagacatatatcgagaatgtctatttcttccttttcaagcatttcgtcaaaatcggtgtagcggcgcttttcgggatatttctccatctgctcggagcgtatatcgcagagggctgtaagctcgacatcctccatagcctcccacgccggaatatgcgctccgcttattccgccaactcctacaagtgcaacctttaacatagtaaaaatctcctttaattaaataatgtttgcagttacaatattatcccagctttttgagcgatcgttttcaagcaccggctctgaaagctcgggaatagtatttgatttatccgcgcaatagcttaaaattctttcgcggcagctttcaagccgcattataagcccgccgagacgtatatcctgaacgtcgaagccgtggggcttattttcaaaaaaccaaaatctgcggaaagcggtgtaaaacgctttaagcttatctatggcggcggtataatcgttttcggctatgtctttaagcgtcttattatctcctgccaaatatgccgcgcgggttttaatgccaagctcggcttttaccgacagaacgtccgccaacgccgcagccgagtcaaacatcggcttgtattcgtccgtcgcctgtaccgccgaaagctttttgtaaagctctttgtagtaatcgttaacgccctcggtaacgcggctgtcataaatgcccataaacgggtcggagtaaagcagatatttggaggcgttataatttagcctttcggtaggattatccagcttatcaagcagcataaaatcatcaaattccatgcccgtaaccgttttaagccgtgtttttgcgtccgacatattttcatttccctttaaaagctccgccgaatagcaaagcgcgggcaaaaccgcgaaacgcgagcattcgccgccgttatcgccccacatggttatgaatatatcattaataccctcctcgcggcatgcaccgattgcgggcagggtggtatcaaagctgaattgattgtccggtgcgaagcctttccatgtccatgcgccgcctgcaaatatcacaggtctgccgagcgccttgtttttccttatcatttccttataatgaccgaaatccgtgctgtaataatcccagtaaacaggggatatgtttttcggcatatcggcttttttgcttatttcttctgagtctgtatcgccgtaataatccgatgaggcatttgcaaggcggaagaacatatcgctccacatcataggctcaaagccgtatttatcggcaatgccgcataccttgtgcaggtggcggttcagaatttcaaagcggtctgtatccccgtgcttatcgcggtatttgccgagtcctaccatgtgtgcttcgtccatgcctatatgtattttgcgcgaggtgaagcattccgaaagggaagagaacattttgtcgataagctgataggttttctcatcttcagccagcagaatgtccgccgtatcgttaatgccgccgtaaacgctctcccatttgaagattgcgttaagatgagccagcgtctggatgcaggggataagctcaataccgtttttacggcaaaaagcgtctgcctctttaagctctgcctttgagtatcttccgcgctgatgcccgaaatacggctcgccgtcaacctcatatgtatcctcggtgtaaagcattaacgtatcgtagcccagtgtcgatattacctttacaaaccttttaagggcggtaaggttcataaccgcgtttcttgagcaatctaccattaagcctttcattttgcttcaccgtaaaccctttcaattatgttttcaagatattcctttgcgtaaagtatatccttattctgctcttcgccttcaatttcacgctctattgtaacgtaagaatcgtagcctatttcatgcagcctttcaaacagacggttgaaatcgactttgccttctcctatgcgagtctcttcgccgaggtcgtgaccgtttgtgggatattttccgtcctttgcatgaatattgcggacatattttccgaaaacatcaagtgcgtcaaccgggtttgctctgccgtaaagaataacgtttgcggtatcgagattaacgccgagattatccgttcccaccttttcaaagcagcgaagcatggtgacgggcgtttcctgaccggtttcaaacaaaaggtattgaccgttctgctttaaatgctccgccacctgccttaccgcaacgcagaaaggcgcaaactgcgggtcgttcgggttttcgggtataaagcccatatgggtcacaacgtcggtaataccgagctttttcgcaaaatccgcgccgtcgcagaggtttttaatgcgcgcggccctgtattcaggcggaacaaggcctaaggttatctgaccgtcgtaaaaatcccacacggtaggtccttcccagccgcaccaaaatgccgaaacggtaacgcccttttctttaatgaggcgattcattatttcggcgttttcatccgtccaaacctcgggcttccaggaaataagctggcagctgtcaaagccgttcgcaagcagctcatcaagcttttttgacatttcgtttatatcgttcaaatgaacgcaggttccgatcttcataaaaactcctcctgaaaaatattgatttttctctgtccctatggtaacatacatatagtgtaaatgataggattattttgatttttttcagtatttttttgacttggaggtcgttgccttgaagctgaattatcaaaaggagctgactcccgtgctgtacggcgacagcgcggtaaaaattcatgacacctactcggtgactgagggggggctttgcttttcgctgcactggcatgagcgaatggagatacttctgataaccgagggcgagctggagcttttgctcggtgaccgaacggcgcatgcctctgcaggctccgtggcggtttttatacccgggcagccccaccgcggcatcgcgggcaggggaggggtcacctaccgcacggtcatgtttgatattcagaccttttacaattctacccccgccgcgcaaaagtatttattgccgatagccgagcagagaatatcgtttgctcccgttacatataacaaggagatatttgaaaccgcaaaatatattgtagatgagcagctttcgcgctctgacgcgtctccgcttacggtgataggcggaatttaccgccttttggggctgctttacagatattgtctttcggaaaagagcgtgcatgcaccgtccgatgaaaagctgcgcaatgttacggaatatatcgaaaatcatttccgcgagaatatttcctcaaaggaattgagccgccgcttcggctatgacgaggcgtacttttgccgtcggtttaaatcggtcaccggactcagtcccatgatatatatacagatattaagacttgaatacgccagaagggcgataaaaaacgaaaagggggtcaagatctcggaaatttcctcaagctgcggcttttccgatcccggctattttgccagatgctttaaaaagcattacggaatgaccccgacggaatacagcacactttttcaaatataaacagatataaggattgtgtaaaatgagagcgcatgatacggtcaataagctttacaaattgggacgggcactgtaacaaattgcgtttaccccaggcgttatgtttattttcactgcactgcattgttgacactgcgccgaggcaataggcggcgaaggaccacaccgacctcgagcatatccccgccaaggcggcgactgaggacagcgatggcaatatcgagtattggtactgcgaaagttgcggaaagtattacagtgacaaagacggcgccaaggaaatcaccaaagacgacaccgtaacggcgaagctgccgaagaatgaaaatcgaccgcagacaggggacagcagcaatcttatattatggattgcattgctctttgtcggcgtaggagccttgggcagtgcgatcgcttacaaaaagcgaaaaaagaaataattttcggaatcaaaaggcaaaggaaaagcgccgcagcttgagcggcgcttttttgtacatatagattatgaagaaagcaacaaatttattttttttccgcctgtgccatggcggcgatgtccccgactccgtttaaaacaatgctcgggcggtaggcataggtcttaagcgtatcgcgggtggaaacgcccgaaagtaccaaaaccgtggacataccgctttccataccggagattatgtcggtatccatgcggtctccaaccattaccgcctcggcggagtggcagttaagcagacgaagacccgtgcgcatcataagcgggtttggctttccgcagaaatatgcctgcttgccggtcgccatttcaataggggcgataagcgcacggcaggcgggagcaatgccgtcctcaatggggccggatacatcggaatttgctccgataagcttggcgcccgccataacaaggttggtggcttttgtcagagtgtcaagcgaatatgagcgaccctcgccgaccacaacataatcgggattaacatcattcatggtgattcccgcgttataaagggcgttgagcagtccggcctcgccgattgcgaaaacagagcagccgggcgcctgctccttcaaaaatgccgccgttgccaaagcgcttgtataaaaatgctcctcagatacatcgagccccattcgcttaagcttttgattaagctcacggggcgtatagccgctgttgtttgtcagaaacagatactctttattctcatcatgcagccacttaatgaattccgccactcccggcaggattcggttgccgtggtagattacaccgtccatatcgcaaataaagccttttttcttgttaaaatcaattttaccggctgtaatattcataatccttattcctctccccgaatttgataaattcattatatcatcattgagttgaaatttccatcaaaaaatgcaaattttatgttaattcgaggttaaatcccgctttttgtattcggcagcagcctgctaatattcttacagataaaaaagacctttgagtagggagaaaagaatttcttctgactcaaagggaagttgataagtattgcttatatttccgtttgtcggcagaatgcggtttatgccgaaatttttgaataacgttccgaatctataatttccgtcatgacagagtaaggggaaaggtctccgcctgccaccatggaaaacaggcggggcgtgcagccggaaaccagggcagcgccctgctcgttctttgtcacgggctgattacggttacggctcgcaacattccagaagacgatctgaggtaatttatacccatgctccgcaaatctttcacacaatttacgcgttgtatcatggatttaattaatataggagatgaaatagacagcgaagtaaaaagaaaaaatctagatttgatttgtgaagctataagtcataatttgaatttcgagaaaacagttgtaaaccaaattataagtgatttatctttatcgaaaatagatgattatttaaagtctccacatggtttcaaaaatattgatatttggccgttgagattcaatcgccgcctttcttttacgagaaagccgatagcatctgtagataataatctgatataaactccttgttttccatactctctccaaaacggcaaatacgttatttgtcgctttggagaaagggctatcctaccggaatagcctttctcttttatttgcatgatcagaatctacctccgccgcctccgtgcgttctgccggaggaggaagtgtgtgtgcgggagccaccggaggttgactctttcggcttcgcatgacggtctatgtgcttgtaaaggaaaaagtcacgggactgtgttactttcatactgccggttttcacgtaatctgcagcttccgcctgtcggcgtaccgtttttagcttgcctttcattcttccggttataataagcgcaacaaccaaacctatccctaatgatacgagaagacttcttatgtaattaaaatcttcttttggaagatcatctacatcaaatgggtcaccgcttcgagccctattgatgaattcatcgcagaggtcggcataggttacaaaagcgtcgtaataatccccatcgcctaaatcatccacaaactgctccgccatatattcacgaccggcatcggtaacggctgtaattccgtaacccgaagttgagatataccaatcggaattttccatgcttatgagcagtaaaacaccgtcctcggcatagcagttaaagtcataaaaatcatcggcataatctctcggtgttttgccgtccaaatcatttacagtgacgatcacaatatccgtttgctgattgctgcttatgttcgcaagctttgacagcaaggcgctttcctcgctatcagtaagaagatctgcattatcaacgagcaggggcatattaccctgtgcgaaggcaggtacagacaggctcagacacaggagaacagcaaacaaaattccaaataatcttttcttcattgactgcacctccttatagcaaccacagcaaataggaaactgcgaaaacggcagcccctattaagccggttaagccgaacagccacttcttataggcacccttatcaagcggaagatccccgataaacttgccggtttgcccgttcatcgcgaaggtgtatctttgtccgttccatgtggtattcagcagccaaaccggatacaaagcatatttcgcttttccgttttgcaggcggatacttgttgattccggtataacggtggaatagccttgtacagtagaggcaaaggcgttttctgtactctttttgatacgctcgtttgcccgttcaatgctttgctcggaatcaacatcatatttgtccgccagaaaacctgccagatatgccgtttggaaatccacagcaccggtaaagtcatatggctcaatggattccatgagtgcgtcatccattttggttgagccatccaccggcacacgctcaaagcctattttgccgccacgactaatcgcataaaagctggtttctgtatagttgtagttgctgtcgctccacgcacggacttttgttgctttgtaacggatattcgcgtcggcatctgcgttgaacagccaaaccggaacataaatacccttaatttcatcaatgtgattctgatccttaaacaccttcggtaacagcagcttaccgccataatgcttttttaatgctgcttttgccgcttttttatccacccgaaaaggaatgacataaaagaatacacaagacagtaatcccattcagcaagcagtttcctgtccgttgtagctaaatcattgtatcctgcaagaaccgccctgtccgcacaaaccgggcatactgttccttttacacgaacattgatgtttctttcttaggctttgcagcagcttttgccatttgtattacctccacattctattagctactctaatacaagtagcttaaatgacaaagtgaagttagggtaaatatatccttttcacaacaaaaagcc

SEQ ID NO: 2352 - DNA, 5864 bp, Unknown
  16S sequences of unknown bacteria
agacagcgtacaatcatgcgaatcggcgttccatctaaatgaaacgtttcccgaatctgattttccagataccgctggtaggaaaaatggaacagctcttttgagttgacaaaaattacaaacgtcggcggcttggtagaagcctgcgtcatatagaaaatccgcaggcgctttcccttatcggacggcggctggactcgcgctgtcgcataggacagcatatcattcagccgccctgtgggaatgcgcatggcattctgctcacccacataatgaatcagttcgtacagcttttccacccgttgtccggtcttggcggaaatgaacaaaaaaggcgcgtaggacataaagctgaaatcattttgcagctttttcgtgaattcctgcatggtcttcccatctttttccaccgcatcccatttgttgaccgcgatgatgcatccctttccctgctcatgagcatatcccgccactttggaatcctgttccgtaaagccctcggtcgcatcaatgacaatcacgcatacatccgagcgatccaccgccatataggagcgcagcaccgaatatttttcgattgcttcttccacttttgctttgcggcgaatgccagccgtatcgataaacacaaactggccatattcattttccacaaaggtatccgtggcatcccgggtcgttcctgcaatattggaaacgattacccgctcttcacccgccattcggttaatcagtgacgactttcccacattgggctttccaattaccgccaccttgatattctcatcgccatattcgtcctctttatcaaaatccagatgcgcatagcaagcatccagcaaatcgcccacaccatgaccatgtaccgaagaaacaggatacggatcgccgatgcctaaattgtaaaactcatataattcaggtggtggtgtgccaacgctgtcgcatttgttcacacacaaaaccaccggcttgccggagcgctggagcatggaagctacgtcctgatccgtggcggtcataccagtacggatgtccactacaaaaaggatcacatcggcgctgtcaatcgccatttgtgcctgccggcgcatctgggacaaaatcacatcgtccgtttttggctcaatgccgcctgtatccacaatatgaaaagttttgttgcgccattccccttctgcgtaaatccggtcccgcgtcacgccgggagtgtcctccacaatggacaggcgttttcccacaattttattaaacagggtggatttgcccacatttggccttcccaccaccgcaatcagcggttttgacatagaaatccccttctttctgacggagtggagccgatcgattctcttcgaccataccaatcggatccatcttccgaaaattctgccggaaaaaccagcgcgccacttttcaaaggattttggtagtaatcttccgaaatataacaagaaaatctatttttcgtctggcctgccaacaaatcatgcgcagcgatctaaacagcgctaagccgcttattccgtggatagtataccacatttttcccgctttaccaaacataagcaggattgtcgtcttcttcacccagcagcgccagtaaaaactgcgtaccatcgttatccacagttcgcactggaacccccaacgcctgctgcacatcttggattgtctgatcgtctaaaaatttgtcctgttcatggcgcagcatcacgccggggatcagcaattcttctcccaaatctttcccttttagctgccggatgagatctgtggccgtcaccaatcccgcaactgtaatattttcaccgaaatagtcattgtgaatggcgtagaccgtgcagttcagccccggaaaacgctgctgtacccgatcaatctgctcccgcaggaaattcgccggtgcctcgccggtggccagacttacacggcggtaaacgccgtcatcctcccagtcttccagcgcgtcggacagttcctgcctcaacagggataaaagccccacgccattttccagctggttgtattcaccataatacgcatcatccggtatcggcatctctgccttgagaaaaaattcatctgccgggtaagccatccttacccctttccgctgcaaaaaatcatctgaaaaggcgtggatggtcttgattacttcctgtgcttcttctttggtgtacgggcgcaatgggaacagcccttcccggtacttggttagtcccactggcaccgccgcaatgctttctacgctgggatacagctttcccaattcttttagagagtacaccaattccgccccatcgttgattcccggacacaataccaactgcgtattgatcttaatccctgccgcagccagctgccgaagataatctagcgaagatgcagcctttgggttcagcatcattttctggcgcagatctggattcattgtgtgtactgaaacattaaccgggctgatgtgcattttaatgatcctgtcaatgtccttttgttccatgttggtcaaagtaatataattgccgaataaaaaggacagccgggcgtcatcatctttaaagtacaacgtctcccgcatgccgggaggcatctgatccacaaagcagaaaatacatttattcttgcagtgatgctgtttgtccattagataagaatcaaactccaaacccagctcctcatattcgccttttcgcacagttacacgccgggccgctccatttacatccagcaagtcgattttcaattttttatctgtcatataaaactggtaatccaggatatcttcaatctgattttggttaatggccgtaagcttttcgcccggacggattccggctttatctgccggtgagccagaaaccaccgacataatctgtaccgccaaagcggcacctcctttttgagtatgatcaacacgccaatcccatttgcgggcacagaagcgtttttgatgaggctataagcaaatttcccgctgccgtttctagtcaagcagcaatgttttgctatttcacagctttgctcacaggatgaaaaatgtaaaataccgataggattcggttgctttgcatcagtaaaacaatttttcttctttcagcaaccgttaaaaaaggcaggggcggaactgcatcctcccctgccttcaaagagactattcagcctccatcttaatgacttctttgcctttgtagtaaccgcagttcgcacaaaccttgtgaggagccttcagctcaccgcactgggagcatttggagaaccccggaacgctgattttccaaacgttggaacgtcttttgttttttctcgctttagacgattttctctttggtaccgccatttcagcacctccttaaagattatgattctttaaaaaattcactgagaatttgaaggcgaggatctggctgcttcagatcacatccacagtctttttcgtttaagttggcaccgcatacagggcaaaggcccttgcaatcctctcggcaatacaccacagaaggcagttccagaagaatgtcggatgtcgccagatcatccaaatccagctgattgccggacaccacaatgaagtcgccattgtcttcttcattcaactgacgaaccaggacgtgctcaaattgataaacttcagcacgccgctgccgttccaagcatcgtccacacatcaaattataatccatctgcgcttcatacgcgatagacacaatcccagcccggttatataacttaccggaaagatggatcggacggtcaaaaggtgcggttccccacagctcgatagcggacatatccaagtcatgagtgaaaggaatgacctggccctctacctcaaacagctgctttacatcaataaacatcatgatacctcataacgccacgaattttattatatcgacatcaaaaaggtttgtcaatacaagtttggcgtaattttactttttcatacattcagccgaaaatccagctttcaggccataaaaatacatatattcagcaaagatatctgctttttgcccgtaattccccgctaaaaaggaacgggcgcatgctttttcatgcgcccgttttccaccgcacaggttagatgatatagggcagaaccgattccggcaactcagaacggtcgcaagatacagtaaatacgatttccaccttattttcggcagtcaatttttccagctttccgatcatttcagcaaatgcaccaagatctctgccaccaattttcagcgtcgcgtcaatgaaaatttcagtaatgtcataatttcctgcgcaaatgccggcgataaagccataaaacgcatcaaaaccagctacgccatagctttcaatgtcgatcaaacgaaccgaataatcaatatcataggtcattttcagacccttttcaatgcagacaatgttgccggaggtggtctttgccgctttgttaatcatgtcgatcaaagttttggtttttccggagcctttgttacccacgataagttttatcatgtttatatcctccttaggttataaaatcttctatggattcgcccgaaggcgaaaacaacaaatttatttaagttttgcttccagctgggcttttttatcctcatagccgggtttgcccaaaagtgcgaacatattgtttttgtaactttccacaccaggctggttgaacggattgactcccaacatatatccggatatggcgcaggctttttcaaagaagtaaatcagataacccaaatggaactcgtccatctgcggcagttccagaatgacattgggcactccgccctgggtgtgtgccagtaccgttccctggaatgccttatcgtttaccactgacatattttggttcgacaagaaattcagcccatcaaaattatccgggtcattttttacaaaataatcctgaatcggcttttcggggcgaattaccgtttcgaacataattctggacccttcttgaataaactgccccaagctgtgcaggtcagtggaaaacaccgccgatgaaggatacagtcctttgttgtctttgccttcgctttcaccgaacaactgcttgagccattcattcatcatggcaaaagccggatcgtaggtaataaacatctcaacgcttttgcccttacggtagagaatattgcgcagcactgcatatttatagcagtcgttccgggaaagatccggttctgcatatgcttcccgcgccgccgccgcgccgtccagcagcgctttgatgtcgatgccggccaccgcaatgggcagaaggccaactgcggtcagtacggaaaaacgaccgcccacatcatctggaacaacaaacgtttcatagccttctttgtcagacagttccttaagcgtcccttttgccttatccgttgtggcatagatacgatgttttgcaccttctttgccgtatttttgctccagcagttcccggaaaatgcgaaacgccagcgccggctcagtggtggttccggatttggaaatcacgttgactgaaatatcccgtccctcgcaaatagaaagaatctcgcttaaataggtcgggttaatggaattccctacaaaataaatatcgggtgtatccttttttttgttgttgtataaaggagaacgaagctgctcaatcacagcccgtgcgcccaaataggaacctccgattcctatgacgatcattacttcgctgtcacttttaattttttccgccgctttttgaattctcgcaaattcttctttatcgtacgctaccggcagatccagccatcccagaaaaccatttcccaaaccacttttgccgtgcaacgtctcatgtgcggctttcatttgaggaatcatcgcttcccattcatgatcgccgataaaatcgt

SEQ ID NO: 2353 - DNA, 4077 bp, Unknown
  16S sequences of unknown bacteria
tctccaacaaaacattttttattttttcactgtctacttgacagggggcacttcatttttatgcggtgcgtccggttttgcatattctgtttgtgtgcttgcgaattgtgtgcggtggtttaggctagcgtctggagcgtgatcttctccgcggccggtgcggcgtccagatggattccggcgatgggggcttcgaagctgtcgatgatggcctcggcgatcgggtcctcgatttccttctggatcgtccggcgcagattccgcgcgccgtaggtgagggagtaggattttttgacgagataatcatagaccgcgtctgtccagtccaggccgatcccttgttcccgcatcgcatcgcgcaattcttccagcataatgcgggcgatggcgcggaaattctcctccgtcagcttgtggaagcagatgacctcatccacccggttgatgaactccggccgcaggaagtcgctcagagccttcatggccttctcctgggagagctccgagatcgtccggccaaagccgagggtgccgtccttccggtcggacccggcgttggaggtcatgacgatgatcgtattttcaaagttgacgacccgcccctgggcgtcggtcatgcgtccgtcgtccaggacctgcagcaggatattgagcacatccggatgggccttttccagctcatcaaagaggatgacggaatacgggttgcggcgaattttctccgtcagctgcccggcctcatcgtagccgacatagccgggaggcgacccgataagcttcgaaacggcgtgcttttccatatactccgacatatccagccggataagattatccaccgagtcaaacagctcgttggccagcacccgcaccagctccgtcttgccgacgccggtggagccgacaaagatgaacgacaccgggcgcttcttcggcgagatgcccacccggttgcggcggatggcccgggccacggcggagatcgcctcgtcctgcccgacgatatgggcgcgcaggcggtcctccaggctgcgcagctgggcgtattcctgggcctggatcttcgaagcggggatcttcgtccagagctcgatgatgtgggccaggttttccatggtcagttggggtgtcggcttggcctccaggacggtgatctcgtcttccaggacgcagcggtggctgcgcagggaggccatacgttcaaagtcctggctctctgtcgagtcctccagcagcttcagctccaggtcgatgtcgtcccggtcctttttcttctgggccagggcggagatatccgggtcccgcaggttcacgtcagagcaggcctcgtccagaaggtcgatggctttatccggcagaaagcggtctgtgatatagcgctccgagagcaggacagcctgccgggcgatctccggcgaaattttaaccccgtggaacgattcgtaatagtgggcgatgccccgcaaaatggctgtggcctcctccagggtcggctcattgaccgtcaccggctggaagcggcgctccagggcggcgtccttttcgatatacttccggtattccttgaatgtcgtcgcgccgatgacctggatctcgccccgagagagggcgggcttgaggatattggccgcgttcatcgagccctcggcgtcccccgcgccgacgaggttatgcacctcatcgatgacgagaatgacgttgcccatggccttgatctcgccgatgaggcttttcatgcggctttcaaactggccccggaactgggtcccggcgaccagggccgtcatgtccagcagatagacctccttgctgcgcagcttgaaggggacggaccccgccgtgatgcgctgggccagcccctcggcgatggccgtcttgccgacgcccggctcgccgatgaggcaggggttgttcttctgccgccggttgaggatctggatgacccgttccgtctcgacgtcccggccaacgacccggtccagctgcccgcgtcgggccttgtccgtcaggttcaggcagtactggtcaaggaatttgtgcttcttgcccttgccgggcttggggccgtcagagcgctcgtccttgggtggctgcggcgcgatggcctcgccccggtcggcattgttgaagagcttgttgaggaagggaaacgtcgccgtttggctgtcggtctcgtcggtgttgtcctcgtcgccctcggtctgctccgggagcatctgacccagcatatccgtcatttcgtcgttgatatggtccaggtcctcgtcggagatgcccatctggtgcatgatatcatccacctgcttgagccccagacccttagcgcacttcaggcacaggccttcattgacggattttccgttttcaattttggtgataaaaattacggcgacattctttttacatctggagcaaagattcggatgcatagcgcgcctcctttcgttgtcttgagagatcccggcgtcaaccggcaaagagttcagcccggtcgccggagaccaacagagcggtcccgtcgctgcgggcgacgactcggctggcagtgctggtgtccgccgtctggccgcagaccttcaggcgggcgttgtagatggtcaggcccttcgtcgtcaggacggcgaggtaattacccgcggcgctcaggtccagaatttcccccgccagctccaggctggctatgggctttcccgcggtatccagcgtcgtcaggaccggcgtgccgccggtgcggttgtggttcgtcgccacggcgacaaagccgctgccatccagactgtaatgggtcaggtaggccccttcataatcatatatgccggtctgcttgccatcgatgctgaaaaagacggcgtcgttctcgccgatggcacatagggtgcggcttgcgaggaaggccaggtccaggtacagggcgttgcccagagccagctctgccaccggctcctcccggcggaagagcacggcggtgcttaaaaagtcgttgttctgctggcccagccggatcccggccaggttcgtgccgctgctggagacggcgcactggttaaaatatgccgtttctgagtaccagcggtaaatttcattctgttccgcatccaggacggtgaggagcgtcttatcggatttcgtcgccagagcgtagcacagggcgccgtcgtctgccaggtccgcgtctaagatcgttccgtcgagccggtcctggaagacggtgcccttgccttttttgacggcgcagatggtgctgccgccgatatcgcaggccaggacggtgtcctcgccgctcttgagcaacggcgtactcatgccgctctggacggcgttggtctcttcgttgtaaaggtcataggtaaacagcccgctgatggtgccgacggccagcccgccgtcaaaggcggcgtagccattgttcgtgtgggcatcaaaggtgatggtgccgtattgcccgtggtggaagagccgccgcagctgcaccagcggattgccgcccgccagcgccaggaagccgactaccagcaccgccagcacaaagacggcgatgacgatcgccagccgccggttgcgccgcagcgcggccagcatctgccgcagatcaaaccggggcttgccagcccccggctgcggggcctgattagtctccaatatgaaacgccacctttccgtcgtcgtaccacagctgggagagatagagcccgcccggcgggaccgtcggcccggcggccgtccggtcacccttttccagaattgccgggatatccgtcggggcaaatttcccctcggcggcgtagacgatcgtcccgaccatggcccggcacatgttgtagaggaagccgttggcgcacacccggcactcgatcagatcgcctcggcgctggacggtgaagtggtgcaccgtccgcacggtggttttgaccggcgtcccgacggagcgcaccgccgcgaagtcgtgggtcccgaggaattggtctgccgccgcctgcagcacgccctcgtcgaggtgcttgggataaaaccaggcgcggttgacataaaacgggtcccggatgcgggtgttatacaacagatacgtgtattccttccggc

SEQ ID NO: 2354 - DNA, 2416 bp, Unknown
  16S sequences of unknown bacteria
cgggcatttacgcatatctcatcgcctttttcgtactcggcgcggcggtgggcgtgttcgcgtccgaaaatctgggcaattacagcgtgctcgtgtgcgcggcgcccctcctccccctcttcgcgttcatggtcgcggaagatttcaaaaaaaccaaacaggaaaccgaataacggtttcctgttttttacatgagcggaatattgttttccgcgcagtagcgcacggtcttttcgtcccacaacgaaacctgcacttcgccgatgtgcattttgttcaaaaggaacaaacacaggcgcgactgtccgatgcccccgcccatggtgagcggcaactcgcccgaaacgagcgctttgtggaaaggatattgcagacggtcgaggcagttttccgccgccaactgtctgtgcagcgattccgcgtccacgcggatccccatggaagagatctcgaacgcgcagtcgagcacgggataatagagaaggatatcgccgttcaacgcccagtcgtcgtagtcgggcgccctgccgtcgtgctttgcgcccgatctgagcggcgcgccgatctgcatcagaaacgtggagccgtgttcccgcacgaatgtattttcgcgctccttcggcgtgagatcggggtacagatcttccagttcctgcgtggtgacgaacgtgatctcttgggtcagaaaattatcgagggcgggaaattcgcggcagatctcctctgcggtattctgcatggcggcgtaaattttgcgaacggtttttttaaggtattcgacgtcgcgcacctcgcgggtgatgaccgtttcccagtcccactggtctacgtacagagaatgaagattatccagatcctcgtcgcggcgtatggcgttcatatccgtgtaaagcccgaaaaagggaccgaatttatattttgcgagcgcaaaacgcttccattttgcgaggctgtgcaccacttccgcggtttcgcccgtcgctttgatatcgaaggacacggggcgctccacgccgttgagattatcgttgagaccgctctctctcgtcacgaacagcggcgcggaaatgcgcgttaagttaagcgcggaggaaagttcgcgctcgaaaatcgtcttgatgtctttgagcgccttttccgtttccataagattgagtttggaatgatatacagacataaatttctcctgttgcggaatattataccaaaatacgcgatttttcgcaaaccattttataacagatcggcaaaactgtatataaattcgtcggaaatccgctttaattcttccaccattcccgcggcgctctcgtcgtacacggctaccgtgcgcatattcgcgctttttgccgagcagagggcgacgaaactgtcctcgtacaccacgcagtccgcgggcgcaaggccgagtttttcggcgcttttcaaaaagatatcgggaaaggatttgtttttacgcacttcgtccacggtggtaaaaccgtcgaacagcgaaaacaggccgttgttgcgcaggataggttcgtacaattcgggatgggaggctgtggctacgcacagacgcacgccgcacgctttcagcgatctcagatattccgccgcgtagggtttcatgtagcgggcgctgtccttcgccgcgtatctttccagcgacatttcgcgccattccgcgatcacgtcctcctctttctcgttcggcaggtattgcccgacggtgaacgccgcgcactccttaaaaccgagatgggcgatggatctctggtaatcggcggggaccgacatattgcgtttggcgaaaaactccctgtcgatatccagccaaagccccatgctgtcgatgagcgttccgtcaagatcgaaaattgcacctttcatcgtatgtactcacaaaaaaataagataaggatattctatcatatccgcgcggttttggcaagcgggcggcaggcaaacaaatccttgtctattttcggaaagtgtgatagaatatataaggaaatataatatcggagaaactcatttgcaaagcgaacctcttctttccgtcattctgaatatcgaaaattcacaggaaaatctcaaccgctcgctcggcgcgctgttcgcgtgcaagaacgagcggcccgtcgaggttcgcgcggccgtccgcgcgggcaaatttgccgcgccgcagatcctatccgtctaccagcgttcgagcgcgcttttttccttcaccctctgcggcgaagaatcccccgaacagtccgtcgcaaaggaaatcgaaaaggcttcgggaaaatacgtgctcgtggccgacggcggcgacgttttttccgccgacggactttccgaactcatcgattatctcgggacgctctcctcggacgccgtgtttttcgataccctcgaaaacggcagacggacgcccgccgcg

SEQ ID NO: 2355 - DNA, 30908 bp, Unknown
  16S sequences of unknown bacteria
cttgttgcggcccgctccaccctgcggggcgttgcgggcttcggggctgcggagcggcttcgccgctgtcctcacccctcggtgcttcgcacccttgttgcggcccgctccaccctgcggggcgttgcgggcttcggggctgcggagcagcttcgccgctgtcctcacccctcggtgcttcgcacccttgttgcggcccgtgccatcggtatttcaaaccattctgtttttcatccctgcggggcgctgaaccttatcgccattctgcaaatttgcagggctgatctcgaaatcagcccagtcccagcagccggcccagctggaacaccagcgtggccagcgtccacgccagcgccgtctgggcggcaatagttccgtaggcccagcggctgctttccatttcccggcgcatggccgccaccgccgccacgcagggcatatacagaagcacgaacaccagaaaggacaccgccgccagcgttgagggaaaaatctgtctcatcactgaaaccatctgggcgctttccgcgtccacgccgctcagcaccgccagcgtgctgaccacgctttccttggccatcaggccggtgatcacggcggtagaggcctctacggagccgaagcctgccggggcgaacaccggcgcgatcagtccggcgagcttgcccagcatactttcgccgatctcggaggtcatttccagccggaaggtgaaattctgcaggaaccagacaatcagcgtcgccaggaaaatcacggtaaaggcccgctgcaggaagtccttcgccttatcccacatctgccgcagcacattggccggggtgggcagacggtaggcgggcagttccatgatgaagggagccgcgtccccgtggaatacggtgcgcttcagcaccagcccagcgccgatggcgacgaggatgcccagcaggtacatgccggtcatcacccacacctgatttcccgggaagaacgcccgagtgaacagggcgtagataggcaccttggcgccgcagctcataaaaggggtcagcatgatggtaaaccggcggtcgcggtcgttgttcatgcttcgggcgctcatgacggcgggcacggtgcagccgaagcccatcatcatggggataaagctgcggccgttcaggcccagcttgcgcaggggcttatccatcaggaaagctgcccgggccatatagccgctgtcctccagaatggacagcagtagaaacaggatcacgatggtgggaaggaacttgagcacgctgcctacgccggtcagcacgccgcccacgaccaggtcctgcacccattcggccacgcccgcattgcggagagcgcccgccagcagcgacacgccgctgtcgatcagcagggcgaacccgtcggcaaaaaagctgcccaccggcccgaaggtaaggaaaaacaccagaaacatcatcagcaggaacacgggaatggacagaagcggatgggtcagcacgttgtcgatgcggtcggtcagcgtgttttcatccgtttgtccccgcttaaagcaggtggacagcagcttttcgatgaagcggtagcgggtgtccgccatgacggcggcgcgctccatgcccacggccttttccatggaggaaagaatttcctcgatgatgtgccgggtctcctcgctcagacccagttcttcttccagcggcttgtcgccctcgaagagcttggtggcgatgtagcggggctgcatatgatgctccctcgcttcgtcctccaccagatgggcgatggcgtgcagcgccgtatgggcctcgccgtcgcagatgtccaacttcgggggcacggtcttgttttctgccgcctccatagcccggctcaccagctcgtcaatgccctcgcccttccgggcgcagatggccaccaccggcacgcccaatcccttttccagcccggccagatcgatggaatctccgtggctgcgcacttcatccatcatgttcagggccaccaccaccggccggcccagctccagcagctgcagcgtcaggtacagattgcgttccagattggtggcgtccacaatgttgatgaccacgtccggctgatccctgacgatgaaatttcgggagacgatctcctccatggaatagggactgagggaatagatgccgggcaggtctacgatggtcacgtcgctgtactgatcgggcaccggcttgccctcctgctgctcccggcgcacccgccagggaaggcccatgtgggtctgcttgccgtggtgatggtgcagcatggtgccagttttctgctccaccgtcacgccgggccagttgcccacatgctggttggagccggtcagttgattgaaaagggtcgtcttgccgctgttctggttgcccgccagcgcgaaagtatactgcatgaggaaacctcgcctttcccttttggaattttgaaaagaataaacaacgtgtcaaaaatggaggtgcagcagtgcccctgcacctccgcttttttcagttcttgttatttcagcgtaattttccgcgcatcatccagacgcagggtcagggcatagccccgaagatggatctcaatgggatcgcccatgggggcggttttttgcagaagcaccttcacgccgggcgtgatgcccatatccagcaggtgacggtgcagcgcgtcctcgccgcccaccgtatccacgattccgctttccccgggtgtcagatcggccatggttctttgtttcgcttcgctcatgaatgttcctccgggcgcaccagcacaggggacaacccctcctgccgcaggtatttgcgcagttcgtgttcaatgatgttggcggcgtttaccgcgccgtcttcgctttccagacggatgcccagttcccgggccgctacctcgtagcgcttttcgctggtcagctcgatcagggcccggctcagtttgcgggcggtgaggcgctcccggggaatcggcttggggccgacgcccagcgcctgcacccggctgccccagaagggctggtcgccgccgaaggggatgaccagcgtaggcagcccggccgtcagcccggcagccagcgttcccgcaccgccgtgatgcaccacggcccgtacccgccggaacagccagtcatggggcacgaagcccgccacatagacgttatccggcagtttctccggcaggtcgccgccgccccagcccttggacagcacggcccgaatgccgctcatgcgcagggcttccagcacgatctccagcgtttcgcccatatcgccgctgaccatggagccaaagcccacataaatgggctttccgccctcggaaaggaactgctgcagccccggctccggggtgtattcctgcggattgtccgccagccagtagccggtcatatggatgttcgcgccccaatccgcaggccggggcatcaccagcggactcagcgcatacagcacgggaatggtatggccgttcagttcataggaagccttgttttccagcttacgtggcggcaggccgtgctccttgcgccaatcgtccagatagtacttttccatcgtgctgatgagaaaatagcccagatgatagctggccgcgttccacgccttgcccatacgctggccgggggcggaagcgatgggcgcgtcggtgttatagtccatcacgaaatactgggtctggataaaaggcaggtgacgcagttccgccatggagcggatcacctgcccgaagaacgtgccgatgatgcagtcgcactcggcggtggcgtcctccagatccttcatgaagggatccaccacatccttcagggagttgcgcacctgattgagatacgccacaccgttcacgccgggcttcatgatattgcccataaattcccgcacattgccggacaggccgtggaagcccagtccttcgccggtaatcgtcttttcaaaatcggaaaaagcggtaatcgtcacctgatggccccggcgctgcagttcgcgtcccagcacgatatagggacgcacgtcgccggtggaaccgatacaaatcatagaaatacgcatttttctgctcgcctcgctctcttcgagattccctcgggtttcatttctgtcgttcaggaaggatgcttttgccccggccaaaacacaccggtgaaaacatccgaaagggatgtggtaagtatagcgcaccccggcccgaattgcaatgtttgagaattacctgatgctaactttcagcttgacaatgcagctcgcaggtcttataataccgttttgaaaatgaaattcattttcaaataagcaaaataaaggaggctgcgccatgtctgcccgcggttcctatcagacccgtcagcaggaagcggtagcccggctgtttgaaaaccggcccgacagctgcctgacggcggaggaagcctatcaggagctggaaaaagagttgagccgggaagggctggccatcggcaagaccaccgtgtaccgcgccattacccgcctgtgtgaaagcggggagctgcgccgctacgccccgcaggaaagcggcgaatcggcccattatcagctcaaccgctgccgggaaagccacctgcacatccgctgcgtgcgctgcggcgctatggagcacctgcactgcggcgagatcgacctgttcaaggagcatctgtcccatcatcacggcttttcgctggacgagggacggacgctgctctacggcctgtgcgccgcctgtcaaaacaaggaggaaacccattgattcgtcggattgctgcctttttctgcgctattgcgctgcttttttccctttcgcctgtccgggcggaatcgtcggaggaacctgcccggcttcggctggtagccgccgtctttcccgcctacgattttacccgggtcatcgccggggacgcggcggaggtcacgctgctgctgccgcccggggcggacgctcattcctatgaacccaccccgcaggatatgatcgccattcaaaacgctgacctgttcctctataccggcggcgaaagcgacacttggctggaacgggtgctggcttcgctgggggacgacgcgccggagaccttcgccatggcggactgcgttaccctgttggaagaggagcattcccagagcatggctccggagcacgaccatgaccacgacgaggacggccacgaggaaatggacgagcacgtctggacgtcccccaaaaacgtacagctgatcgttcgggctctgcgggaaaagctgtgcgctctttcccctgaaaacgccgaacgctttatccaaaacgaagccgcctaccagcaaaagttgcaggcgctggacgagcgcttcgagaccatcgtgacggagggcaagcgggatctgatcgttttcggcgaccgtttccccttccgctactttgcggcggcctacggcctgcgctatgacgcggcctttcccggctgcagcgaggacagcgagcccagcgtgaagaccatcgtttcgctgatccgcaccatccgggaagaacaaatcccggtcgttttctacattgagttttccagccgcaaaacggcggacattctggccgaggagaccggtgcgaaggagctgctgttccacagctgccacacggtgtcccagcaggaaatggacgagggggccagctatctgaccctgatgaaccgcaacgcggacgcgctgaaggaggcgcttgactgatatggctttgatcacctgcgaccactgttccttttcctacgagggacacacggtgctccaagacctttcgcttcaggtggagcggggcgaatatctgtgcatcgtcggagaaaatggctccggcaaatccaccctcatcaaggggctgctggggctgatcgctccctccaagggaaagatcacctatgaagccggttttcacaatacggagatcggctatctgccccagcgcaccgaggcccagaaggattttcccgcctcggtgtgggaggtggtctcctccggctgccgagggctgaacctgttccccaccaaggctcagcgggagctgatcgaccgaaaccttgcgctgatgggcatggagaatcgcaaaaagagcagcttctcggagctgtccggcgggcagcagcagcgggcactgctggcccgggctttgtgcgccacccgcaccatgctgctgctggacgaacccgtggcggggctggacccaatggtgacccgggaaatgtaccagaccatcgatatgctgcaccgggaaaaggggttgactgtggtcatgatctcccacgatctggatgcggcgctccgtcagggcgaccgcatcctgcatctttctcatgacggcatttttctgggtacgcccgaggaataccgccattcccccctggggcagcgctttgtgggaggttgcagccatgattgacgctctggtcgaaatgttttcctatcggtttatggtccgagcgggcgtagtgggcctgctggtgtccctgtgcgcggcgctgctgggcgtatgtctggtgctgaagcgctactccatgatcggcgacggcctgagccatgtgggcttcggtgcgctggccgtcgcttccgcgctggggcttgcccccatgacggtcgccgttcccgtagtggtggtggccgccttcctgctgctgcgtctgtccagccgcggcaagctcaaaggcgacgccatgatcgccatgatctccaccgccgcgctggccgtgggcgtgatcgccctctccctgtccaacggcaccaccggcgacgtgaacaattacctgttcggcagtgtgctggctatgagcgaaagcgacctgaagctgagcgtggtgctggcggcggtggtgttgagcctattcgccattttctatcggaaaattttctccgtgacctttgacgagaccttcgcccgggctaccggcgaaaaagtcgagcgctacaacgccctgctggcctttctgaccgccatcaccgtggtgctggggatgcgagtgatgggcgccatgctgatctccagcctgatcgtgttccccggtctgacggctatgcgggtgttcaagagtttccgcaaggtgctgctctgtgcgctggccgtttccgtggtgtgctttttcgccggattatgcgcgtccttcgccctgtccgtccccacgggagccagcgtggtcgtcgccaacgtggcggcctttctgctgttctcgctgatcgggaagctccgaaagacctattaagggggcaaaaggccgtccgtgctggtgaacagcccctgggcaggttgtgaagcgcctctttcctccccgcgggacagcgccgcagcatacgtttgagggactccctgtaggcagtcctgcccctccatttttggataaatgaagagccggaggatttcccccggctctttctttttccattattcatccccgcgcagcagcgtaaacgacgcaaattgcaaacgtccttcccccgcgaaggtgaaatacagcgcgtgtacgccgtcgggaatggcaatgtctgccgccgtgtcgtgccatacgttggcgtagccgatcggaatgctgcccagcggttcgccgtcccatgccgtgcgaagttccagctgtccgccggcaaagcccttggtgcgcacgctgacgcgccgaacgccccggcagtcgaaatacttgaaccctgcagtggcgtgatcgcacatattggcgatgtagccgtagacctcgtcgccgtcccggccctcctgcgtgatcttggggaagcggtcgtccatccagccagaccaggggacgtaggtcttttctacgtccgtgaacagattgcaggccagataagccggatattcgccctcgcctcgcaggggagtaccgccgcaggaggtcatttccgcctgcggtgccgtaccatccgcccggaaatgcagcttttccagacagccctgacggctgaaattggttccgttggtgtggcggtgatagaaaatataccactcgccgccgatctccaccatgctgccgtgattgttggcggtgtagtaggcgcatttttcggcgggcttgtaggtatcgatgttcagatcgccgctgctgaccagcacaccctgataaacaaagctcccggtgggttccctgctgacggcatagcacagttcatggaacttaacggacgaataaatgaaatagtacagcccgtcttttttgcggatggaggacgcttcgaagaactcgtggccctcgtagcccgttcccgcgctggtggccatgctgggcaccacgtagaccggcgcttcccgcaccgtcagcatatcggcttccagcaccgtgaccatagccccgtgcttattcgggtcgcccacgccgcaaaagcctgtataaagatacgtttttccgttctccgtcagcaccgccgggtcaaactgcgcctcgtcccccggggcaagtcccagcagtgtaccgtccgggtagtgtacatatccgtaaaactgatacgcccccgccggggtgtcgcataccgccacggatacgaaattcacattgctgagcacgtagtacagataataccgcccgtccggcccgatggtcacatccggcgcgtaaaggttgccctgcaggtcgccattgtgcgggtcctgatccttccgatagatcacgccctcataacgccactgccccagatcgtccaccggggccgaccagcagacgtaatcgcccatgcagtatagatccccattgaaaaaatcatgggacccgtatacatagacccggtcgccgaacacatagggttcgccgtctggcacatattcccaagagggcagatagggattggtgacctgcttgagattttcctgcgccgtaactttttccatggctggttctccttcccttgcaaaaccgttccatcccgcatccgtctctcggctcttacaccctttgaacgaagcactttcggttttgtatgtttcttattttaccaactttctgctgctcccgcaagcaccaaaaaagccctgacgcttttctgcgccaaagctctcgctttgtgatagtgaaattcggccgaccttccacactgcccgcaccggctattcatgttgcaagcctcttggagccacaccaaacccgcgagccgtggcacccggtgtgccgcggcagtaactccgcagccaatctccatgtccctctacgcccctgcgcgccaaaggcgcacagtccggggtgcaggggcactgcccctgcctgcctgcttatttggtgtctttgatgatgcggcggatgtcgtccagaagactggccaagctgggagattgcttgatggagtcttccaccttctcaatggaagacatgacggtggtgtagtggcggccgccaaaggcgtcgccgatcttcgtcaggctcaggcccagcatttcccggctcaaatacatggcgatctgccggggaacggtcacgtcatggctgcggcgggcgctcttgatgtcgtccaccgaaacgccgtagtacgacgcaaccgcgtcctgaatgatgtcgcaggtgatgcgtcggctctcgctgtgattgaacagctcccgcagggcttcccgggccagctgcatgtcgatgggccgccgggccagcgtgctgtaggccgtcagacgggtcagactgccttccagctcgcggacgttggtgtcgatcttttcggcgatcagctccagaatctcgtcgctgacgatgatgtgctcaaactccgccttcttgcgcagaatggccaaacgggtctcgaaatcgggccgctggatgtccgcgatcagtccgccctcaaaacggctgcaaagacgttcctccagcttctgaatctccttgggcggcttatcgctggtcatgatgatctgcttgccagcttcgcgcagatggttgaaggtgtggaagaactcctcctgcgtactctgcttgcccgcgatgaactgaatatcgtccaccatcagaatgtccgcattgcggaaacggtcacgaaattcctgattgcggttctgctgcatggcgctgaccagctggttggtgaaatcctcgctggtgatgtatacgatattcatctgggggtacagctgatgagaataatggccgatggcgtgcatcaggtgggtcttgcccagacccacgccgccgtagatgaacagcgggttgtaggccttggcgggcacctccgccaccgccagagacaccgcatgggcaaaacggttgccgctgcccaccacaaaggtgtcaaaggtatacttggggttcagctgggccagcgtgttgccggtgtacttggcttccagttcccggacgcggctgtccatctcctcctgacagagcgcctccacgttcagggcctttccagcggccgtggacacggcgttctgaatctggggcataatacggttgatgccgtattcccgcatcatggcgttgatgcactccagaatcaaggtatcgccaatgaggccgaaaggcttcagcgaggactcgatccacgtctggtaactgatgtccgtcatttcctgtttcaggatcccgcacgcgctttcccagagttcccccgcattcgtcatactgccaaaccctcttcataatgtatattatgcaaaagacttatggaaaacttttccacactcagaagccctctccggcagccttctatggaaaaccagaagcacgtctttcgcccgaaatagtgaccgtgcttcatcataccaattttcgacgagtttggcaagggttttcccgtgatctgacaatttgtatagggagctgcctttcatgcggattttattttgcgtctatctatccatgggggaggggttccattcatccacaaaacctagttttcaatttgcatatttatttatttttgacgtatgagaattaagtttggaagaaaaaattaccggaacgaaatattttcttaacctgacgcaaggaattatgacaaaaagtgtagaaatctacatcgttgttacaaagcgcatttgggggtgtggatgtggcgattcccgtcttgcaggaggagctggaaacggtgctccggccctggctgggctctctcttcctgacctccaaccccatgctggatcagctgacccagatgatgcgtggctacgccccctataaacagacgctggaagatctgcgcgaccaactagaaagcttcctgctgaccagcatcagccgctatactcatggcagtatgatggtgctgaacgaccagtataagaccgtccgtctggggcaggggcatatcggctggatcaccgatgacgtgatgggcgtgctttttgataagctcacgcccttttccgccaattttatcaagctgaacgattacagtctgcgggtgcagagcctgtccgccctgcgggtgctttatcagaaatacgcctcctattattccgaggaggatctgcgcttcttaaaggaaatgatccgccgcacctatcccccggaaaagtaccgggactggctcaaggattgaattttcccccgaaaacgtgtatagtgaatctgcggcgccgacaccccgccattctgaaccgccgcggagaaaaatatgctgaaagccccccgaaaaccgaatatcaataaaaccgtcgcgtatgccattgccgtcaacgccctgcaaattctggctttgctggtttttgtggtatacgtttttctgatggatttttcttggcagaatcgtatctccctccgcaccattgcggtcgtcggggcgctggtggccgggtggggcgcgatactggacattcaggacgcgctgctgactcgccggcggatgcgcaccatcgccgagctgcaaacggtcaatcagcagatggacgcgctgaacctgaagctgcgggcccagcggcatgattttctcaaccacctgcaggtggtctacagtctgatggaaatgggcgagtatcaggacgcgaccgcctatctggaaaccgtttattcccagcttcacgccgtatcccgggtactgcgcaccaaggtgacggccttcaacgcccttctgcaggtcaagaacgccgaatgcgagcggcggggcatcttgctggaactggacgtgcgcagcacactggaaggcatcgccatgcccgcgtgggagctttgctgcgtcatcggcaacctgctggacaacgccatggatgcggcggcgcaggcggaaaagccccagatcacgctgtcggtcacggaaagcctgcgggagtttaccttcatcattcgcaataacggcgcagccatcccggcttctctgcgggaacggatctttgagccgggcttttccaccaagggagagaaccgcggcatgggtctcgccatcgtcagccgccgtctgaacgaatacggcggccgaatctcgctggacgcaagcgacgagtccaccgcctttactgtctccctgccccacgagaccggccttgcccccaaggccgaataacaccgccgaacgaaaggagcgcgggagtctttttcccgcagcacgatggatcagagcaagaagaaatttctgaaaaacatggtgggcttttccatgatgacatggatcagcttcctgctgggctttctttcctcccccattgccacccggctgtttgtgccggaggagctggcgaagttcaatatgttttccacctacggctcgctgatcgcctcggtgtgctatctggggctggatcaggcctatgtgcgttttttccgggagccgccgggaaaatcgacccgtaagagcctgtacaccttctgcacgctggtgccgctggctttcagccttgtggcggcgctggtgctgagtttcttctggcgctccctgtcggtgcaggtcatgggcacggagagccggagcgttttcgtccagctgtgccttttcagcttttttctggtgctgttccgttttctgtccctgagctatcgaatggagcagaacgccaagctctacaccattcagggcgtttgccatgtggtggtgaccaagctggcctatctggccgtgggtttcgacgacgcaaggggccaaaccgccattctggtactgacagtgctgatggcgctgttctgtctcgcttgcctgtggctgcagcgcagccgtttcgacgtgcatttcgcccgggagatcgacagcccctttgtgcaggaggtcagccatttcgccctgccgctggccccgctggccatgctgagctggttcaactccaacgccaattccgtggtgctgcgaaacctgatggggctgagcgaaaacgctatctattccagtgcgctgggactggcggccaccatcaacatcatccagaccggcttcaacgcctactatgcgccctacgtgctggaacattatcaggacgacagcacccgttttttcaccattcatcggctgatggcctgcgtgctgtgcctgttcgggctgggcatcacgttgctgcaaacgccggtctttctgctgcttggcaagagctaccgcagctcggtgatcttcttccccttcctgtttctttcccccatctgctactgcctgggcgaaaccacgggcatgggcatcaatatcgccaaaaaaacccactggaccaccatcatttatctgttctcggcggtggtcaatattgccctgtgcttcctgctgatcccctcgcagggcatgacgggcgcggccatggcttcggcgttctccgccattctgacgctgctgttccgcacgctggtgggcgaacgctactacaaaatgctggagaccaagcgctacctgatctaccccatcgtattgatgctgctggcttccttcgggaatctctggctgaccggggccgccaaatacctgctgctgacgctgctgctggccgtgagtctgtttctgttccgacgtgagatcgccacgctgtggcgcacggtcaaggagattttcacagtgcgccgttcgaaagccacgggagggaacgcctgatgccgaaaattctgctgatcgccgacagcgacgcgctgtggacgaagcgggcggtggaatacctgctgctgcccgcgggatatgagatcgtcatattccccatctgggggcacaaaggccagttcgatgattactaccgggagcatgacgtgatcgtctaccgcgaccctcatcgtctgccggtgatccgtcatatcccccgggtgcgcatgtgggcccgcattgccctcaacgcccgcgatctggcgaaatacggcccctttgatgtggtgcacaaccattacctgtcccagcgggatctggcgctgggcttgcgggtctcccggcgttttcatgcccgctgggtctgcaccttctggggcagcgacctgctgcgggcttctgaccgtgctttgcggcagatgctcccctatctgcgccgctgcgaccgtctgaccgcctgtaacgagcggatgcgggataagctccgtcaaagctgcggggaggaactataccaaaagacccgcatgaccatctgggggcaggacggctttgccgccatcgatgggatattgagcaacgagacccgggaagactgccgcacccattacggcatccggccgggcaactacgtggtcagcatcggttacagcgctgacaatgcccagcatcagttggaagtggtagaagcgctgtcggccctgccaaaggagaacctttcccatatgacgctggtcttgcagcagacctacgtgaagcgggaccccgcatacatggaacgggtgcggcaggccgccgaggctctgccctgtcaggttgttgtgctgcgagactttctcgacctaacggagaccgcccggctccggctgtgcgccgacctgtttattctggccatctctaccgacgcttttgcggccagtatgcaggaatacttatacgcgggcgcggttttcctgatgggcgactggctgggctatcctcaattggacgagctgggcattcccatcaaccgcttccatgaatacaaagagcttcccgcgctggtccagcaggccatgaacgggaatctgcaaagggccacggacgagcagcgcgcgctgctcccggcccactattcctgggacgccgttcggaaggactggcttgggatttacgaatgattccgcagtttttccaccgtgcgggcaaaggcctccggcggctccgcacagaaggaaagtcgttccccggttcggggatgggtaaaagataaacgccaggcgtgaagcatcaatcgcggtgctttcacgccgttttttgcgccataaatagggtcgcctgccaccgggtggtggatagactgcatatggacgcgaatctggtgggtacgtcccgtcaggatgtgtacctccagaagggccgccccgcgaagattttccttcagcgtccattccgtcagggcgtagcgtccttcgggatcaatggccatctttttccgatcttttttggagcgggcgacgggctgttcgatccggccggagggctccttcatttcgccgtccaccaccgccagatagcgcttgtccatggtgcgctcccgcagctgcccgctcaggctttcgtgggcctgatcgttcttggcgatcatcaaaaggccgctggtgtccttgtccagccggtgaacgatgcccgggcgcttcactccgccgatgccgctcagatcgtccatggcgtacagcagagcgttgaccaacgtgccggtctcgttgcccggagcgggatgcaccaccatgccgcagggcttgttgaccacggccacgtcctcgtcctcataaaggatctccagcggaatgtcttccttttctacggtcaattccaccgggtcgggcacggtcaactccacgttgtcgccgggcgctaccccatagccgggcttactgcgaacgatttcattcactcggcaaagtccctgctcgatccacttggctgcctgcgagcggctgcattcgcccatttccgcggcgatcacatccagacgggctttagtttccgcctgccgctgaatcgttttcacgccgctccctccaatcctgtgggcgcagcagcgtgctgatcaccagcatcgccacgccaaagcagatggcaatgtccgccccgttgcagataaaccacggcagccacggaaaatacagcatatccaccacgctgccgaacagaagtctttcgccaaaattgcccagaaagccgcccacgatcagcccagccgccacacgggtgaaaaccgttgggcagtagcgtcgcagcagcagccagcccgccacgatcaccgccagcggcagcagcaggttggccagccagttgccgctgagcagtcccagcgccatgccgttgttccggctgagacgcagctccagcacgcccggcagcaccgtcaccgcctgttccagcgatcgtaccgcccacagcttggagcccacgtccagtgccaaagcggtggcggccactgcccagaaaagtcccgtcatatattcctcctattggagccgtttctgcacgatgctgacgatattcgccagcagttccccgatcagcggcagatttcgcttggccaggtcctgtaaaatccacaccagcagcgcgcccagaatggaaaagcctaccgccatgcccacgccccgggctacgcccgcccaaaagctggtccagaacagccgcttgcggtcgtctacatagcgcacgtaatccgccaaccgcagcctttccatggcgcttaaccagcggtcgatctgacgaacgatcacattggcgctttccagctcggtcatgggaggaggctctgccgcaggtgtttccgactccggcaacggagtccttgttctgcctgttacgcgccgccagagccgccctatcctttcgttcatcgtcacagcccacacccctctttttcagtgtgccccggcgacgaaacgtttacagccccacgcagaaagattgtacccgtcccctatttttttgtcaaccgacgaacctttcgcataaaaagagagaccgccgcaaaagcagcagtctctcctttgggccaagcccctgcgatcatcagatgatctcgatgatgcacatttcggcggcgtcgccgcggcggggtcccagcttgtaaatgcgggtgtaaccaccggcgcacttcttttcttcattgcgcttcttgaacttggggccatattcacggaacagtttctccaccacaggatatttgacatccttggtgcgctctttccagtcggccttgtcctcgtccttgcgcttgacatcggggatctcgtacagatagctcatcatgatacggcgggcgtgcagcttgctgggcgcgtcgttcacggtctcgatggtcacgatctgtcccttgtcgttatgggcttccttggtggtggcgatggtgttgtcgcactcgttcaccgccagagtgatcaggcgttcagcggcccgacggacttccttggcgcgagcctcggtagtctcgatgcggccataccagatcagattggtgacctgattgcgaagcaacgccttgcgctggtcggcagtgcggcccaatttgcgttgtgccatggtctgtatcctcctgcatgttcatcaagggttgttattcttcgctggggcgcaggctgaggccgagcgcttccagcttctgctccacttcctccaggctcttgcggccgaggttgcggaccttcatcatgtcttcctgattgcgctgcaccagctcggagatggtgttgatgccggcgcgcttcaagcagttgtaagcgcggacgctcagatccagctcctcgatggtcatttccagcaccttttccttcttgtcgtcttcctgatcggtgaaggcgatggtggtcacctgttcggtcaggccgacaaagagggtcagatgctccgtcaagattttcgccgccaggctgatggcttcatccggctgtacgctgccgtccgtccacacctcgagggtcagcttatcgtagtcggtaatctgaccaacgcgggtgtcggaaacggagtagttcacctttttgatgggggtgaaaatggagtcgatcgggatcacgccgataggcatgttcggatacttgttcttatccgcacttacatatccgcggccgctgtcgaccgtcagcgtcatctgcagatgggcgtcttcgttcaaagtggcgatgtgggcctcagggtcaacgaattccaattcgtcgtccaccacgatgtccttagcctttacctcacagggacccttcacgtcgatggtgacggtcttcatctggtcagaatacagctttgcggacagcgctttgaggttcaggatgatctcgctcacgtcctcggtcacaccggggacggtggagaactcatgctgaattccttcgatcttgatggtggtcaccgcaacgccgggcagcgaactgagcagcacacggcgcagggcattgcccagcgtgttgccgaagccgcgttccaacggctcgatgatgaacttgccataggtgccgtcttgactcagctccgcacagtcgatgtgcgctttttcgattgcgatcattcgtcttaccctcctgttttataccattggatcgagggagtaacgtatcaagactaacgagagtagaactcgacgatcaggttctcctgcagctcgaagtcgatatcgtcacgctggggcagggcttccaccttgccggtcagggtgggggcgtcgaaggtgagccacttgggggtcacaacgctggtgccctcccgcagcaccttgaacatctccagctgagcgctctgctgacggatggtgatcacgtcgccggccttcaccgtgtaggaggggatgtccaccttgcggccgttgacgaggatgtggccgtgggtcacaacctgacgggccatgcggcgggtcttgccaaggcccagacggtacaccacgttatccagacgcagctccagcagctgaagcatgttgtcgccggtgatgcccttcatgtgagaggccttcagataatatttatggaactgcttttccagcacgccatagatgaacttgaccttctgcttttccttcagctgaatgccgtattcagacaccttgcggcggcggttggcattcccggggttccgggtagactttttgttgccgtatcccatcgttgcgggagatacttcgaagctcctgcacttcttggcaataggctgtttgctcgtagccatcgaattatgtcctccttatgattccttacacgcggcggcgcttaggcggacggcagccgttgtggggaatgggcgtaacgtctttgatcatgttgacttccagaccggcggcctgcaggctgcggatagcggcttcacggccggaaccggggcccttgacatacacttcgacggtcttcaggccaaactccatcgcggccttggctgcggtctcggcggccatctgggcggcgaagggggtggactttttgctgccacggaaacccagtccgccggcgctggcccaagacagagcgttgccgttggtatcggtcagggtcacgatggtgttgttaaaggaagaacggatatgcgcggcgccacgctccacgagctttttctcacggcgcttgcgcgatacctttttaagcttttgcttaggtgccattttgtttatccctccatgctacataagcgatgtgatcagcggcttacttggtggcctttttcttgcccgcgatggtacgcttcgggcccttgcgggtacgcgcgttgttcttggtgttctgtccgcggacaggcaggctgcgacgatgacggacgccgcggtagcagccgatttccaccaggcgcttgatgttcatggaaacctcgcgacggaggtcgccttccaccttcacatggtgctcgatgtaatcacgaagcttgctgacttcgttttcggtaaggtccttgacgcgggtatcggggttgatctcggtggcggccaggatttccttggaggaagccacgccgatgccgtagatgtaggtaagcccgatttccacacgcttttctctgggcaggtccacgcccgcaatacgtgccattaggttacacctccagtagaatgtgctctcttgagccaagggtctcttgaagttggcgatgtctgcgtagaggtagcagagcaaagcccaagaccccgcgcagcgaaagccgcgctttgtcagtgatgaaggagccgtgccagacccatggtcacaggcgatttcccgtccatgcagccgcccatggcttcgggcatactccaacttttgaagtatagcacaatttctgcaacaatgtaaaggatgaaatttgatttttttgctggttttttgttttttcgcttctttttcccgttttagagtctgtttttccgccgacgcgggcgcttgtgttttgccggttgcgcgcaggcgggggttgatgctataataaaggatgagttgcgccgccccgagggcgcgttctccatcccccacaaatcaaatggtaaggagttaaccggcgtggcaatgaaagattttttcaaaaagctgctgggacagagcaacgacgcggaggtacggcggctgcagaagatcgcggacagcgttctggctctggaagacaaatacaaaggcctttccgatgaggagctgcagcggcagacccccattctgaaagaacggctgcacaaaggcgaaaccgtagacgatattctgcccgatgctttcgcggccttccgggaagcggtctggcgggtggacggcaagcgcctgttccccgtacagatcatgggcggcatctgtctgcatcagggccgcatcgccgagatgaagaccggcgagggcaagacccacaccgccaccctgcccgcctacctgaacgccctgaccggcgaaggcgtgcatatcgttaccgtcaacgactatctagccaaatttcagggcgagtggatgggcaacatcttccgcttcatgggcatgagcgtgggcatcatcgttcatgacatggacaacgcccagcgccgggaggcttacgcctgcgacgtgacctacggcaccaacaatgaaatgggctttgattacctgcgcgacaacatggtcatccgggaaagcgacatggtgcagcggggccacgcctacgctatcgtggacgaggtggactccatcctcatcgacgaagcccgcacgccccttatcatttccggtcagggcgacaaatctaccgagctgtacgcccgggcggatcagttcgtctcccggctgaaaaacgaagaggactacaccgtagccgaaaaggaaaaggccgtctccctcaccgacgaaggtgtggccaaggcccagagtttcttcaaggtggaaaacatcgccgacatggaaaacagcgagctttaccaccacattttggccgcgctgaaggcccacgccctcatgaagcgggacgtggactacgtggtgcagaacggcgaggtcgtcatcgtggacgagttcaccggccgtctgatggtgggccgccgttattccgatggtctgcatcaggccatcgaagccaaggaacacgtgaaggtggaacgtgaaagcaagacgctggccaccgtcaccttccagaactacttccgtatgtataagaagatttccggcatgaccggcacggccaagacggaagaagaagaattcgaaggcatttacaatctggacgtggtgcagatccccaccaaccgccccatgatccgcaaggacatgaacgacgtggtctacaagagcaaaaagggcaagtttaacgccgtcgtagaggaaatcgtggcgcgccaccagacgggtcagcccattctggtgggcacggtcaacgtggaaaccagcgagcttctctcccatctcatccgcctgcggggcgtgcctcacgaggtgctgaatgccaagcaccaccagaaggaagccgagatcgtggctcaggccggtcacgtgggcgcagtcaccattgcgaccaacatggcgggccgcggtacggacattctgctgggcggcaacccggacttcctggcccggcgcaagctgcggcaggacggggttccggaagagatcatcatggaagccatcggccacaacgagaacgttccgccggaggttctggaagcccgcaaggcctatcaggaagcctttgcttcctttaagaaggaaaccgacgcggagcacgaaaaggtcatggcgctgggcggtctgcacatcatcggcaccgagcgtcacgaaagccgccgcatcgacaatcagctgcggggccgggcgggccgtcagggcgacccgggcagcacgcagttcttcatcagtctggaagacgacgtgatgcggctctttggttccgagcgcatcgcccccatgatcgagcgtctggggctggaagaagaccagcccttggaagccggaatgctgaccaagcagatcgaagcggcccagaagcgcatcgagggacggaactttgccattcgcaaaagcgtgctggagtttgacgacgtgatgaaccagcagcgtgagcagatttacggccagcgcaaggagatcctcatgggcggcgacgtcagcgccaccattcacgccatggttcacaagctgatcgagaccacggcccagctcaacttcaccggcgagggcagcttcgactggagcgtaaacgacgcgaaggaatacttggaaaagctctgtctgaagcccggcacactggacaaatacgccgagcagatcaaaaagatggacgagcccgacgagctggtcaagtggctggaaaaagacgcggatgacttctacgccgagcgggaagccttgctgaccgagatcggcatagacatgcgggaatttgagcgggtcgtgctgctttccgtcattgaccgccactggatggatcacatcgacgacatggacaacctgcgggacggcatcggtctgcgggcctacggccagcagaacccggtgcaggagtaccgccgggagagctacgacatgttcaacgacatgatccacctgatccgggaggagacggtacgccgcatttaccagagccgaatccagcgcctgccggaacggcggaaggccgtcgatctggaaaagacgcaggccggcctacagggcgagaacacgaacggtcaggcgaagaagggcggcgcgcccgtgaacaagtcgcagcccggtgcggtcggtcggaaccagccctgcccctgcggcagcggcaaaaaatacaagcactgctgtgggaagggctaaagcccttcacctcggactgcgcgccaccggcgcgcagggcactcgtgggaaagcaggttggccggggttttaccgccgtggcacaacgggtgccacggctcgccgatctggtcgaactgaatgccggttggctatacaaggccgccgctcggcgaagggcctcgcggctggcgggaaggggcgctgccttttggccccggactgtgcgccgatggcgcacagggtgctcaggggaaagcaggttggcagcgtttaccgccgtggcacaacaggtgccacggctcgccggtctggacgagctgaatgccggtcggcgatacaaggccaccgctcggcgaaaggcctcgcggctggcggaaggggcgctgccttttggcccccggactgcgtggcacgatactacatacatctaccgtctcagaaaggaaatggaagaattatggcgatgattgataccgaacgatatgctcaggagctgagcaaactgcgcgagacggtggaaaaggccgccgacgcgctgcatctgcctcagctggaggaggagctgaccgagctgaaggaagaaatgaacgaacccgaattttggaacgatctgcagcgctctacgacggtcaaccgcaaggtgggacagattgagggcaagatcaaccatgtagcccgtctgcgttcccgggcggacgacatcgaagccatgctcatgctgctgaacgaagaacccgacgaggaaatgggtgcggagtgcgaaaaggaactggccgacctgaccgccgacgcggacgctctggagctggaaaccatgatgcgcggcgaatacgacagctgcaacgcggttttgagcctccacgcaggcgcgggcggaacggaagcgcaggactggacgtccatgctgtatcggatgtacacccgctactgcgaacgccacggcttcaaggtgacggtcaacgacattctggaaggcgacgaagcgggcctgaaaagcgtgaccttccaagtggagggtgaaaacgcctacggcttcctgcgcagtgagcgcggcgttcaccgtctggtgcgtatctctcccttcgacgccaacgcccgccgccacacctccttcagctcgctggatgtggcccccattctggaaggcgatcaggactttgaagtcaacatggaggaagtccgcatcgatacctaccgtgccggcggcgcaggcggccagcacgttaaccgtaccgactccgccgtgcgtatgacccacattcccaccggcatcgtggctcagtgccagaatgagcgcagccagattcagaaccgcgaggtctgccttcgcattctgaaaagccgtctgctggaactcaagcagcgggagcgggaagaacagatgagcgacatcaagggcgaaatgaagaagatcgaatggggcagccagatccgctcctacgtcttccagccctacaccatggtcaaggatcaccgcaccggctatgaaagcggcaacgtggacgacgtgatggacggcaatctggacggtttcatcaccgcctatctgaagatgcagtaatgcatttccggcagggaaactcatgaggattcaaggaaaatccggaaaggaagccatcctgtgaaagctgaccttaacgccgcggcgcgccgggagcgggtgctccgctatgcaagctacggactgatggtgctgtcccccttcctgctgctgggggttctttcgctgattctgggacgcagcgcgttggattcctggcccgtctggacggatgaactggactactggcgcagcctgcagaactggaacgccgtcggctttgccacgggctacagcggcctttcggagatcgtgccggaggctggtacgctcagcgtccacgggctgacagccatcgtgttctatggctggttcgtcaagctctttggcctgagccatagcacgatcgtattgtgcaacgccctgtgggtctcgctgggggcgctgctgttctgcctgctgctgaagccaaagccgctgacctgcgtgtatatcagcgtcctgctggccacctatgcgccggtggtgctgtatgccttcacctccatgacccagctgtgccagtacggcgttctgctgatctatctggcctttctgctgcggtatgccaggaaccgcaagccgggttggctgtttctgtctctcgtcagcgtggtgctgatgtgctgtttccgcatcaactatctgctgctggtgctcccggtggcatgggtctgcggcggcggtaaaaagctctgcctgaaaaccgtgctgttcagtctgctggggctatgccttgtcattggcgtttatctgctcaccagccagtggtcggctccctatgcccaaggcttcccctatgccctgtctcaggcgggcagctttgcgctgatggtgcggatgctcatgagccatttcaaggccaatctgatcggcttctttgccttctaccgctacagccccgtactgtggtggttccgggtgttctatctggcgatgctggcgctctgcctgttcaaggccttcctgcaggtccgcaaggacggtaagggcctgaaattgggactgaacgccgcctcggtgtggtgcttcctgtggctggccagcgcgctgggcatcgtgcttctgttcaacgatgtaaacgcatggacggacttccacattctggcgcccatgctctggcttatccccgtttacctcatctgccgggagaaaaagctcctgcccgcgctggcgctggcgggaagtctggcgctgacggtgttcctctgcttccagccgcccatgggcgcctatgccgacacggatcgtttcgacccgcctgcggccaatgaaagcctgtccacggccatgagctatatcacctacgaccctgcggcggacgatccctttgacaataccgtccgcaccgatctgagcggcgaacggctcctgatggagctggacgaggggctggggctgcagtacggctggttcaccccggacagtctgggcaaaagccggtggatcctgaccgatacactgaaggtagcgctggaaggctacgagcaggtttattccacccacggagccgccgtctaccgcaagaccgaagcgccgaaggagccttaaatgacgcaaaagaaaccaatcgactggaaaacatggctgcttctgctgctgtgtacggcagggctgttctggttttcctaccggcttttcgccctgctttgctaccggcccagctccgatctgagcatccacatgacgtgggcgggcgaatgcagcttttcggactggcggtcgttcttccatcatgccgcccatcccatgtggcatatgctggtcacgctggcgaaggggctgttcggattttcgctggagcagaccgccgccgccgttacggcactgtgcaaggcggcggagttcgtcctcattgccttgctgttcttccgggaggaaacgctgcggggctggcgggcggtgctggccgccctgtgctgcgtgctggtatccagtctgcgtctgtccttctataatccaaccgtctatctgggggttggcacgcccaatacgtggcacagccctacccagatgatctccatggtgtggatgctgctgtgcgtgccctacgtggcccgctgctacgacgacggcatggccctgaccggtacggagcactcccggctgaactggaagcgtcaggcgcttctgtgtctgctgctgctgtgcagtctcgccgcgaagcccacctttatgcagaccttccttcccgccgcctgcctgttctatctggtgcaatggattcgccgccccaaagccacgccctttgtggtgcagaccctcctgtgggtgctgcccgccgtagcgctgatggtgctgcaatacctgtactatttcggtatcatcgtgccctatcagagcggcatggtgctggaaatgagttgggccaagctgggcagcgtcctgctggccacgctgctgatccaggcctttcccctgtacgccctgtgggtctgccgccgtcagaagaaagacaccctgttctggctgaccctgtggatggatgtgacgggcgttgtggaatttctgatccttggcgaatccggccgccgggccgccgacggcaacttcggctggggcatgatgggcgcggcgctcatgctgtgggtggtcatgctgccccggttcctccgggatatccgggagcgcggcaagccgtcccccgctcactgggcggggctgggcctgctcctgtggcatcttggttccggcatttattatctgtattatctggtcacgtccggcaatgcgctttgagcgccgtcccgcttcgtcaggccgctgagcgtccgatattccgccagtccgctggcaatggcttctgcgatcttccgctgataatcgggagacagcagaagcttttcttctgccgaattgctgatgaagccgcactccaccagcgccgaggggagtcgggagcgcagcacgtaatagtcccccgccatggccgagcgttcctttctcggcttcagcccggcgatcagatgcttctgcaatacgccggccagcagccgccctgcatccccgccccgctgatagaacacctgcggcccgctttcgctgcggctgcggtattcgttcatgtgaatgctcaaaaacacatccgcctgattttccaacgcgatattcacccgctgctgaaggtcttcccgcttgcgggccttggtggcggtggttccttcctcgcaaaggcaaatgtcctcccgccgagtcaggatcaccctggccccctgtgcggccaattctttttccaccgccaacgcgatttccagattgatgtccttttcccaccggccgctgtcccgggcacgagcgccgccgtcgtagcctccgtggcctggatccagcgcgaccgtcattccggccagcgcggcttctccccgttccgtggtctggacgtccggctgcgtccgcaggcacaaacatacggccatgcagctcagcagcagcaacacgcatcccctcagccgggactttttcctctccagcagctccgctaccgctctcatccagccttttccctccatttttgtctgaacctatgcatattcattgcaacatatgaccaagatatttccattcataacattcgatatgcaaaaacaatgactttcccatgacgttttcctaactttccacatagttttccactgaaaaagccctgttctgcccggcaaaacccattttatgtggaaaacttcctgttgaaaaccctctgtataaaagttttccacatacgggaaaattgtgctttctttgtggaaaagcatggttttcgtcgaaaaaacatgctacaatcagtcgaaagccccaaaataccgtcgtttcaggaagaaatccatggatatcgatcagacgcaggattgctgctttacccatgaggaaaactggttccgttaccgagtaggggccatcattctggaggaaaactccgttctggtggcgaccaacgacgcctgcgacttttactactccatcggcggcggcgttcatttgggcgagaccgctgaggaggccgttcgccgggaagtactggaggaaaccggcctgccctacgagatcgaccggctggcctttgtccacgaaaacttttttgaggggggaaggaaatatcgccgggctgcactgccacgagctttccttctattttctgatgaagcccataggcaagcgggagatcacgcgcgggcaatgcatcgacggcgaagaacgagcctgttggctgcccgtataccgcctgttggactacaccgtctatcccctgttttacgccgactggctccctcatttgcctaaagaaaccgtccacatcgtcaccgatcgccgccggaaataagcgctgaaaaattccggcaaaatcccatggataaattgactttaggccggttctttgttacaataattgcgcaaaaaacgaacgtttccgttcacgggaggtgagacaatggacggtggcagttgccatcaacgatgccagggcatggaaaacgataaaccgccgcgatgggtgtgccgctgtctgttgatctgcgcctgaacccatacggcttgtccttgtttgccattgtccgaacgcagtcggcttctgctccttcttaacggctttcggaaagaggatttcggtgcaatggcttttttgcgtccttttttcgtctgccgtcagggattccctgcccgccccatctggtgtggagcaacgaaaaaggaggaatgaaacatggacgagatggaaaaggatgaactgaaaaaagacgaactgaaaacgtccgaagcgcccgagaacgcctcccacgagaagcattcggacgacgaccacgacagcgccgcggcccagcatcccgactactgtcaggaactggccaccatcgttcggggaacgatcacccccaaggcgctgaaagaaaaagttgaaaattatcacgaaaacgatattgccgacgtgctctccattttgaaccgggccgagcgcgaaaagctctatcatgtgctggacgcccagaccctgtccaccgtgctggaatacgcggaggacgtggaagtctacctgaacgagctggggctccggcagcgtattcaggtactttcccacatggagaccgacaaggtggtagagtacctgaaaacgctggacaaaaccgagcgcaacaatctgatggacctcttcgacgaggacacccgtcacgacgtgaacctgctctggtcctttgatgaggacgagatcggcagcgtcatgaccacgaactacatcgaagtgaccgaaggcatcagcgtccgggaggccatgaaggagctgatcgatcaggcggcggagaacgacaacatctccaccatttacgtcatcgacaaagaccgcaccttctacggcgctatcgacctgaaggaactgatcatcgcccgggaaaatacgccgctgaactctcttgtcatcacttcctacccctacgtatacgcgcaggagcgcatcgaggactgcgtcaacgccatccgcgattactccgaggactccattcccgttctggacaatcagaacaagctgctgggcgtcatcaccgcgcaggacttcctgcaggtcgtagacgacgaaatgggcgacgactacgccaagttagccggtttgacttccgaggaggacctgaaggagcccatcggcgaaagcctgcgcaagcgtctgccgtggctgctgatcctgttgggtctgggtctggtggtttccagcgtggtgggcgttttcgaagccgtcgttgcccagctgacgttggtggtctgcttccagtcgttgattctggacatggccggtaacgtaggtacgcagtcgctggccgtcaccattcgtgtattgatggacgagaacctgagcggcaaggaaaagctggcgctggtctggaaagaagcccgcatcggtctgctgaacggcgtgattctgggcagtgcgtcctttatcgccatcggcctatacattcacttcttcaaggcggaaagctggggctttgcctttggtgtttcaggctgtctgggagcggcgatgattctggccatgttcctgtccagcatcaccggcaccaccatccccatgcttttcaagaagatccacatcgaccctgctgtggcttccggccccttgatcaccactctgaacgacttggtggccgtcatttcctactacggtctcacctggatcttcctgatcgaaatgttccacctgcagggctaggcaggggcagtgcccctgcaccccacaccgcgcccataggg

SEQ ID NO: 2356 - DNA, 3274 bp, Unknown
  16S sequences of unknown bacteria
ggccaaggcgatcgaggtcgccgtcgattagccaccgacagtggggacgcgcttctaagcagggcgcgttctctacgtcgaaacgaagaggggcgccagtgctgctagcgagcactggcgcccctcttactctgtttgtcggacatcgcccagtctgcggttgcccatggcgcaaaacgcccgttatgcggttgacggcagccccttggggcaggctgcacgatgcttgtcagcatgtattttccgatatggcagggatttcagcccatgggtgccgtgctgcgcgtcaggtctggccgcaaagcgagcaattagtgacgcctgccactccaccaaaccgcaaagcgggcattctgtgacagcgaggtctgcccaggcgtccggcgattttgccgaacagcgaggcgcgtcccaactgtccggcaaaaccgccggacggtgaagcgcgtccccggcgtccgggtcagtcgacgcggaagctgttggcgcacaggccgccgtggtcgatggcgataacgccgcttttgccaagccggcagtacaggccgacgggcgcgccgtcgtagacgtagacgcccggcatggattcccagctctcgacggcacaggggtcagctcccggcgcaagttccgtgttcatgatgtccacatggtgcggcgggtagaactcctgcacgatgtagcccgcgtccctgttgtcggagacgagttttctccaggtctcctcgtcgaaatcgacgcccgggtagacgccgtgggcaccgtagtcatcggcgggcttgatgatccaggcgtccttgtcgccgacgatctcatcggcaagcgcaggatcgaggtggtcgtctaagacgtaggtgcgcgggacgtgcgcgtcgacgaaggcacattcctcgggcgtgaggaaggcgcgcgtgcgctcgtcgaacagtgcgaccgagaccatcttggagtgcacgacggtcgtgcggaaatgaccgatgaggcagaccttctcggcggcgacggcgtcgatgagggcatcgcactcgccggggtgctgcaggatctcgcttgtgacggcgcggcggtagatggcatcgattttcgtgccgtcgctcgcgtcgcgcagcgcatttccgtcgaattcaaaggcgcgcacgtcgacgaaacgcgcagggatgccggcgcgcttgaaggccgcgatgaagcggtcgaagtcactgaagacgccgctctcgcggaaatcggttacggcgatggtgggattggcgtgcgcatgggcgtcgcttcgatagatgcgcatgaacgtctcgatccacgagtcgaacagctcgaactgcctgacctcgtggcgctgcgagaagcgcttgaaggtctcggactgcatgagcgcctggccgatcatgaagtcgcgcgacatcgcgccgctgccgtcggtgttgaactcgcagaacttgtagctcaggtcgtcctcgtccaagaagaagtcgaagcgccccatgggcagcagctggtcgtagttgcagggcagcaagacgagccgctcgacctcgggagggagcttgaacatggcgcggtacgacgggtcgtcgagataccggcggattaccttgcacaagatgccgtgggccatgcggcactgcgccccgatgtagtcgaggtccgccttgttgaacaggtaggggacgaagggaaacggggcaggctcgccgtgcacccacacgtcggatgcgcggatgaaacccagtgcctgcttcctgccggccgtgtctccgtccaggtccttgatgatgtcgatgtactcggcgcgttcttctttcatgggcacctctcgttgtcgtgacagtgtgcccagtattgcacagcgcgcgccccttttggcctgcgcaaatctcatctgggtccgaagcggctccgatttggctctggtcgagctctcaggtggctcggggcactgctctcatctagctccacaaacgtcaggtggtctgctcagatttgcttgaaatgatggttgtcggcggaaccagaccactacagaaagaggagtccgacgatgagcattgcagagacactcgagagggaaggccagatgaccgagcagcaggcgcccacgcaccgggagacgccggtgcaggtacccgatggcgagcggcaagagggcaggggcgagcagacgtccgagagaccgcaggatcaggcgcagcaggagcgtacgtgcgcagctgcgcgagagaccgctgcgcagcccgacacgcagcccgagccgtgcgctgggggccaggatggggcacaaggcgcaaacgccgcacccgaccccgcttcgcagtcgaaggtcgagctcggccgccggggcgaggacgccgcggtgcgctatctggtcaacaacggcttcgagatcctcgagcgcaactggacctgcccgtacggcgaggcggacatcatcgcgcgcgatacggacggcacggtctgcttcatcgaggtgaagacgcggctcagcgtggcggcgggatttcccgaggaggccatcacggcggagaagcagcagcgctacgagcggatcgcgctttcctacatgatgaacttccagtgggacgatggcacctcggtgcgcttcgacgcgataggcctctgcgtcaaagaaggcgggacgcgcgccatgctgcgccatcacaggggatgcttcaatgacttccgttgagacggtacgcgcgagcgtgcgcagctgcgccctgctcggcgtcgtcaccgtgcccgtgacggtggagatcgaggtcgggcccgggcttcccggcgtgcacatcgtcggcatggcggacagctcggtgcaagaggcgcgcctgcgcgtgaaaagcgccgtgagggcggcggggttctcgatgccgggaaaccagcacatcgtcgtcaacctggcgcccgcctcggtgaggaaagtcggctcgggctacgatttgcccatcgcgcttgcctatctcatcgcgacgcgccagataccgggcaagcccttcgacgactgcctcatctcgggcgagctctcgctcgtcggccacgtgcgcaacgtcgccgggctgttcgcctacgcgctccaggcccagcgcgagcacatgcgccttctgagcgggccggtcacgacgtgcatgcccgagctcgggcagctcgagcacctgtgcctcgaccacctctccgggctgcgcacgaacagcttctcgcgccctcgcgtcatcgccgtgcagcccgcatgcgcgcagctcgactacgcggacgtcgtcggccaggagacggcggtgcgggcgct

SEQ ID NO: 2357 - DNA, 8950 bp, Unknown
  16S sequences of unknown bacteria
cgccgccagcgtttgtcctgagccaggatcaaactctcatatttgatctctatctcgctcagctctcgctgtgctcttcgcttcgttgtccatcctttggaatcgacttcgcttctcgagttcagtttttcggcttccgccgcaaaaccttcctcgtttgccttgtctttttcctcttatgtatcgttttcaaggttccccgccgtcagttcgtatctctcgctgacaacttagttatattaccacactcctcttcttctgtcaacaccttttttgaaatttttttcgctttttccgtcctcttccgttcggaccgccaaaaaacgccggaattccggcaaaaaacgcagccggaggaaagttcctccggccgcgtttttcagccgatctcgggcagggactgcgcggtttcttcgtccatgatgggttccagctcctcgagccaggcgggcggttcctcctgggtctgctcgccgagccaggcgatcatcttgagcgcgtactccgtattctgcgtataagaggtgcaggcgatgtacaggtcgcgcgtatccacgccctggttgagcaggccgtagaggcgctcggcggagattccgtagacgtgctcctgtccatctgtctcctccgcgacaaaggtgcccgcctcgatctcctcctcggagaacacgccgtagagcgcaccgccctcggcgacggcgtcgtccaggggcatgaaggcctgcatggagctgtagctgacgagcagctcgcggttgagcaggtagacgtcgccctcgcccacggcgatgaccacggacagcttcgtatagccgctgtagtcgccctcgccggtcaggctcagggggatgttttcaaaggtgatgagttccatctccgggaactcctcataggccttttcttcatagtattccagaaccgactccgagacgtagtcgccggcgatggtgacgtggatggtcttttccggcgggggaacgtactccgtcgcccggtaggccatctgccagccgaagagcaggatcaccgccatcagggcgtaggcccaccacgtatagccgaagtgttgtcgtacgttggtccactttaggggcgtatggatcatgcgcagcgctccttcccaagggagttccttttttcgccactcgggcagggtgcgcaccgggcgggaatttcgttcagtatagcacatccggcccgccgtttcaagcaagggtgcagtctcagccccggggaaagccgccgaaatcgtcgccctcctccactggctgccaggcgcggccgaactgcacgtcctggaagagggccgtaaggcccgtgatctgcttcaggcgcaggatctcatccttctccatgcccaggtgcttggcgatccaggcgtcggagcggccgatgtcgtgcagctcctttacgatgttgctcatcaggtccacattgtgggagccgcgggcccggttgtggcggatggtgctggccatgcggtagtcgatgggcttgtcgatgacggaaaccgggagcatgccgccctcgcgctcgtagatgtccgggtggtccagcatgatgcggtagcggtgaaagccgtcgacgatgatgtactggtcctgctccttgtcgtggtagcagacgatgggcatggtgtagccgtcgatcttgatgctctcgtagagcagcttcatctccggcggggcgacggcgttggggttgtaggtattgggcacgatcttttcaatcggcacggcgatgacgttatagaccgggctctgaaacttcttcatcctccatctcctctactttgctgtacttcttcgtgatggcatcgatatagcgctgctgttcccgggtcaggccaaagcccatgaagcggcagttgtggtcgtttttcaggatgcagtagcacatgcgcttccagctggggatatcctttgtggagcggatgtcgtcggtgttgtccgggatcttgccgatgaagaccacgcgggacttccggctgcgcgtatagctggaaacgccgttgcggcggatgttgtagcccttctcgatgagctcgcggatgacgcgctcgtccaatccgccgcccgtgcggtgccaaaaggtgatggaggtttggaatttctggacgtagttgttgcgcaggcgcagcggcagcgtgtccagcaggaagcgcgtgtagctctcccaggtgtggcccgcaggcagggtcacgttgcggtagcccatggccttgctgcggccataaatagaagcgaagttcgctccctgcacgcggccgacgagctttgtccagatctccgggtcgatgacgcggtagaggttcaggctgtccttggaatagtcgttgaaaggcgaggccacgcgcatctgcgagaccttgagccccgccatgtagtacaagtcgtaaaggcggttgtaatcataatggaagaggaagttcgcgtgccagacgtcgctgagcgtccagtcgtacagaggggacgcgcaccagacgttcttgaactcgttgctcacccagcactcgcccttgtagccgtatttcttgttgaggaacccgctgtagcgctgcagggattcatccgcgcgcatgccgagcaggcagaccgtcttcttatccccgtgggagatgcggtaccagcggccgaactgcttggccaggtcctcctggtgcatccggtagcgataggtggtcatggggttgtttttgaggttgatgacgtactcgtgctggggcatggggcgcacccaggcctcctccttggtgtcgtcccaagggtaccaatacatctgatagctgctcagcgccgtgcgcgtggccatgggcaggcagacccagtacggttcgacctcgcccttgatgcgctcaaaggtgcgctcaatgaactcggtcgtcaccgtgtactgcgcctcaaagtcctggtggaagacgccgatcttcttttccgggtagtatttccgccgaaagtccagcgtgaggttgagcagcaggctgctgtcctttccgccggaaaaggagacgtaaatgttgtcgaactcctcaaagatcaggcggagcctctgctgcgtcgcctcgtaaacattgcacgacatgtactctcgcttcatggcattcccctacgtcactggaaatttttttccatctttttccagtataccacatctttcatgtcatgacaattcgccgcggagggaaatccgcccctgcgccgggctttagaagacctgcaggacgaagaacttcaggtactgcgtctcgggcgcggccaggagcacggggtggtcgcgcccctgggtgcgcgcctcgacgacgcgcacgaggcggtgcgcgtcccgcgcggcggacagcagcatgtcctcgaacgcctggcgggagacgtgctgggagcaggagcaggtcaccaggaacccgccctcgggcagcatcttcatggcgcgcaggttgatctccttatagccgcgcagcgcgccctcgacggcgccgcgggtcttggcaaaggccggcgggtccaggatgatgacgtcaaagcgccgcttttcgtcgtaatagcggcggagcaggtcgaaggcattctccgcgacgaattcgacgttgtcaaagccgttgagctccgcgttgcggcgggccaccgcgcaggcctcctcggagacgtccacgcccgtcacgcgcgaggcgccgtagcttgccgcgtgcagggcgaaggacccggtgtgggtgaagcagtcgagcacctcgcggccgcacacgatgggcgccaggcttgcgcggttctccttttggtcgaggaagaagccggtcttctggccgtgggcgacgtccacgaggaagcggacgccgttttcccgcatctcgacgagcgtggggaactggccgcgggcaaagcccgtgacctgctccagcccctccagctcgcgcacgggcacgtcgtcgcggcggtagatgccgcggcagccggtgatgtccatcaccgcgtccaggagcacctcgcgccagcggtcgatgcccagggccagcgactgcatgacgcagacgtcggcaaacttgtccacgatcagcgccggcaaaaagtcgctctcggcaaagatcagccggcaggagtccagatcgcagaacgccttgcggtagtcgtaggcctgctgcacgcggcggtaaaagaagtcgcggtcgatgggctcgtcgtgccgcgtgagcatgcgcagggtgatcatggaggcggggttgtagtaggcgcggcccaggaaccggccgcgcgcggcgtgcacgtccacgacgtccccgggctgggcgctcgtctccacccggtcgatgtcgctgcggaaaatccaggggtggcccatctcgacgcgccgctcgcgcgaggacttcaggtaagcttttggcatggtttctcctccggtcgtatgcaggtagcgcgcgctgcgcgcttctatgctccattataccgcgttttcttgccgctgcacaagggcatccggtgaagggaaggcagggattttgacgaaactgcaaaacttttctctctttttggtaaggccgttgacagagcggggcagtttgattataatgtctaggacaatgcaatgagttggcggcgcacggttttgatcgggaaggtcggaattcgtgggcctgcttgattatactcatgtcccttgggttccgcggggccctgtttccgcggaaaattcggtcaagttgagtttaggaggcaaatttcatggcaagcaacggcagcgacgtcaagtactttaccgccgaaggcatcaagaagatggaggaggagctggactacctgcgctccgtcaagcgcggcgaggtggccgagaagatcaaggtcgcccgctccttcggcgacctttccgaaaacgcggagtatgacgaggcgcgcaaggagcaggccttcatggagggccgcatccaggagctggaggccatcctctccaccgcgcaggtcatccgcgaggaggacatgccgacggacgtggtcaccgtcggctccacggtcaaggtctacaacgagacgcgcaagaaggagcaggtctacagcctcgtgggctcttccgaggcggaccccttcaagggccggatctcccaggattcccccatcggcgcggcgcttgcgggcaagcgcgtgggcgagacggtgcaggtcgccgttcccgccggcacgcacaccctgcgcatcgagagcatcacccggtaaggcagaaacgcacaagagaaagagagagtttttcctatgcaagacaaccagcagcggcccgaggatcggacgcaggagaacatcagcgagcaggcgcgcatccggcgcgaaaagctcgccgcgctccagagcgcgggcgaggacccctaccgcatcacgcgctacgaccgcacccacctttccgcgcagatcctgcgcgactttgacgccctggaaggccaggaggtcaccctcgccgggcgcatgatgtcccgccgcatcatgggcaaggcgtcctttgcgcaccttcaggacggcgcggggcagatccaggtctacatccgccgcgaggacgtgggcgaggacctctacgcggcctttaagtcctttgacatcggcgacatcctcggcgtgcgcggcacggtcttccgcacgaagaccggcgagatctccctgcacgccgcctccctgcagctgctgagcaagtcgctgctgcccttgccggagaagtaccacggcctcaaggacaacgacctgcgctaccgccagcgctatgtcgacctcttcatgaatccggaggtcaaggacgtcttcctcaagcgcagccgcatcctttcggagatccgcgcctacctggacggcaagggcttcctggaggtggacaccccgatcctgctgcccatcgagatcggcgcctcggcccggccctttgtcacccaccacaacacgctggacatggacatgtacctgcgcatcgagaccgagctcaacctcaagcgcctgatcgtgggcggcatggagcgcgtgtacgaggtgggccgcatcttccgcaacgagggcatggacacccgccacaacccggagttcaccaccatcgagctctatcaggcctacacggactacaagggcatgatggacctggtcgaggagctctacatccgcctggcaaaggtcatctgcggggatacgcacatcacctaccagggccaggcgctcgacatggggcattgggagcgcctgaccatggtcgaggcggtcaagaagtacgccggctgcgactactacgattggaagacggacgcggacgcccgcgccgccgccaaggcaaagaacgtggccgttcccgcggacgccacgcgcggcacggttctggtcgagctctttgacgcctttgtcgaggagaacctcgtccagccgaccttcatctacgactacccggtggagaacagccccctggccaagcgcaaggccgacgaccccgccttcaccgagcggttcgaatacttcatctgcggctgcgagcacggcaacgccttctccgagctcaacgaccccatcgaccagaaggcgcgctttgtcgcgcaggtcgagaagaagcgcgcggagaacccgaacaccaccgcccaggtggacgaggacttcgtcaccgccctggagtacggaatgccgcccaccggcggcctgggcttcggcctggatcgcctcgtcatgctgctgacggattccgcgtccatccgcgacgtcctcctcttcccgaccatgaagccgctggacaagaagccggaggccccttccgcgcccaaggccgcggaggcgcaggacgctggcgcggcggagactgctgtggagccctcgccggcggagaagatcgacttctccaaggtcgagatcgagccgctgttcgcagattttgtggactttgagaccttcagcaagtcggacttccgcgccgtcaaggtcaaggcctgcgaggccgtgcccaagtccaagaagctgctgcgcttcgtcctggacgacggcacgggcgaggaccgcgtgatcctcagcggcatccacgcctattacgagccggagcagctcgtgggcaagacctgcatcgccatcgtcaacctgccgccgcgcaagatgatgggcatggattcctgcggaatgctcatcagcgccgtgcaccacgaggaaggggaagagcggctccacctgctgatggtggacgaccacatccccgccggcgccaagctctactgagcccatcgcatccgttttttcacgccggaccttccccccgcgggagggtccggcgcttttttgaaccagagggagggaaaaccgcttgtccatccacgacgaaatcgtccgcgagctgctggagacaaagtcgctggccgcgctgatctacgcgatcgagcgcggccgcgagctggagttccgctgcgaagggaatctctatttcctctcccggcacgggccgcagcagggcgtctccctgtggggcggcggccgggagcagcgctttgcctgcatggaacgcctgctcgagcaggccgtgctcgggggcgttccgttccgcacggcgtggaagtcggcgcagatcgtcaccttgttttgaccggcgcctcgccgctcgcgcgcatgcggtagaaggggaggttgcccgcgaggcgctcgatccacggggccagggccgccgcgcgctcgccctgggccagggcctcccgcgcgtagtcctgcgcggccatgtgatagcaggccagggcgcgcaggtcgtggggaaggtatccccaggcgtccccctcgcagatgtaggacttgggccgctcggcgatggccagcgcccggccggacagccacgcgacgccctcgtgatcgccctcctcgctgaggaagcgcgcaaagtccaggtagggctcgcgcaggtgcggcgcctccgcgatggcgcgcagataccaggcgcgcgccggctcccgctcgcccttggccgcataggcgcgcgcgatgaagcgcatggaggcgctgcgctcgtcggcccagcgcgcgctgggcatgcccaggtgccgcaggagcatcgcgatgcacttgtcccagtcgccgtggaacatgtattcccggccgagatagtgcatgttgcggtcgttctgcgggtcctcctgcaccgccagctccagcagcggcaggtactggccgcgggacttggtgggatcggcgcggtgctccaggcagaccccctcggcaaaccgggactgcggcgcgcccggcccggcatagcgcaggacctcgtgcacggggttcacccaggaaaagccccggcgcgcgtggatcttgtcgatccaaaagacgtacccctccgagccgtccggctgaaagttccacacatagcggtagcggatctgctgcgcgccctgcgcccaggccgcctcgatcttttcgcgccagcccggctgaaagctctcgtccaggtccgtgcagacgcagatgtccgcgtcctcgggcacgagctccagcgagcggttgcgcgccgcgtcaaaccgccagggcgagatcctctcctccgtcacgatcgcgcccagggcccgcagctgctccggcgtgccgtcggtcgatccggtgtccaagacatagatttcgtccgcctccgccatggagcgcatccatctttcgacgaacttcccctcgttcttgcagattgcgtagacgcaaacgcggtattgcatgtcccttcctcctcgttctgcccgcatccccgaaaagcggggccgcccgcgcgcgggcggcccctggcgttgtttggttggtgattaggtgctgatgacgcccgctgcgcgcagcgaggccaggagctcgttaaaccggtcgatgaccgtctgcaggttgtcgctgctgatcaggtccgagaccgcggtgcccggggtgagcgaacccgcagggcccgttgggcccgtggggccggtcgggccttccgcgcccgtcgcccccgccgcgccggccgggccggtggggccggt

SEQ ID NO: 2358 - DNA, 15500 bp, Unknown
  16S sequences of unknown bacteria
ttctgctttttttaccagcatctttatcacccctcactattataccgcattcttttcctcaattcgagaatctccaatgagaaaaaaggccaccttctggtgacctttttcgacaggctgaggttccgaaccccctatcgggttcggaacctctttttttgtcagtatttcttgaagaggtcgtacatcttcttgtccagcttgtggcccttgtagtcgacgtagtccacgtccgcgcgctcgctgtccaggatgccgaagccgccgcggaagttccacagcgcaaggccgatgttgtaggtcttcagcgcgtccaggacgtcctccatccagcgcagcgtcacgtcgtgcggcgtctggttgaagcagccgccctcgccgcagtgcacgcccatgttgtagttctgcgccagcgtcgcccaggcgccgtagtggcggaagaggcgctcgcggtcccaggggccgtcggccgcgtatccgcccggccaggtcgccgtcgggaagttgcgcttgcggtccacccacagcgcgcggtagtgcgtgatgcccgccgggatgtaggcgcggcaggactggcccacgttctcctgcgccatgtccgcgataattcagagtggatcaacaacgcctgccgcacacttcaaccaacaaccagtacacgcccgctaccggcgtgcccagcccgaacgagacgacccgcatggacggcttcgacgcctttgaggagatccatgagtacatccagacctcgccgaattataaggtccatcccctggattgggaggtacagacctttggcggagagctctactcgctctacggcgcgtttgactccgatgtcaagtcgaagatcacagagctggtcgtcggcggcggcgacgtggacgcgcagtgggatgcgttcctggccgagatggagcccaagtggcagcccgtggccgaggagctcaacgcagcccttctgaaccagtaaatccctttccctttgcgctccccgggggcggccgcacaggccgcccccggcttttttttcgcccgcgcgcgccggttgaaaaaggcgcaggggtttgctatactgagcgggagaggcgcagggcggctcgccgccaaaccagcgccgcacaacggaggaaccccatgaacccgtacgaagtattttcgcaaagacccgactatgaaaaccccgaggtgctcagccggtcgcgcctgcccgcgcacacgcgctttggcgcctatgccagcgtgcgcgaggcgctgcgcggcgacatccgggagtcctccaacatcctttggctggacggcgactaccggttcaagctctacgaccggccggaggcggtggagcccttctggcaggaggactttgacgacagcgcctggggcggcatcgccgtgcccggctgctgggagacgcagggctacggcctgcccgtctacacgaacaccgtctacccctgggagaaccgggaggaggattcctatgtccggcccaaggccggcgggaagctcgagcccaacccgccccacatcccgcgggagaaccccaccggctgctaccgccgcaccttccgcctgcccgtgcgctttgagggccgccgcctgatcctgcgctttgagggcgcggagaccgcctactacgtcttcgtcaacggcaagtgcgccggctttgccaaggacagcaagctccccagcgagttcgacgtcacggacctctgccgcccgggggagaacctgctggccgtgcaggtgatgcactttgcggactccagctacctggaggaccaggactattggtacctgagcggcatcacccgctcggtcatgctcctctccaagccgcgcatcgccattgaggactacaagatcaccgccatcccggacctccaccaccggacgggcgaggtcgtctgtgacgtgaccgtcacccgtgccgacggctttgcggactgcggcgtgcggctgaccatttacgaccgcaacggcgagcgcgtgggccagggccgcggcgagatccagacccgcgccgagtaccgccaggaccgcgcgcccaccatgaacaccggccgcatccgcgtgcacctgccccgcgtggagctctggagcacggaggagcccgtgctctaccgcgccgtcgtggagctgacgggcaagggcggccgcgccgtggacgtggaggcctgctccatcggctttaagaccgtggaggtccgcgacggcgtggtcctgctcaacggcgagcgcctgctcatccgcggcgtcaaccgccacgagcactgcctggagggcgggcgcaccgtcacccgcgcgcacatgctcgaggagatccggcagatgaagcgcatgaacgtcaactccgtgcgcacctgccactaccccgacagcccggattggtacgagctctgcgacacctacggcatcctgctcgtctgcgagtgcaacatcgagacgcacggcctcatgggcgccctcacgcacgacccggcctgggccgccgcctttgtggaccgcgcccagcgcatggcccgctgctacaagaaccacgtcagcatctactcttggtccctgggcaacgagagcggctccggcgccaaccacgccgccatgtacggcttcctcaaggaatacgaccccacgcgcctttgccagtacgaggccggcgagccgggcaagaacatctccgacatccgcggcaacatgtacgccaccgtggacaacatcgtcaagatgctctgctcgcccacggacgaccgccccatcatcctcgtggagtacctctaccagatcagcaacagcggcggcggaatgaacaagttcaacgagctgctggaccgctatccgcgcttccagggcgcctatgtctgggattggcaggacaagtcgctcctgggccgcacggcggagggcgagcccttcttcgcctacggcggggacttcggcgagaacatgcacgacgacaactgcccctacttcatgacgaacaacggcgtcgtgatgccggacctggagtggaagcccgtcgcctacgagctcaaggagggctattgcccggtccgcatcgcgcccgtgccccgcgcctccgcctgggacacgctcccgcccacggacaaggcgctcttcgtcaaccacgaccccgtgcacacgctttcctattatgcggtcgtggccgaggtgctcgaaaacggcgtgccgctcctgacaaaggagctggacctgccggatatcgcgccccttgcgcaggcggttgtggacgtcgagccggcctttgcgcgcaagccgggctgccgctacgacctcaacctccacgtcctgcgccggacggcgaccttctttgccgaggcgcgggccgaggtcggctgcgtgcagttcccgctgcagagcggcgcggccgtggtggaggaggcgcccgtgcgcgtgctgcccgacgccgccgtcgcctgggaaggggagacggtgcgcgccgcggccggggaccttgcggcggagttcgaggagaagaccggccacctcgtgcgcctgtcccgcggggagaccgcctacctctgcggcccggtgcgcgcctgctttgaccggcccatcagcggcctggactgccaggcgggctggggctggtgggacatcttctccgcggcccgcggcctggaggagaagtgcacgcgctttgcggcctttgccaagggggacaccgcctttgtggaggcggagtacgggttctcgggcgccttcggggcgaaactgaccctgcgctggcgcctgacggcggaaaacctggagtgcgacgcgcagtgggacatcgaccccgcggtccgcgcgctgccgcgcgtgggcctggagctcgtcgccgcccccggactggaagcgctcacgtacctgggctgcggcccgaacgagagctactgcgaccggaagatgagcgcgccctttggccggtacgagacgacggtggagggcacgcacttcgcgttcaatccgccctcggaaaacggcggccacgaggggatgcgcttcctggagctggcggacgcggacggccgcgccctgacgatccgcaccgcgcaggacgcgcactttgacgcgcgccacagccggattgcggactacttcgccgcacggcacgagcacgagctgcgccgccggcccgagacctacctgcacatcgacgcggcgcacgcgcccatcggcggggacatggcctggtccaccggcacggacctggcgcagatgcccggcggcggcgcgcaccacctgcgcttctggatcgagctgcggtaaagcgcttgcggaaataagaggagcggcctccgtccattcggacggaggccgcttcgtttcgatttcccatcatacagaaccggacttgtaaaacgcgatgtaaccggcttctgttgggtggtcggcaattaagcagtttccctcgcggaatacgtgaagggcgatgagcaaatccgcccctgcggcgataaaattgaccatcagggtgagcagggataccgtgccgggataggcgcagacaaacaggatgctgcccaagcctaacacggcaaaaggcgccagaactcccgttaggtacgatttcttctctaaggccaccttgcaggcgcagctcggcatcattgcgttgagattgaagcgaaccgccttccagccctggccgcttgcaatcgcccagccgacgccatgcaatccctcatggatcacgacggagacagcgatgatggcgagaaacagaacgtaaaaggaaagcccgctgacgtctaataaatgtgctcgttccaggaaaagaaggcgatacaacgcgcccaaaacgatgacgaacgggagcgcacaaacaacccccaaaaccattgccttgccagacgggattgtgacgtctttttcctggaaccccctggctttcaggccggcttgcaccttgtcaaaatccgcgctttctctcttggccttcatagtgccctcttctattgtccgtgttttcctctacttctacaatgtatattgtctcgtgtcgtctgtcaaggatttcttctattcctgtggaaaatgagcggaatggcacaacttcggggaggcggggcggatttggcggcatgctttggcctccgcccattcggacggaggccgcttgctgccaaaatataaataggtaggattgcgctatgcctcgacctcggagatgaaggagatggccgtgaccttggggcccgtgtgcgtgcccacgatgcagccgacggtgagcaccggcgccttggtcgggtactccgggaaagcctgctggagcagggcgatgccctcgtcgttgaaggcgtggccgtagtagacggggtagttcgtgtcgatgcgctcgttggcgtcgaccagctcgcgcaggagcttgaccgcggccctggtgccgcgggccttgcccacggccgagagcacgccgcccttgagcgtgatgatgggcttgaggttcagcgccgagccgacaaggcccgccgccttggagagccggccgcccagcaccaggtagcgcagcgtctccaccagggcgtagacgcgcacccggccggagagcgcctccacctgctcggccacctcgcgcgcggaaaggcccgcgtcccgcttctcgcaggcgatctgcaccatcagcgccagggccagggccgtagccttgttgtccacgacgtagatgtcctttcggccgagcatctccttggccacgagcgccgcgctgtaggtgccgctcaggccggaggagatgggcagcaccacgagctcctcgtccggatagcggctgaagatctcgcaaaactcgttggccgtgacctgcgaggtcttgggcaggctctggcaggcgggcagaatctcgtggtaaaagggctcgtcctggatgtccaccttgtccagatactccttgccgtcgatgctgatcttcatggggatgaccagatccactttgaagcgctcgatgagctccggcgtcaggtccgaagagctgtcggtgatgattctcatagcgattgttcccctttgttttcggaatttttcgcggggagggcggccgcgtacttctcgcggaagaagcgcgccgcgccctccagcccgcgcgcgagggccgaggcctcctcgggcgtgaggcggcgcaggatctcccgcaccatctcggcgtggaaggcggcgtgccgcgcgtccgccgcgcgcccgcgctcggtcagctccaggcgcttgacgcggcggtcgcgctcgtcctgccggcggagaagatagcccttgcgcaccagtaggttgaccgcggtcgtgagcgtgccggccgtgacccgcaggcgctgcgccacctgcgccgcgctgttgcgcccctcccggcagcaggcggccacggcctcgatcacgtgcagctccgtcagcgaaaggtcgttggacgggcccgcggcaaggcagcgctcctccgtgcgcaggatctcgccaaagacctccacaagaaaggcgttgatcgcctgcgcgctctcgtccatggccgaccctccccagttactttgaacttcaaaccattatagacccttttgcggcgtttgtccatgggtgcggcgcattttttcgggaagaagcgccaggcaagggggaactttacacccgcggcggtctatgctacactgttttgtaggagtatgcgccccgaagaggggaacgaagaaggagagcgattgcagccatgacgagagacgaaatccagtcggtcgccctgcgcgacgtccaggtcgcggacggcttcttttcccgatatgccgaccttgtgcgcgaggaggtgattccctaccagtgggaggcgctcaacgaccgcatccccggcgcggagaagagcggctgcatccgcaacttccgcatcgccgccgggcaggagacgggcgagttcacgggcatggtcttccaggacagcgacatcggcaagtggctggaggccgtggcctacagcctgaccacgcacccggacgcggcgctggagcgcacggcggacgaggtgatcgagctgctggaggcggcgcagcgcgaggacgggtacctggacacctacttcatcgtcaaggaccccaagaaccgctggaagtgcctgcgcgactgccatgagctctactgcgccggccacctgctcgagggcgcggtggcctactggcaggcgacgggcaaggaccgcttcctgaacgtgatgcgccgctacgtggactacatcgcgacggtcttcggccggggcgaggggcagatgcgcggctatcccggccacgaggagatcgagcttgcgctctgcaagctctacgacgtcacgggcgagaagaagtacctggaccttgccgcctacttcatcgacgagcgcggccgcgaccccaagtacttcgtcgaggaacgcaagacccgcggcgacgccttccactgggaggggaacgacgcgcagggcatggagtacttccagtcccacgcgcccgtgcgcgagcagacggaggccgtgggccacgccgtgcgcgcagtctacctctacagcggcatggcggacgtggccatgcgcaccggggacgagggcctgctcgaggcctgccgccgcctctaccgcaacatcgcggacaaacgcctctacgtcaccggcgccatcggctcgacctacatcggcgaggccttcacctttgactacgacctgcccaacgacacggcgtatgccgagacctgcgcctcggtggggctgatcttcttcatgaagcgcatgctcgaggcggacggcgcggcggaatacggcgacatgatggagcgcgcgctctacaacacggtgctggccggcatggccatggacggaaagtccttcttctacgtcaaccccctggaggtcttccccgaggcggacgagaaggaccccagcaagcgccacgtcaagaccgtgcggcagaagtggttcgcctgcgcctgctgcccgcccaacgtcgcccggctcctggcggacctgggcagctacatctaccgccgcaagggcagcgccgtcacggcggacctgttcatcggctcgcgcctggcgctgtcgggcggcgcggagctgatccagacctccgaggtgcccttcggcgggaaggtgaccttcaccctgcgcggcgcggcgcaagggttctccctgcgcgtgcgctgcccggagtgggccgagggcgtcacctgcaccgcgccctgccggaaggagaacggctacatcgccatccagaaggactggcaggacggcgacagcgtcacgctcgtcttcggcatggagccgcgccgcatctacgccaaccccctcgtgcgccaggacgcgggcaaggtctgcctgatgcgcggcccgctcgtctactgcctggaggaggcggacaacggcgcgaacctgcacctgctgcgcctgccggaaggggagccggtcgaggcggtccgcggcgagggcgcgctgttcggaatgacgctgctgcgcgccaaggggcggcgcttcgtcccgcacgggtccaagctctatgcccccgatcgccagggccgcgaggaggagacgcgcctgacgttcgtgccctactttgcctggggcaaccgggacaagggcgagatggccgtctacgtccgcgagtgaggggaggagagcggcttccatggaaacgatctggacgatcgagatcctcggcatgaacatgctgcagttcactttctacgtcggcatggtgctggcggtggtgctgatcgcgctgatcctcgtcaagcggcgctgagcagcccaaatcgcagcgcgaggccggcgggttcgccccgccggcctttggcgcgcccgcgccgcgcccgggagatcgtcttttttttgacaagattttcaacgaggaaaatacaccttgattcctggctttttttatattaaaataggatagcagggcagaacctgtttcaacaaagcgaattgtggggacaaacacaaaggggaaattgtgatttctctgccacaagtttgatagaacgctaacaatcccccggcctgcacgggggtcaggggcgcgcggcgcccgaatagggagggtaaggcgatatgaacgtccacatctgcatcggttcttcctgttacctgaagggctcgaaggacatcatcacgatcctggaaaggctcatcaccatccacaacgtcaaggacaaggtcaccctcatgggcagcttctgcatggggcactgcacggagggcgtctgcgtcaccattgacgacgaggacaagatctattccctgtccccggcaaagacggaggagtttttcgtcaaggaaatcttagggaggctgaagaaatgagcgcgattgagaccaagaaggccaactgtaagaactgctacaagtgtcttcgcaactgcccggtcaaggcgattaagttcacctccggccaggccgagatcatgcccgacctctgcattgcctgcggcacctgcgtgcaggtctgtccccagggggcccagcaggccgaaagccagctcaagaccgtgcagcgcatggccgagcgcggcgaaaagctggtggcctcgctcgcgccctcgttctacggcgccttcaaggtggacgacccgatgaaggtcgtcggcgcgctgaagaagctcggctttgccaaggtgtgcgagacggccgtgggcgctgcgatcgcctcggacgagatggcgcgcgtggccatggagggcacgatggacaacatcatctccacctgctgccccgcggtcaacgacttgatcgaaaagcactatccggagctggtgcagtacctggcgcccgtggtctcgcccatggtcgcccacggccgctacatcaagaagcacgaccccgaggccaaggtggtcttcgtcggcccctgctttgccaagatcgaggaggcgcgcgacgtgcgcgtggacgatgccatcgacgcggtgctcaccttccaggacctggaggagtggatgaagaaggcgaacctgaccctcgcctccgtcgagcccgcgccgctggactccgaaaaagcgggccttgcgcgcatgtacccgacaaacgccggcgtcctgcacaacgtcaaggcgcgcggcctcaccggctggcagctgcagcacatcgagggaccggacgcctgctttgagatgatcaaggccctgaagcagggcgacctgcacaaggtcttcatcgagatgaacatgtgcgtcggctcctgcatgggcggcccggcccgcatggaggagaggccctcccgcttctcggcgggcatgaaggtgcgcgactacggccgcgacgccgaggtcgaggtccccaagatcgaccacgcgggcatcaacgtctccaaggtctttgtcgaccgcacaaagccggtcaagctccccacggaggaggagatccgcgccatcctgcgctccatcggcaaggagagcaaggccgacgagctcaactgcggctcctgcggctatccgacctgccgggacaaggccatcgccgtcttccagggcaaggcggagctgtccatgtgcctgccgcacatgttccagatcgcgcagagcacctccaacgtggtgctggacaactcgcccaacatcatcctggtcgtggacgaggacctcaagatcacagagctcaacgccgccggccagaagatcttcggcatctcccgcgccgaggcgctcagcaagtacctctacgagctgtttgacccgcgcgacttcgagttcgtgctcgagagctacgagacgatcctgagcaagccgctgaccatcgacgaatacaacctcaccgtcgagcagacgctcgtctacctgcccaaccagcacggcgtcatgggcatcctgcgcgacgtcagcgccgagaaggagcagcaggagagcctctaccagctgcgcgtggacaccatgaacatggcccagaaggtcatcgataagcagatgatcgccgcgcaggagatcgcctcgctcctgggcgagaccacggccgagaccaaggcgacgctcacgcacctgaagaacatgatcatcaacaatggagatggacgcgtatgatgatgcacatagacattgcgtggaaatccctcaataagtacggcgaggagctctgcggcgacaaggtcgaaatcgtccacgcgcaggattccgacatcctcgtcctctccgacggcctgggcagcggcgtcaaggccaacatcctcgcgtcgctgacctccaagatcatcatcaccatgctgcaggagggcctgtccgtggacgaggcggtggacaccatcgcccacacgctgcccatctgcaaggtccgccacatcgcctactcgacgttctccatcctgcagctgttccacgacgggcgggcctacctggtcgagttcgacaacccggcctgcatcttcatccgcaacggcaagctcatggacatcccctacgagatccgcgagatcgccggcaagaccgtgcgcgagagcaagttcgacatcgccctgggcgacatgttcgccatggtctccgacggcgtggtcttcgcgggcgtgggcgcgatcctgaacctgggctggcagtgggagaacgtggcccagttcttcctcgagtgcgcgcagaagaagatgagcgtgcaccgggtggtcgcctccgtggcgcaggtggtcgacaacttctacatgcagaagcccggcgacgactcgaccttcctcgtggcgcaggctgtgccgcgcaagaacgtgcacttcttctccggcccgcccgtggacaaggagaaggacgaggagatcatccgcgacttcatgcgcggctcctgcaagaagatcgtcgccggcggcacctcggccaacatcgccgcgcgcgtgctgggccgcaagatcgtcacgaacctcaacttcaccgatcccgccatcccgcccacggcgcagatccgcggcatcgaccttgtgaccgagggcgtgctcaccatcaaccgcgccctggagatcctgcgcaagttctgcgagcagaacggcgaggtggacctcaaggagctggacgccgacaacggcgccgcgcagatggcccgcatgctcatcgaggactgcacggaccttacgatgttcatcggcaaggccatcaaccccgcgcaccagaacccgaacctacccatggacctgagcatcaagatgcgcctgctcaacgagcttgcggacgtcatgcgcaagatgggacgccgcgtggaggtcaacttctactgacgacaagggcgcaaaaggaaaggaagaaagaccagagatgttcaagattgagagcgatacgcgcaggctgaagcacgacgtgctcacgcgcgtggcggagctggcctaccagggaaagctcaacagcgagaccatcgacgagatcccctttgagatcattcccggcaggcagccgcacttccgctgctgcgtgtacaaggagcgcgagatcatccaccagcgcgttcgcttggccatgggcaagatgccaaacggcatgcagcccacaaccgccgccgtcaccgtcatccccgccgcgtgcgagggctgccccatccagcgctataccgtgaccgagaactgtcaaaagtgcctggcgaaaaagtgcatggcggcctgccccttcggcgcgatcagcatgtccggccgcggcgcgtggatcgatcccaacaagtgccgtgagtgcggccgctgcgccgccgcctgcccctacaacgcgattgcggacctggtgcggccctgccgcaaggcctgcccggtcggcgccatcgagatcggcgacgagaagctcgccgacatcgaccaggagaagtgcatctcctgcggcgcgtgcatgcaggcctgccccttcggcgccatctccgaccgcgcgcagatcctgcccatcatcgaggacatgcgcgccggcaggcaccttgtggccatgatcgccccggcactcgagggccagttcggcgccaacgtcaccatgggccagctgcgcaacgcggtcaaggccctgggctttgacgcggtctacgaggtgggcctgggcgcggacgcggtctccatgtccgaggccgaggagctgctcgagcacctgaaggcgggactgaagatgaccacctcctgctgcccggcgttcgtcaacatgatccgcaagcacttcccgcggctgcagccccacgtctcgaccacggtctcgcccatggcggcgctctcgcgctggctgcgcgagaagtacccgcagcacaaggtcgtcttcatcgggccgtgcgtggccaagaagaccgaggagatcgagggcggcccggactacgtgctgaccaccgaggagatcgtcgccctgctcgacgcgcgcaagatcgaccccgagcagatggaggacgccgagcaggaggcctccgcctacggcaagggcttcgcctcctccggcggcgtcaccggcgcggtgatgaaggccatcgccgagatggagggcgaggtgcccgccatctccgcccagcgctgcaacggcgcggccgagtgcaagaaggccctgcagctcctgcaggccggcaagttcgacctcgacttcatcgagggcatggcctgcgagggcggctgcatgtacggcccggccaacatgctctccgagcgcctctacacccaggcgcgcaagaagctcctcagccaggcggacgaccgcggcgtcgtccagaacgcccgcgaccagggcttcgacaagatccacatgcacagataggcaaaacggggcgcgcagcctccgccgccgcggcgggagggctgtgcgcccattttttatgaaaaaaggaggaaaccgcccatgttctgtatgcgctgcggcgccgccctgcccgagggcgccaagttctgcacggcctgcggccagccggccggcgcaccgcccgcaagggccgccgcacccgcggcttcgcccgcgttttcgcgctacctcgccctggtcgaggggcgcgccggcgcgcccgggacctacgtcgcggatctttgcgcctggcagttctacagcacccgcatgtccgcggccctagccaagatgaagcagttcttcttcctgcgcgagatggagggcgcggatggcgcgcaggcgcaggcctttgccgaggcctgcgtgcagcgggccctggccaactatcccggcctgccgcgcggcttccagaacggcgtggtgatctaccccgtcctctgccagcagcgggcgacgcccggcgcgctcgaatacgtgcgcgccctgccgaagaaccactttgccgcctttgcctgccccatgctctttgagtatgcgacgggcaacctctactacggcaccgagctgccggtctggggctttgccatggtcggggggatccgcaaggccggcgccgccctgctcaagccctgaggccctgcaaccgcgcggcgcgctccctcgttgaatagggcagaggggagggagaggacttgcgcatcgctttgctcgtcatcggcgcgctgctcgtcgcggacgcggcgttcgccgcgtgtgccgggagctggaacctgggcgccgcgctgccggcgatcctgggcctgccgctgctggccatcggcctgttttatgaaccgatgcaggcgctgtttgcatcgggcgcgggccgggtcctcaagtggctgctcgtgggcgggtacgcggcgtttttcgcggtgtttgcggcggcgtccgtgtgcatcgccagctacagcgcccggcccccgcagcccggcgcggacgcggtgatcgtgctgggctgcgccctgcgcgggcgcgagccctccccggcgctcgccgcccggctcgacgtcgcgctggactaccttgcggagaacccgcaggccgttgtggtcgtcaccggcggccgcggcgcggacgaggaggtcgccgaggcgcaggccatggccggctaccttgcgcgccacggcctcgaccgcgggcgcatcctcctggaggatcgatccgcctccacgcaggagaacctggaaaacgcccgggaaatcctggcccagcgcttccccgcgggcgcgcgcacggtgctggtcaccagcgactaccacctctttcgcgcaagccttgtggcgcaccggctcggcctgcgcacagagaccctgggcagccccacgagcccctggctccttcccaactgctacctgcgcgagacggtcgccatcgcggggtacctggtcctcgggcgcctgggatgaggccgcgcgcaggggaaaattcacatttttttgcgcaaaaagcggaggcggaggcttgacaaaaatgacctgggttcctataatggaggagaatgattgcgcgggcgtaactcaatggtagagtgccagcttcccaagctggttacgtgggttcgattcccatcgcccgctccatagactgtggaaagcgcggaggggaacttctgcgcttgcttcagtaaaatgaacgtggggcccgcatccaaacggcccaccgacgaccaagggaggtttttacaatggcgaaggctaagtttgaacgcaccaagccgcacgtaaacattggcaccatcggccacgttgaccacggcaagaccactctgaccgctgccatcacca

SEQ ID NO: 2359 - DNA, 7729 bp, Unknown
  16S sequences of unknown bacteria
atcgagaagtattccttctgttccttgtcgaactttggcatcggaagaataccgaagtcggtctccatcgccctgaagacggtgactctgacgagtccggcgacgttgaacatcacgcgtccctccgagaacgccgggtcgatcacgtccgcccatacatccgcggccttgaatctgtcggagaacattgtcgactcgtagtcgcggttgagctggattgccttgacaaaagagtcatggaagcgctcgctgttcaccgtgaacaccggaatatcgtccttgttcttctcatatgcctgaactccgcagccgaccatgtaggcgtaggtgttgaatgattcgccgatgcagccccactgatccttctcgcccatgacgccgtcgccgtcgagatccttcgcgacagcgcgcgagcactcggtcatgtagtcaatcgtccatgtaccgtccttgaccttgtcatagaagttctcaaagccgtaatcctccgccagcttcttgttgaagagaacgccgtaggtcgcctcgttgtccatcagaatcatgtcgccgacagtagcgaacagtttcccatcaagcgaggtctgttcattcgcgttctggtcataccacggcttcgagagatccatgtacggcacgctgtgaagctccatcagcattccatctcccgcgagagccttcggaacgtcgttgtagcccgacgcgaccatgtcatagtcgtcagacgacgccatgaccgatttcctcagcggcgaggtcagatctcccgtgccgttcggcgaggggatatcgaccatttccacgccgaagcgctcatatactttcatgttgcgggcgtagacagcgtcgtttatgacgtcgccgttttcctcggcggcggcgatgtctttcgacttccagtgtacgttcgtgtcgcccttagtcaggacgcggaacttgtagccttcccatctggtgtcagggaggacaggctcgatgcgcgcggcggtcgtctcggattcggctgtgtcggtagttgtcgcggaggtgtcgtctccggacaccggacctgacggtgaactcccgcaggaagcggtcagaaggatcgaaataagcaggaaaacagacagaagcttgcggttcatgataatatctccttaaaaaaatattcgcgggggaaaaatcaaataagattaaaattgatccgatattgtgcaaagtactgtcacgtgcgctcacacgctgtttgtattacgtatatattttaccacattcctcccaaaaaaacttgaacaaactgttaattaaaaatatcgcccggattgcatataatcaggacacggacgagatcctcagtctgtgtcctgatcgaaaactatcttaatcagtgtttccttagataatctttgattatccggatattatcctccggcgggagagttccgtcgagcgcgacgacgtcacagctcagataagcgacactgtcgctgacctttgactctgagagccccgccgccatcctgcggaactcctgctggctctcgtacatatcgccgccctccgcgactctcgctccccagcgggcttcctcgcggttctttatacggctgatccggatgtcccgcggggtcttcagccagaataccgtgtttatctccgacagaagctcttcgcaccagttgagcgatacgccgcacaggatgaaatacgggtgcaggcggatgtcgtcgagcagagccttctcgacctgctcttttccgcgcggggcggagaacggcagagcgccttcggtcatgtcggctgtcccctcgagcgcgtttcgtctcgattccctctgctccgggaaaaagtaatcctcgacgtccatttcatggtatccggtctctttcgcgagcatatgcccgagagtcgatttaccgctgccgttgagaccgactatcgcgattccattccggttattcattcgagttcggagtaggcggtcaatgtcttctcaagctccttctcagccgccttcagcttcgagtcgatggtggagcttatcttgccgtcggtcttaaggccgtttatggatccgatgattccgccccagtcgaacatatacgcgatatcgaagatgcggttatcgaagattatgtcgagcatttcggaggacgcgtcgtcgcgcgcgttcttcgtcttgaggactatgtcgtagtacgcgggggtgagtgtgtaataaccctcagcggacagagcctcgatcaccgcgccgcagcgctcggcgtccgcggtcgccggtatggcgatgctgttcgcgcagccgattgagaccatggagttatattccttctggctctcgtcatatttcgggagcgggagtatgccgaaattcgtctccatcgcgcggaagacagtcactcgtacaagtcccgcggtattgaacagaacacgcccctcagtgaacgcggggtcgattatatcagcccagacatcagccgccttgaaattttccgagaacatcgtcaccttgtcgtcgcggttgagggtgacagccttcgtgaacgcgtcgtagaagtgctcgttctgcacgtcgaaaaccggcacgtcgtccttgttcttcttaaccgcgatggcgtcgcaggcgaccatcagggcgtatgtattcagcggctcgccgatgttgccccactggtccttcgcgcccatcgtgccgtcgccgtcgaggtccttcgcggtcagcttcgagaactcggtcatcttatctatcgtccatttgccgttcttgaccatctcgtagaagccctcaagggcgtagtcttccgccaatttcttgttgaagaggacgcagagagtcgcctcgttgtccatcagtatcatgtcgcccgccgtcgcgaaaagcttgccctcgatcgacagctgctcgttcgcgttctggtcgtaccacggcttcgagagatccatgtacgggacgttgtgcagctccataagcattccctcggtcgagaggttcttgaccgcgtcgttgaagccggatgcgaccatgtcgtagtcgtcggacgccgccatgaccgattttctcagcggggcggtcaggtcccacgtgccgttcggagacgggatatcgaccatctcgacgccgaagcggtcgtaaatcttcatgttgcgtttgtagaccgcgtcgttgatgacgtcgccattctcttcggttgcggcgatgtccttcgacttccagtggacgttcgtttcgcccttcgtcaggacacggaactggtagccctcccatttcgtgtcgggaaggtcgggttcaatgcgggcttcggtggtctcctcggtctccgttgactcggtaagctgctcctcgctcgtaacagcaccgtctgtcggcgcgctcccgcaggaggcggacaggatgagggacatcagaagaattgcggacaggatcttgcggttcataatcataaactccttataaatataaaagttcgcggggataaagtcaattcgtacaaaattaagaatcagaattgtgcaaagcgctgtcgcgtgtgctcacgtctttgtattatcctgtaagtattatatcacaaaactcagaaaaagtcttgaacaaagtgttaataatgcgtttgcccaaaaaaagcacctcccggaaggcgtacctgtccgggaggcggatttgaaaaaggctgacgatatttaaggatacactgaataaatcgggtttccgcagaaaaaatacttggatttataggcttttttgcaaaaataaccttaaatcagcgtttccttaatttccgctgacgattttataataagcgctcgacgtgatcttgtagactgccgcgtacagtacggcgaagacaaggaagctgagcgccgtcctcatgatgagcagcgacgtgttcgtcaggttgaacagcgtcagcatcttactgacgaacgggaacgcgaacccgaggtgcagacccgcgaatatcagcggcagaaagaagacggtcagcagctgcgagttgatgctcgccctgatgtcgcgcttcgtcataccgaccttctgcatgatctcaaaccgcgcggcgtcctcgtagccctccgagagctgcttgtagtagattatcagcacggcggcggacgtgaagatcaggctgagtatcagaccgatgaagaacagaccgccgtagatgccgaggaattcctcacggttagcctcgcgcgagcggctccagagcgattgatacgcaacgctcccgtcgagctcattcgcaatatcctcgtagaagctctcgccttcctcgggggaaagcggggcgtcgaagccgtaataccagagcgccgtgaatctctgcgcgccgatctcgtccgcgagagtgttcagccggtcgaccgtcccgaaaaagtccggaactacgacgatcagggacggcgccatgtttgatttgatctccccggcgtcgaaaaagtcggtaagtatccttctgatgctgaaaggctcgccgtttatcgtcatgctgtctccggagaaatccgtgcggtaggagtagacaagcgtttcgccgtcagacagggtttcgttcgttcccatcgccgtgttgtagtcggagagcgggacgagtatcagctggatgtactgcgcgtcctgttcgtttttcgtcacgatgttcgtgcgcttcagcgacgcggaatatgacgcgcggcgccagtcgagaatgtttttcgccgtgtatccgcctttttcgagcgcttttccggcggcggagcggagtttttccgtctgttcgtccctcatgtcgtcgaagctgtcgaagcgggcgttcacgttcacctctctcgggtagatcgagcgcagggagtcctcgaacccgaaatacaggcaggtcgtcgacgagatcatgacgagaaccatcgtcgcgaggatgcagattgacgcgagacccgcgccgtttcgcttcattctgtagaccatcgacgagaccgagacgaaatgccgcttgttgtagtaataccccttgttcttctggagcaggcggcagaagaccaccgagccggagatgaagatcatgtatgtcgccgcgatgaccatcagcacagcgaagaagaacagcgtcagcgccgcaacaggatcctttatcgtaaccgcgagccagtacgcgaagccgaggaggagaactccggcgataccgaggaagatattgcccttcggcggcttctcgccgacactctcgctctttgtgaggtcagcggcgcttcggaagccgacccggctcaccgaacggagaagtatcagcccgaagataataagataaatcgtgactgtgaacacgagcgccgacggggagacagtcagcttataagtgaaatccgcgccgatgagccggagaagcccgacctccgcgatcttcgagaacagcatcccgccgagaagccccgcggcaagcgatatcgccgccgtgaacagcgcctcgaagagaagtatcagcgcgaggttgaatttgcccatcccgagcacgctgtaaagtccgaactcccgctcgcgccggcgtatcaggaacgagttcgtgtaaaagaggaacagcgccgcgaacccggcgacgacgaatattccgagattcaggatcatcgccgtcccgcttgtcccggtcgcgacggtcgtcagcggggagaaggcgagaaacgcgaggatgtaggtcatcatgaccatcccggcggaggtcagcaggtacggcacgtagagccgtccgttcttgcgcataccgccgagcgcgagcttcgggtagagagaaaagctcatctcatgtcacccccggagacggcggaatctccgcgcgcgtcgcggatgtcggcgccggtcgcgatgatggtcagcgtgtcggagatccggcggtagaaggcgtccggcgtgtcatccccgcggaagagctggtggaagaccacgccgtcacggatgaacaggacgcgtccggcgcggctcgcggctccaaccgagtgtgtgaccatgagtatcgtctgcccgcccgcgtttatctcgccgaacaggcggagaagctcgtcgctcgagcgggagtcgagcgctccggtcggctcgtcggcgaggattatgcgcggatttgttatcagcgccctcgcgacggcggcgcgctgtttctgacctccggagacctcgtaggggtattttttcagcagagacgcgattccaaggcgcggggcgaggtcgtcgagacgcttcttcatctctgggtacttctttccggcgaggacgagcggcagacagatattgtcctcgagcgtgaaggtgtcgagcaagttgaagtcctggaagacgaacccgagattgtcccggcggaaggacgcgagctcgctgtccctcaccttagatatgtcgcgcccgtcgagcagaacctcgccggaggtcggcttgtcgagggaagcgagaatgttcaggagagtggttttgccggagccggactcgcccattatcgcggtgtattcgccctcagcgaccgtgaagttcacgtttgagagcgcctcgacctttccgccgccgaagcgggtcgtgtagatttttttgagattttttacttcgagtatgttcatgcgtatcaatcctttttttgaagtttgtgagtatattataccacaaaagggaaatgcccgccatcgaagcggattacatttcccgggatgatattacatttttgtaagatgggtcttttttaagactggtcttttttgagactggtcttttgtaagacttgtcagtcgaccggcgcggaatgtttcgggaacgagatataaacgctcgtgccgttcctatcagattcaatccttattgtgtgacccagccgcccgcagatcattttgcagaggtagagcccgatgccgcttgagtgccgtccctcctcgcttcttccggtcattcctgtgtatcccggctcaaagacgcgcgggagatcctcgggtgggatgccgattcccgtgtcgcgcacgcagagggtgtccggcggggacatgaagacgctgattttcccctcgcgcgtgtatttgagagcgttcgacagcacctgaccgatgacgaagccgagccatttgcggtcggtcagcacggtctttccggtcggcgtgaagtcgagcgctatcttccggtaaatgaactctgacgcgaaggagcgcacctccgcgcgcaggatatcgtcgagcggcgtctcgcggaaggtatagtcggtcgagtccgagccgagacgcaggtacgccatcaccatgtcgacatactgcgagacgcgggagagctccgccgacagacgccgcgattcgggcgtgtcggtgtttttgagtatcaggctcatcgcggagatcggcgtttttatctggtgtgcccacatggtatagtagtttatcgtgtctgcctcgcggcggggagacgggatatcctgtcttcgagacggcgtattatctccgagaggtcttcctcggcgatcgtgtccggctccggaaggtaatcgctcagatcatccggcagcgccctcagcgccgacagcgcgccgtgccgccgggcggtgcgcaatatatcgagaacagccataacaaccgcgaacgccgcgacgagaagcgccggatagagcaccgcctcaaacggaagcgaatacagagcggcgcacacgcctgaagccgcgacgaaaaccgcgaacgcggcgatcccgcgccaccggcttttcagatacagaagcaccctgtgtcctttcatgatatcatgtaccccgagccgactctcgttgtt

SEQ ID NO: 2360 - DNA, 32759 bp, Unknown
  16S sequences of unknown bacteria
cccatgccgcgcgcgacgacagccgcgtgggaggtcatgccgccgcggacggtcaaaataccctgcgcgtagtgcatgccttcgatgtcctcgggggaagtctccaatctcacgagcacgaccttcttgcccttcttgccttcttcgacggcgtcctcggccgtgaacacgatgctaccgcaggcggcgccgggagatgcgggaagcgcggaagcgacgggtttcgccgctttcagagccttcgcgtcgaactgagggtgaaggagcgcgtcgagcgtcttgggatcgatctgcatgagcgcttcctgttcggtaatcatgccctcgtcgatgaggtcgcaggcgattttgatagcggcctgcgccgtgcgcttgccgttacgggtttggagcatgtagagttttctgtcctcgatggtgaactccatatcctgcatatcgcggtaatggttttcgagggtcttgcagatttcctggaactgcgcgtagcattcgggcatgacctccgccatcttggcgatgggcatgggggtacggacgcccgcaacgacgtcttcgccctgcgcgttcatcaaaaattcgcccatgagcttcttttcgcccgtggcggggtcgcgcgtgaacgccacgcccgttcccgacgtatcgcccatgttgccgaacgccatcatctgtacgtttaccgccgtgccccagctgtacggaatgtcgttctgcattctgtaatagttcgcgcgggggttgtcccacgaacggaacaccgctttgatcgcgccgaagagctgttctttcggatcgtcggggaagtctacgccgattttcgccttatattccgctttgaactcggaggcgagctttttgaggtcgtccgcggtgagctcgatgtcctgcgtgacgcccttttcttccttcatcttgtcgatgagctgttcgaaatatttcttgccgacctccatgacgacgtcggaatacatctggataaatcttctgtagcagtcccacgcccaacggggattgcccgatttcttggcgatgacttcgacaaccgtctcgttgagaccgaggttcaaaatggtgtccatcatgccgggcatggaagctctcgcgccggagcggacggaaacgagaagcgggttttcgagatcgccgaatttcttgcccgtaatcttttccatcttctcgatgtaggtgaggatttccgcctgaatgtcgggattgatctgtctgccgtcctcgtaatactgcgtgcaggcctccgtggaaatggtgaagccctgaggaaccggaaggccgagaccggtcatttccgcaagattggcgcccttaccgccgagaagctcgcgcattttcgcattaccctctgtaaagaggtagcaatacttttttgccatagttgattatttcctccatctgattatttactttatcgttttaatggttatcggcccgtttgagccttgtattttttaccataattcattctaatacaaaacgcgagaaatatcaagtctttcgcgggagctttttcggattttttcgcatttttatcaaaattttttgcgcttcgaggcgtttttgcccgaaaaagcgagacgggcgaggcctttcgacccgccgtcccgtcttttttaatcattgcaaatttaccgtttgaaaagcgacctgctttccgccgcgccgtttgcggccgagtcttttttcaagtcctctgtccgagcaatcccgcgttttcgcggcggaaatgcgctcacaacagattgaaaaaggcctttccgcccgaaaggagctcctcgtccagcgtccagacgccgtccttttgcttaagtccgaaagaacattccttcgccgcctcgaacacgtcgtctccgtcatagccgacgaatttatccgacatgcgttcgagaatctctttcgcctcgggcgtaaagtgcgacgtcgtcacgaaaatcccgcggctgtgctggacgccctctttcgcttgacggcacgcaaccgcgccgataaattgctgtaacagcgtctctccgaccacccacaattccaccttccccttggaagggtcccagttcttcgcctgtatgtagatggtctcgcggaatccgaatttgtcggtgagcgtaatctccccgtcgataccgccgtcgcgctctccgcccgacactttcatcccttccagacgcctgccgtttttcatcgaatatctttccagcaggtataccgaataatattcaaaataatctccgcccaagctcctgagccgtttgagaaattccgccttcaaggcctcttcttccgtcgcgggcgccgcgggcgcggccgttcccctgccgcggcggttctgtctgccgtcgcgcgccgcattcgccttggattgaacgggcgccgtctgtcccgaagctgttcccggatttgtctgcgacgaggtcgccgacgcggatattgacgcagaaacagaccgaatttgactagtctgtgcggaagccgtctgccgtgcggacgtttcgacgcgggggctcgcactccgattgttttccgacggagtattccccgaacgcgggcctttctgttccgcacgctctctccgctcggcgggagaacggcgctcggcagatttttcggaggcggaagaaaccgaagactccgcgcgcgtatccttggcataagaaactttttccgcagagtttttcagtcccgcgttgcccaaaaaggcaaactcgggcaaaacgggttttctcgaaagggacggaatcggtgaacccgccgtcgaatccgaagtcgtttcctcaaacgaacgcacagccgattgagccgaatcggatacgccggaagccttttcggaagaagtctttgcaggggaagaggcggccgtttcagccgaagcggtctttgccgaaaaaacgggcgcagacgccgacgggtcagaatccccgttgccgctcttctttacggcattcacggcattccgctcgggcacctttttgccgaaaagcagcgtcatatcgaaaaccggagccacttttccttccggttttaccgtcaaggccttttcggaacgcttttcttcaagctctttttccgaaacggcattttttgcgacgatttctttttccgcgggtgctttttccgattccttctctaaaatcggcgcgttcggaaaaacttctttcagcgttttccccgcttcgggagcttcggaaagctcgggcgcggagacttccgacgtctgcgacgccgcgggcgtttcggacgaggaaacttcccgttcgatttccttcgtctctgccgtggtattccccttttcttcggttttttccttttcctccgaaacgggaatctgttccgcctttattttgggttttctgccacgcttcttcggcgcgggtttctccgccgccatatcggactgtcccgatgccgcggacgcaacgggtgcggaaagggcaggcgaatttgccttaggttttctgccgcgctttttgggcgcgggcttttctgccgtcgccgtatcggactcttcggaagccgcggcagaagcggcgggagttacggccgaaacgggcgcggtgtcgattttttccgcaaaatcgctttctgccgcggcttccctcacaaatttttccgaattttcctttacgggtaccgtctgcgcgggcgatacctctgccacttcggaggccgaagaggtttcggactgcaaaacgggcagcgcctttgccttgggctttctgccgcgctttctgggcgcgggcttttcagccgccgcggcagactgttcggagacctcgtcagaagcggcgggagttacggccgaaacgggcgcagaaataatttctgaaacggcagcagaagcagtctctgagacaggctcggccgttctgagagccgcagaaacgttttcgtttccggatttaactttttccgcagattttcttcctctcgttttcttttccttcgtctgtttctcatccgctctatcagagatttttttagctttcatcggcaaagaatatacgttgtctttaaccgatatttccttattgtcctccataagactgagcacggaaccgatacggcctttcagatcgttgacgtcgcccgattcttcgggataacgttcggtatgagcctttaccgccgcgtcgagaagctcattccatttatacgaccgcttttcgagcagctctttgagaattaccttcatgcgaagcgccttttcctttttggtcacgggcactttctccgtttgtttttgtgtcttgtccattactttttccataaaaatcgcttgcggcgggggtccgcgtatgtttttccctgatccttccccgtccgtccgctctctgaaattctgaaaaagcgccctgccgaaaaggcgcctcttttcattcgcagagacggataaattcgccgaaacacggatattcttcctccgtcttttcggcgaggtatgtttttatcagtctgagggcgcgctttccgccccccgacgtcttttcttcgtcataggacagccccgcgcatttgcgcagggtctgataagtagattcgctggcgcgaacgccggacgcgcagtccgaacatgtaaaataaccggcttcgaagtcgaagtatgcgtttcccttcacttcgccgccgcagatcccgcacccgtccagatcgatcatgtatcccgattgatgcagcgcggtcaaagaaaacgaaagcaacagctccgccgcgtccccttccgtaagggccagacctttgagggcttcgaccgcggcgatgaacaccgcttcgctctccccctcctcgacgagaagagcgttacagatttccaaaaccgaacatgcggcataatagcgcgcgatgtccgtgcgcaaagaatagaacccgtcgtacaaataggcggcggtcaccgtatacctgccccccttctctgccaaaacgtattccgaaaaacagaacggctgcgccgcgaaagaaagttttgctccccgctttctgacgccgcggattcccgccgtcacttttcccttggagggagtgaacagagtgagcagtttatcgttttctttatagtccgtcgcctttaacaccagcgcgtccgtcttgaattccatatcctgccttctccctacattcggtcagtgtttttttcgggacttatattccgatttcagttcctgatacagcatgtaatagctgatatttcccgtctttgtgaacatctcccacgcgaggcgcgccgcaccgaaatccccgtttttatcgtgcatttttctttttccccctttaccgttagggtggggaataatgccgaattttatacggaaaaaacgccgtgcggaaaaacggaaaatttttccgaaaatacccgcaaaggatttttaagagaacaaccgacaggccgttccgaaacgaatcgacacaccctgaaagacttttgaagaacaacgcctcttttcccgacgaacccaaaagacttttcaggaacaaccgacaagcctttcccaaacgaccccaaaggaatttcgaagggaaatcagacaccacggtttttgtcacggttttacaaaacgcgctgtgcaattttcagaaaggagtttctctccgctcaaagttcccgaaattcctcgtagccgtactccttcatgagccccggcttgtcccgccaatcttccttgactttcacgtacgtcgtgagaaataccttcttgccgaggaatttttccatgtcctgccgcgcgaaagacgaaacctccttgatagcccgtccctgcttgccgatgagaatggctttatgccccggtttttcgcacacgatgtcgagattgacttcgtatacgccgttctctcccaaacggaaaatattcacgacgaccgccactccgtgcgggatttccttgtcgtatttgagcaaaatcttttcgcgcatgatttcggcgatcataaagcgttcgctcttgtccgacacgatttcttcctcgaataccttcccgccctccggcatggaagatatgagaaactccctcaaatttttgatattgcggcccttcctcgcggagacgggaaaaacgtcgaggtcgatccccgaatccgcaaacttcgccatgtcgagaggaatattctccttcggcataatgtcgattttcgtatacgccacggccatcggaagtcctaactccttgtattttctcatgagggaaaaatcttcctcccgcactccctcgtggccgtcgaggacatacaaaatcaagtccaccgctttcgcgctctcctccgtcgtccgcatcatcatgtccgtcagggcgttcttcgccttataaatccccggcgtgtccacgaacaccacctggtaattctccccgttcatcacgcctaaaatcctgtcccgcgtggtctggggcttgggcgacacgatggacactttctctcccaccatgacgttaattaatgtgctctttccggcgttcgctctgccgatgaccgctacgtatccgcttttcataaatcctctttcgtcagtcctctctcgttattcccattttgccgagaatacattcctctttttcccgcatttccgacttctcttcctccgtcatgtggtcgtaacccagacagtgcatgattccgtgaacgagcaggtaattcagttccctacggtaggagtgtccgtattcctccgcctgctccgccgcacgctttttgcacaccgctatcgatccgacaaacaaattcccttcgtcgtcgacgtcgcaagggtaatcccgacgtttcagcgtctttcccttgataccgtccagagcgggaaaactcagaacgtccgtcaccctgtcggtggagcggagctcgcggttgagccgccggatctcttcctcgtccgtgaaaataaactccacggcgagcggaacgtccgacttcacgaaaccgtccatcgcccgttcgagacaccgcgcgtcctccgccgaaaactcctccccgtccgaataaatgcggaaattgtccttcattggttttcgcccgtcgtcttgccgtccgcgtgcttatacttgatcgacgggtatttcacgcggtggtgatatacgcctgtcagcgtactgaccagcgtgcggcgaatcgtcgtcagatccgccatggtgatgtcgcaatcggagaattgttcgaggtccatgcgctcctcgatgattccgcgcaccgccttttccacttcttcgggcgtgcgcttggggagagcgcgcaccaccgcttccgatgcgtccgcaatcatgatgatcgcggcgattttcgtcttgggcttgggccccggataggaaaagtcctctatattcaattctccgtccgtcattttcagcgccttggcatagaaataccgaatgggcatagtgccgtggtgctgcaaagcgacgtccgcgagaaactgcggcaaatgatgggcgcggatgagttcgtagccgtcctgcgtatgcgaacggattatatccgccgaaagttcgggcgtcaattcgtcgtggaggttgtactcgccctgattttcggtgaaatattcgggctggtgcaattttccgacgtcgtgatagaacgccgcggcgcgcgcgtaatccacgtcctccccgaggtttgcggcacatgcttccgcaagctgcgccactaccatggaatggttgaacgtgccgggcgcctcctctttcagctttttgaggagcttggcgtccgagctggtcaattcgcgcaggcggaacaccgtcaggcagttgaacagggattcaaatacgggcagaatggccaaaaagagcacggcggacatgattccgcccaaaaggccgtagcccatctgctggaaaattttttcgatccccgtgacggccgtcgccgaacccgaactgctgcccgaaagtccggagacctccaaaaggaagatgataaaatcgacgggaatgacgataatcagtccgataccgacgatctggaaacgggtctttgccttattgccgaagaaaatggcgatcatgcccgcggaaaaagcaatgataaaagaagaatagacgttatttgccgccgcggtcccgtcggagaaattatcgacgacgaacattaaaatggcgcagatcatattcatgaaaatggcgtccctgcggccgaccagcacgaatacgagcagtgcggcgagtgccacgggacgggcataaatatgcacgtattttccaaacaggaaagatacgatgagactcaaatcgagaacggtaaaaatcagcgcgatattctttccgccgatgagcatccgcctatcctcaaagaaataatagaaatacgtaatcaggacgagcagaaaaatacagaaggtcatatagagataattggtccgattttccttaatggtttgagaaaaacggtcgaatttatcccccagcaacaaaatggctgcgatgaatatgagtatgaccaggtgaagaacaaataaaagcgagctcttcacaatttccttttttgtccagaccgattcgccttcccgaatgttcatccttcgtttctctccttcttttgcgccctgccgcggaatttttccgcgtccgcttcataggcgcggataatccgcatgaccatcgggtgccgcacgacgtccttatccgtcagtcggcaaatcccgattccctctatgtttttgagtatcttcaccgcatgcacgagaccgctcgtcttgccctcgggcaaatctacctgcgtcacgtcccccgtgaccaccgtcttgctgccctcgcccatacgggtcaaaaacatcttcatctgttcctttgtcgtattctgcgcttcatcgaggataataaaggcgttcgaaagcgtcctgccgcgcatatacgccagcggcgccacctcgatgactcccttttccatgagttttgcatacgtctccatgcccagcatttcctgcaaggcgtcgtacagcggccgaagatatgggtctaccttcgtctgcaaatcccccggcagaaaacccagcttctcccccgcttccaccgcggggcgcgtgagtatgattttttccacctgcttgctcttgaacgctgcaaccgcaaggcataccgccaaatacgtctttcccgttcccgcaggccccacgccgaataccaccgtattcttcttgatcgcctccacgtattgcttttgccctaccgtcttgcacttgatctgctttccgcgggaggtgaccgcgaccactccctccaaaattcccaaaatatcccccacgcggccttccttcgccagctcgatacaatacacgagccgccccttatccacgctctcccccgactccgcaaacgtgagaagcgcggaaattacctcctcgccgcatgcgacgtcccgctcctcgccttccaaaatgatcttcactccctccacataggaaacgagattcagctccctggaaagaagcgtgagattttcgtcgaacgtgcctaaaattcgggacagcctgtccaccgatttcgtgtcgattgcctgtctgatgtgtgccgtaataaactcctccgatacgccgccgctcccgcaccgacgcgatttccgattttataaaaattttctttacgcaattaccgtattcttgtatatcttaaaatcagcctgttttcgatattttccgtttccgaaacgacaatgtacgtctactatgtctaaaagtttatggtttccgtgaccgtatacgaaatttttacccgaaaaccgccctccgcttcctcgcacgatttttccgttatctctccgtctatcgcaagatacgccgccgcaaacgcttcttcctccgtctccgcctcgacaatttcgtcgtatatacaggcaatggaaacgcgcgcgatcgcggttacgggcacctgctcaccactctcggtgagaaaatacgcccccactagcggttcgcccgcctcgacgctctcccccggctgtttgaggagcgttccccttaaaaccgccgcctgcaccagcgttcccgtatgcttcgccgtcatgtcgcccgcggaaggcgccggctccgaaaaggcgctgaggcgaacttccacccgcaccgtcatgcccgtctttttgaccgaacaataactgacgtctttgagggaaagtatcttggcgctcacctctccttcacagccctttttatagggcgcaaaagtacggatgccgctctcttccagcgcacataatacttcccgacgataggcgtccgtaccgacaacgtcgattcggaacacaaagcggttggccacgagcgtacaggaaagaaaaagcaaaattccgataaacacgcccaaacgtttcttcgaccattcgaacgcggcgagcaagccctccgtccccgcctttttggcagtataaggactgtatacaggtatattataacatacatttggataaattgcaaaaactttttcggtatcttttctctttacactcaaaagtatttggttttttttgagtttttttgcatgatagacgcaaattccctccctttggagcttggaaagggcgcgttcgggcataattccctctatgacgattttttgcaaaagcattttttcaggcctccttggaacggatttccgaaatgcgtcccgaaagttcgaggtcgccgtcacaatatttctcgatgacgaaaccgctgccctctatttccagaacgacgcggcgaaagccgagaatcacacgctcggaagaaaattcgctcaccgtctttacgccttggaaatacccgcctctgccgggcagaacggtataccgcgcgcccgcagacagcgccgactccccgtcgccgagttttttcagaatttcgttatataaccgcatccgccgcacctttttacaaagttttattccttctattgtatgcggcgccgcgcaaggatatgaaaagcccgctctttcccgtgaagagaaagggcggactttttcccttgcgtttttatttttcaatcagtcgttttcgggcggctcctcgtccttatttttctcgtcgcacgcaatatcgcgcagatcctcttccaccttttcgggacgatccgtgcggcagaccaccgttaaaatgtctccgccgtgcactaccgtgtctccgtctggaaggattctcgcaccgccgcgggagatttccgtcacgacggctcccgcgggccacaggatatcgcggacagagcgcccctccgcgatacagccctctttcacggaaatcgtgaaaatctccttttgagcgcgctcacggattccgttctccttttcaaagagcgaaagcagcttttcgtaaatgccatcagtgcgggaaatatctccaataaaatacccgacggataccccgatgactacgggcagaaggggagagaagctccaagtcagttcgcagaccatgacgatgcccgtaatcggcgcgcggacgatggtcgtaaaaaaggcggccatgcaaatcataaccaacagatcggcatatttttcgtccattccgagcgcaatccagccccgactcaaaagcgctccgatacacgcccctatcgccagcatgggaatgaatgcgccgcaaggcactcccgcgcccatattgacgcaggtaatgacgaatttcatgaccagcaccacggtcagcgccgcgacgaaaggcagtccgaaaagtcccgacacggaaggttcaatggcgccgccgtgcgttccgagtccctcgatgaggccatgtcccccgcccataacgtctatggcgacgaaagagaaaatcccgccgagaactacggcgacgagaattttcatccaatccctgatccacggtttcggggcagaaatctttccgaacaatcttttgctgagaaacaccgaatgataaaaagccacgccgaacagtccgcacacgatcgcggaaagaaacacgaagccatagacggagacgggcatttcataaaagacgtagctcgcaaaggaatttgcgggcgtctttcccaacatggcatagatcgccgtgcgggtgagaagccccatgatgacggaggaaaaagcgcagataaagacttcgggcgtaaagcgcttatgcgcttcctcgaaggcgaacgccatgcccgtcaaaggggcgttgaacgcgaccgcaagccccgtacacgcgccgcccgtaacctgatacctccgcaccatctcgtttctgcggagcatgcacgcgactccgtcgccgcaggcgccgccgatctccacgctgggaccttcgctgcctgcggaaaggcccatgaaaatgcttagaaggctggcggcgaacattgccaccgcttcccgataccaccgaaagcggataattccgcgcgtcgcaccctccgtctgcggaataccgctgcccttgatcatggggaccagccgcaccgccgcgctcaacaggaacgcgcccagagccaatacgacgaaaagcaaaggaataaagacgggattttgacgaatgtaggcgtaaatatcgcgagaaatctcctctcccgacgatgcgaataaattatagagcgtgaccaccgcgccagcaaaaatccccgtcaccgcgcccacggccacgagctgaacggcgtttctataaacgctgcctctgttttttctctttttttcggacatagcgcccctctcaactgaattggctgttatacagtttatagtaaaaaccttttttctccaataattcctcgtgtcggccctgttcgacgatatgtcccgcgttcatgacgagaatggtgtccgcggtgcgaatggtcgaaagtcggtgcgccaccacaaaggaggtccgccccttcatcaacgtgtcgaaagcgtcgctgattttcatctccgtgcgcgtgtcgatagaggacgtcgcctcgtccaaaatgagcatgggcggcaggcaaagcatgattctcgcaatacaaagaagctgtttctgtccctgcgaaaggcttccgccgtcttcggaaagcacggtatcgtatccctcgggcagccgtcggataaatccgtcggcatgggaggccttcgccgccgcgatcatctcctcgtccgtcgcttcgggctttcccattttgaggttgtcgcgcacggtgccgctcttcaaccaagtttcctgcaagaccattccgtaattggagcgtagggatttgcgcgtgatgtcccgcacgtcctccccttccacctttacgctcccgcccgtcacgtcgtaaaaacgcatcaaaaggttgatgagcgtcgtcttgccgcagcccgtcggccccacgatcgcgacccgctggcccggcttcacggacaaggaaaagtcctcgatgagcttctgttcgggacggtaggagaaataaacgtctttaagctccacgttcccttccgctttcggaagttctctcttgccttcgtcggagggctgctccttttcgtccaaaagctcgaaaatgcgcgcggcacaggccacggcgttttgcagctccgtgacgacgccggaaatttcgttgaacggtttcgtgtattggttggcataggagagaaaaatcgtgagcatgcccaccgtaaaggcaccgtccgaaaggatatggaacgccccgatgagcgtcaccaaagcatagacgatattattgacgaaccgcgtcgcgggattggccaaagaggaatagaacgaggcgttcagcgagctcttttcgaggcgggtattgatttcgtcgaatttttccatgttctccctttcgtgcgaaaaggcctgaaccgttttcagccccgcgatggcttcttccgcaaaggcggtctgttccccgcgcgtctccgattgttttttgaaaaacgcataagtatgcgaagaaatatactttgcgataaacatcgaaagcggcgtgacgaagatgacgacgagcgcgattttccaattcattaccagcatgaacgcgagcgtgccgagaatcgtcatgacgcccgtgaaaaattgcgtaaagcccattaaaagcccgtccgcgaactgatccgcgtccgcgataatgcggctgaccgtctctccgtgggggtgggaatcgagatatttcaaagggagcgaggaaatcttcgaaaaggcgtcggaacggagatctctcaccacctgataggtgatgcggttattcagcgcgctcatgatccactgcgccgcggcggtaatcgccaccgaaatcccgattttgagaaaaatcgttttcagagcggaaaaattcacattgccttcgccgatgatgcaatcgatcgcgtcgccgatgagaatggggacatacagcgttaacgccaccgtcactacggcgagcaagagcgtcaacaccaaagcgatcgggtattttccgacgtaacggaaaatcttctttatcgttccctttttggctcttattttatgcttttcgggggaaaccgcccttttatttttcttgggagaaactgcgttcatgctttttcctccttgtgctgagagcgataaatttcccgatatacggaacaattttccaaaagctcctcctgcgtgccgattcccgccgtttttccgtcatccagaacgacgattttatccgctccgttcatggcggaagtgcgttgggaaaccacgaacaccgtcggggaatagtcgagatttttgagcgcttttctgagcgccgcgtccgtcgcgtaatcgagcgcggaagccgaatcgtccagaatgagaatctcgggccgccgcaccagcgcgcgggcaatcgtcaggcgctgtttctgtccgcccgaaaaattgcggccgccctgctctacgggcgcatccagcccgcccttgtcctctatcactttatccgcctgcgccgctttcgccgcgagcatcaattcttcgtccgtcgcgtccgcctttccccaaagcagattctcccgaatcgttcccttaaagaggagcgccttttgcggcactaccccgattttgtcccgaagcgccttcgggtcgtaagcgcgcacgtcctttcccgcgaccttcacgctcccttccgtcacgtcgtaaaagtgcggcacgagattgacgagcgtcgtctttcccgaacccgtcccgccgatgacccccaccgtctctccgcgcttcaagcaaaaatcgatatcggtgagcgcgttttctccgcccccctgatagcgcatgctcacgtggtcgaattcgataaaagcggcagaattgaccgaatcggcagaattgaccgaatcggcagagttgaccgaatcggcagaatcggacgcgcgtgctccgctcctttccgcctgcttttccgattcaaaatccgagggcgggaaaagctgcaaggagctttccatgacgagcacgccctcgatacggctgccgcacgcggccgatttcgtaacggtaatgatgaggttggcgagcttgatgagctcgacgagaatctgagacatgagattgtaaagtgccagaacgttgccctgcgaaatgtgccccgaattgacgcggagcgcacccacatagatgagtacgacgatcgccacgttgatgagggcataagtaaggggattcatgagggcgctgatgccgcctacaaacttctgacttttcgtcagctccccgttgcggcgggaaaacagctgcttttcgtcctcctccttgcaaaacgcgcggaggactctggcgcccgtcagattttcgcgggtagagagcagaactttatccagcttcgcctgagattttttatagagcggcatgcacacgagcatgatcgcaaacacgacggcggcaaggacgggaatcgcgcccgcaaacacgagagccgaagtcgggtcgatgaaaaacgccatgatcatggctccgaatacgatgaagggcgaacgcaaaaagagacgcagaaccatattgattcccgcctgcaactgattgacgtcgttggtcattctcgtcagcatggccgaagtgcccagcttatccatatccgaataactcagggactgcaattttccgaacagcgcctttctcacctgagcggatacgcccgcggcggcctttgcggcaaaatactgcgccgtcaccgaacaggccaatccgaccagcccgaacgcgcaaagcacgaggcacatggaaacgatataggaacgatccgcgttcgggtatccgccgtccacgtatgcccccaagcccttatcgacgatcaaagagacgatgacgggcacgatcagttcaaacgacgcttccagaagtttgaacagcgggccgagaatgctctgtaccttatatggcttgaaatagggtagaatttttttcataatctttctttatccattgttttaccgcacgaaaggagctttacggtatcgattcattatagcatgcttaacgggaaaaatcaagaatttccgaccgaacaaaaagagcggagagaattttctcccgctcttttttgagcgcctatcctatacgcaggggcgtttaagccgcgtcaatcgacgaaatgcgaatataattccctatatgcccgaattttcagcagtctttccccgtcctccgtcgaagacaaatcctcgttgtcgcgattgattcgacgggcgttcaccagtttgttggtaaaaatcccgaacgcgacgaaacagccgacggcgagaacgccgaacaccgccgtgagaacgggaaacaacatatcgggacgggtgtttatccgaagcccgaaaacggccgtgcagacgacaaaaatgagaagggggattcccgtcccgattacttttttcagggcggacgaaatgcgcgccttcaaaatcgcgcgccgttttttctgcttgctctccacttccttcgccagcggaccttcttccgcttcgagctccgcgatccgcttttcaaacataccgcggtaattcgctttgagcttttccaccgctccgtcgccgaggtcgttttccagactgtcgtagcccgtctccgcatattcttccgcgagaatgtcgggctcggaaaaatcggaggtcctggcgcgccaatatccgacggcggcgtctgcggcttcctcgtccaacggcagagccttttcaaatttcagttccgcggctttgaaactgcccgacagaaggagctcttccccttcctcgcaaaggcgcttatattccgccctgcgggccgcttcctccgcttcctttttcttgcggagcgcaatcgcttcctcgggcgtcagattgacgagatcctcgtcatcctcctccaattcgggaaattcaaaggagacttcctcctcgggttccgcttccggatcttcgagactttccgtcagctcgccttccaatacggaatcctcttccgtctccggaggcgtttctttcgctccctccgaaagttcgtccgttacgtccacataaccgtcctttgtctttttcaggcggatacctctcgcgtattcgtcgtcgataattctttcttccatagcttgtctcccgtttattcctcgtctgaggataattcccgttcctcgtccgtcagcgcgaacggcgaacggaacgactttttcttttccttcggcacgaccgtctttaccgtatacgtgcgaaatttgcccctgtaacggctgcgcgcccaatcgcacagctccgccgtctcgaacaaagcgaaaactccgctgcccgatcccgtcatgcaggctccgagaggagaaaaactccgcgcctcttcaagcgccgtctccacatcctcgttcaaccttgcggcagcgggataaagcgcgttggataatcccctacccaagccttccgcgtcgcctttcaggaacgccccgagacaattttccgtggaaggggcaattttttccccttcgtcgaaagccttatagcacgccccagccgaaacgggcgtccgcgggcaaatcaaaaaaagattcaagggacgttcgggctcaggcagaggagtgagcttctcgccccgaccctgcatgcggcaatagccgccgttcagcatatatcgggtatcgctgccgagggaatccgcaatttcgcaaagcgctctttcgtcgtccgcgccgtaaagccgcgcaagtcccgaaagcacgcccgcggcatcggcggacgaaccgccgagtcccgcgcctatcgggatatttttatacacggttatatccgcgcccttggtggaaaagcggcgcacaaaggcttcgcctgcccgaaaagcattgttttgttcgggcggaatcccctcgctgtccatgccgtgcatggatacggaaatcaggttatctttacgctttttcacgcacacgaggtcgtaaagatttatgctcgctacgagggaatcgatgaggtgatatccgcccgccgtccccacgacgtccagcgtcaaattgacttttgcatacgattttacttttacggtattcatgcgcggtttccgaggacagcggcgaggaaatccccgccgccgaaatttctgtttctattgtaccatacttttccccaaatttcaagattttagaaggattttgcgaaattttttcccgttttccgattttttccggttttcagccgttttttatgcggaaattttacccgttaatgcacgcatttaccgctattttccgcaaaatccttcggccgcgcttccgcgcttcggcgttttatcccgctttctcaatcaattatccgccgtcttttggcgataaataaagattcgctccccctctttcacggggaatttcagttcgggattgctcttttccacctcctcgggcggacggcggagctgcttggagatttcccacaatccgtcgcccgcgcggggaatgaatatggatatcgcgctgtcgttttccttatacgcttccccttcttcgatttccgaaatatattccgccgtcgtctccttatacagcttcaacgtcaccttcaacgtagcttccgcctccgcttccccctcgcggcgctggcggacgctcaggccgcagacggtggcttccgcttcggcgatatagccttcctcgaatttgacgggaaacaggaagggcaaagagagctccgcgctgcggtgcacgccgtccggatcgcagagaatgacgtccgcaaaaaccgcgccttccgcttccccgccgttctcgccgcgcttgcacgaaatctccgcccgcggcagcaccgccgcctgcaacgccgaggaataatctatcggaaccgataaagacgcagaaccgctcacccgctcggtaaaacggagaatatccgcaacgtatctgcactttttcgcgtcttttttataagtaatctcacattcgggcgaaaatacgtcctcgcaggcgggaagctcgtcgcggatatacaattcgcaatccgcactcagaataaattccgcgtctatcttacacttccccttttcttcgtccgttcccgccgtgagcacggccgatttcacgtgcactttcgcggacgcgggaagtttcggcatcgattcgtcgcagggaatttccagacggaagggaatcaggcgctcgtacgagcacaaggacaggtcgctctttaacgcacagatattcagactgatttcccccgaaacggaaatctgccccgcttccgcaccgacatagctcacgcacacgttttcgctgtgcatcagaatgtcgcctatgtaatccgtctcaaattcgtcctccgtttccgattctcccgaaacacataccgtcttgacgatcgactgcggacattttttcgatacgagcccttctccgtccgaaagatactccgcctgcgacgtcccgtatacggaaatatcggccccgataattacggaaatatacagtcccgaaccctcccgacgataagacacgttatccgtgttcagttccgcccgcgcaaaacacgccggcgtcaccgactcggattccgcacggtgggagaactccgcgccgcgctcggcacggcagaccttgcgttcggcatcctcgtatacgatgttcaaaaagagcttgccgttatagcgaacctccccgtccgcacaagtacattcagtgggcaccgccttcgcgtaaatggcgagtataccggaaatttcactccccggcagacggcactcgacgatggactgactgcccgtgcggcagatttccgtcgtatagcgataagtttcgaaatgcggttttatagacattttgcttttaccccgtttgttttctgttgccttatcattttatgtgccgcaaatccgatttatgactttcccgagagaaaaatccccgcaagtttttcggctttttgtcgaaagagaaaaaagcatgcaaaaagtccgtcggaaaacccgacggacctgaacagatacctctttcggaatcatttttctttggccgacaagttttaacgatttctttccctgccgattgttttcttttgctcgttattatctttcgtcgattgaattcccatcgttctcttccgttaatcgctgcatttcttttccgccgtttttcgtcgcggttttctgaattactgtatctgtttgattttgacgctgccgcagagcacgtcggaataagagtacgccgtcttgcccaaaaaatcatcgtcgtcgggcttcaccgtaaacagtgcgggataaattcccgacagtacgcccgagtagctcaaaattttgtttctgcccagatttacacgcaccgccacgtgcttataggagcagtcctttaccatttgtttaatgtccgctatgtttttggtaggcttaatcatacgcttattatgcgctttcaaagccctttttataccaaaatctgccagctatttttttgcgagcacctttttcaagaactgtcccgtatagctcttttttactttcgcgacctcttcgggcgtgcccgtgcagacgaccgttccgccgcccgcacccccttcggggcctaaatcgacgatataatccgccgtcttgatgacgtcgagattatgctcgatgaccagcacggtattcccccccgaacggagcttcaacaaaattttgatcagtttatccacgtcgtaggtatgcagccccgtcgtcggctcgtcgagaatatagaaggtcttgcccgtcgaacgcttggaaagctcggtggcgagcttgacgcgctgcgcctcgccgcccgaaagagtagtcgcgctctgtccgagcttgacataccccagtcccacctcgttcagcgttttcagcttattgtaaatggagggaacggcttggaaaaactcgcaggcctcctccacggtcatttcgaggacgtcggaaatgctctttcctttatattttacctccaacgtctcgcggttatagcgctttccgccgcacacctcgcagggcacaaaaatgtcgggcaaaaagtgcatctctatcttgataatgccgtctccgaaacagtgctcgcaccgaccgcccgaaacgttgaacgaaaacctgcccgccttatatccccgctcctgcgcgtcgggagtcatggcgaataaatcgcggatcgcgttgaatacgcccgtatacgtggcggggttgctccgaggcgtccgcccgatgggggactggtctatcgcgatgaccttgtcgaaatattccacgccctctattttgtcgaaattgccgagcggctgacgcgcaccgttcaggcgattggctaaaacgggatagacgatttcgttgacaaagctggattttccgctgcccgaaacgcccgtcaccgccgtaatcaatccgacggggatacgaatatcgatatttttgagattgttctgcttgcagccgtataccgtcagccacctgtcgcccgtcggtgtcctgacctcgggcacctctatttttctccgccccgcgagatagtcgcccgtaatggagcgcggttccgccatgatgtccgcctgcgtgccgcacgccacgacctcgccgccgtgcacgcccgctttcgggccgatgtccacgatatagtcggcggcttctatcgtgtcctcgtcgtgctcgacgacaatcaacgtatttccgagatcgcgcagtcctttgagagaattgagcaacttttcgttatcccgttgatggagcccgatactcggctcgtcgaggatatacaacacgcctgtcagagcgctcccgatctgcgtcgccagccgaatccgctgggactctccgcccgacagcgtatttgccgtccgcgccagcgtgaggtagttgagccccacgttccgaagaaagccgatgcggtttttgatttccttgatgatggcgtcggcgatcctgtgttcggtttccgtcagaacgagattatccacaaaatcgtagagattgtccaccgacatttcgcacaaatcccaaatatttttcccgccgatatagacggacagcgcttcttttttcaggcgctttccgccgcaggcggcgcagggcgccgtacgcatgtatctttcgatgtcgtatttcaccccgtccgaggaagtctgcgaatagcggcgctgcaaattgacgacaaagccttcccacgacgttttatagctcccgctgaacgaacgggtatgatagttcaaatcgatcttttccccgccgttgccgtacatcagcatatcgtaaatccccgcgggcaggtctttgacgggtacgtccatggagaagccgtaatgcttggacagagcggtgagatacatctgcgtctgcgtggaagaatcgagattccagcccgaaacgcgaatcgcgccctcgcggagcgtcttggtcttatcggggcagatgaggtcggcgtccaccgtctggcggaagccgagcccgagacattcggggcatgcgccgtagggcgtattgaatgaaaacaaacgcggctctatctcctcgatggaaatgccgcaatcgggacaggcataattgacggaatacagctcctcttttcccgcgcccgtatcgtcgatgacgaccagcccgtccgcgaggcggagagccgtttccaagctgtcggtcagacgcttctggatccccggctttacgacgaggcggtcgataacgacggaaatatgatgctttatgttcttttccagcttgatgtcttcctgtaaatcgtagacgagtccgtctatcttcacgcggccgtagccgctctttttataggaagcgagctctttgacgtactcgccctttctgccgcgcacgacgggcgcgttgacgagaattttgctcccttcgggcatggccatgactctgtccgcgatttcgtccaccgtctgacggcggatttccctaccgcatttggggcagtgcggcactcccacgcgcgcgaacaagagacggaaataatcgtagatttccgtcaccgtgcccaccgtcgagcgcggattgtgcgaagtggtcttctggtctatggaaatcgcgggcgataagccttctatgctctccacgtccggcttttccatctgccccaaaaactgccgcgcatacgaggagagactctccacataccgccgctggccctccgcaaaaatcgtgtcgaacgccagcgtcgattttccgctgcccgaaagccccgtgaacaccgtcagggtattgcggggaatctttacgtcgatatttttgagattgttttcctttgcgccttttactacgatttcttcctgcatatccttatgctccgtctgtcgtattttcccttcattttcccgcgcgtcacgcttgtcctttgcgttccgcctttctgagcttggctttcagttccccgattttatcgcggatttctatcgcccgttcaaagtccagctgcgcgctcgccaccttcatgagcgctttcagcttttctatctcctcgggaatatccttcaatttgatgtcctcgccctccgccttcttcttggtgatattgagcgtggatttgacttccttgataatcgtcttcggaataatcccgtgcgccttattgtattcgttctgaatcctccgacggcgctcggtctccccgatcgcccgcttcatgctgtccgtgatcgtatcggcgtacatgataacccgcccttcgctgtttcgcgcggcgcggccgatggtctgtatgagcgccgtgtcgctccgcaagaagccttctttatccgcgtccaaaatcgccaccagcttcacctcaggaaggtccagcccttcgcgcagcaggttgattccgcaaaggacgtcgaattcgcccaatctcagcccgtttacgatgtcgattctttccagcgtatcgatatcgctgtgcatgtacttgacctttaccgaatgttctttgagatagtcggtaagctcctccgccattttcttcgtcagtgtcgtaatcaataccctgcccccgtcctttacgacggtatgaatttccgaaagcaggtcgtctatctgtcccttggtgggacggacggatatttcgggatcgagcagtcccgtaggacgaatgagctgctccaccttctgccccgcctgttccagctcatagggggcgggagtcgcggacacgcagatgagctgcggcacccgcgcgtcgaattcctcgaaagtcagagggcggttatcgtaggcggagtgcatgcggaaaccgtaatccacaaggtttttcttgcgcgaaaaatccccgtgatacatggcgcggatttgcggaatcgtcatgtggctttcgtcgataaagacgagaaaattccccgcggggaaatagtcgagaagcgtaaacgacggttcgcccggtttgcggccatcgaaatagcggctgtaattttcgatgccgctgcaatagccgatttcccgcatcatttcgagatcgtgttcggtgcgctgtttgagcctctgcgcttccagaatctttcccgcgtcctcgaaggcacgcacttcacccttcaaatcttcctctatcatggcgagagcgccgcgcagcttttccgtacccacggcgtattgactcgcggggaaaatcgccacatgcgccagctcgttgatcttatttcccgtcagagcctccacttcgtaaagtttgtcgatttcgtccccgaaaaattccacgcggatcgccacttccgaattggacgccgggaaaatttccacggcgtcgccgcggactcgaaaggtagagcgcttgaaatcgacgtcgtttctcgaatactgcaactcgatgagccgcctcaaaagtttgtcccgttccatttccataccggggcggagcgaaacggaaaggcggaaatattcctccggcgcgccgagtccgtaaatacaggacacggacgccaccacgagaacgtccctgcgctccatcaaggaacaggtcgccgaattcctcaatttatcgatttcgtcgttcaggctcaggtccttttcaatgtaagtatccgtggagggaatatagctctccggctgataatagtcgtaatacgagacaaaatattccactcggttttcgggaaaaaactcccgaaactcgttgcagagctgcgccgccaacgttttattatgcgcgatgaccagcgtcgggcggttgacgtttttgatgacgttcgccatcgtgaacgtcttgccgctccccgtcacgcccaccaatacctgcgtgcggattccgtccagcaccccttccgtcagtttctctatcgcctgcggttgatcgcccgtcggctgaaagggggaatgaagcttaaattccataactcttcctccgttgcaggcgacctcgcgcttctcatgccccttttcccgaagcggcgccctatcgccatactttacgaacattcgtttgtattatagcatattatgccgaaaaagtaaaccgattcgggcatataaatgcaatttcttcaaaagattcgtttcatgaggagaccgacgaggaaagcgaggatggcggaaagaatggtccaggagactttgaagaacaaatcgcgccgcatctgcaccgaggagcgcttgaacgcgaaaccgttggggtgcagcgtgatgacgtacattttttcgccctttcggtccgaagaaatcatttcaaaatagtcgtccaattcgagagccttcaaaattttttccagcttttcctcggtgcatttttcctttttcggcaacaatttcaagagatcggccggtgcgacgagacagcggccgtcttcccgacagagggaatataccgcctgcattacttcgctttcccttctattcagcataattcctccccctttgattccgcagtacagtcctttttacaatccgtccgttttctttgcccgtcaagcctttcggcgcactcctgccccgctcatcgcatgacgagatagatgacggcgaaaatcaaaacgccgagcaccgaacccgcgaaggatccgaaaaacgccgcagacatgaagtatttgagttgcaggacacattcgctgcgtttttccgcctcctgttcgcaatagccgcggccgaggggaagaggacagatacagtacatgcccccgcccgaatacttgacgtttatgtagccgttttccgacagataatcgagcatctgcgccagcgcttccgcggtgacgccccatttttcgggaaaagccgaaagaaaatcctcttcggaaaaaatcttgtacgttcccgaagagcaaaaatcgttgatggattgtaaaagcgcggaggtccttttgtccaacatatgcactcccatatgcagaaatatgtacctccgcgccgaaacgcctatgaaattttatcaaagccgcaaaaagcccgctatgtctatgctccgcgccgaagcgccgcgtctatatgagaagaataaagaaaatcaatccgagcaccgcaccgacatatcccaccaccatggcccagatgagctgcgcactggtctttttttcggagacgtacagccgctttgcgtccaccgaagcgacgatcgccacgggcaggcacatcagaaaaccgatgccgcagataaagtcgagcaaaagtcccacgaacgccagcgcaaaaagtaccttcctgcgctccgtaagacgcttttttttcgccgcctcgacctgttctctgcggcgggattcataatcttccgcagaaaattttccgtcggcggaatccgaatagggcgacgaaccgtaccaacggcagtcgtttccctgccactccgccccgatttttgtctcgttctcgtcccgagacgcggaaaaatcctgtcccgacaaagtttcgtcgggagctttttcccgcattccgcttgccgccccttccgttttcgcttccgtcttatcctcggagtcttcggaaaaatgcgcgccgcagcgaatacagaatttcgcgttatcgtcggcctcatagccgcattttcggcaaatcttactcatgctttgattgtactattatttgcgaaaaaagtcaatttaattcgtttgcggaatgtgcgggttttgtaaatcctttgtgaaaaattttccccttaaagcccgaatctttcatacagctccaaaagccctttgtaataggtccgccagcccaaagtctcacggtaagagaccgttttggtctttccctccgatttgagcttttccagcttttccgtcagccgcgcgacctcgtcttttacccactcgtgcattttttcgtaagccgcaaacttttcttcttccgtcaaattctttcctcccctaagtttttctttattataccgtatttcttccctttcgtcaaacgtttgccgagaatgcggtcccgactctttaccgcctttttatagagaacctttctgataaaatcgacgggaatgacggtcgcggcgagcgccagcgtcaacgcgagctctttgggcgcgagcccgcagcagcggaagagcgtgccgccgaaatagacgagcagaagctgtacggcgatgacgatgagaataaagacgacgaaagtcttattgtttttcaaatgcgaaagcagattgattctctccgtcctcgcattgaaggcattgaacacgcccgaaaagacgaacagcgcaaaaaacgccgtatagaagggcagtttattttcctcgtaacggaaaaattcccgaaagaaaggcgctttcagaaaaacgagacagagccccacggtatagacgcccgtaaaaacgatctgtcggatcatgtggcggcttaaaacgggctcgtttcgcctggtgggacgttcctccatatattccttcaaaggaggctctcccgcgaacgccaatcccgccagcgtatccatgataatgtttatccaaagcatctgaatgaccgtgacgggagtatctacgccgataaacggagcgatgagcgacacgccgacggcacataagttcatggtcagctgaaagacgacaaattttcggatactcttgaaaatcgttctgccgtagcgaatcgcctttgcgatcgaggcaaaattgttatcgaggataacgatgtcgcccgcctccttggcaacttccgtgcccgttcccatagcgaagccgacatccgcctttttgagcgcgggcgcatcgttgattccgtcccccgtcatgcccgtaaccagccccctggactgcgccaagcggacgagacggctcttatccgtcggcagcgcccgcgccaccacgcgaagccgcggcaacagcttcaaaacctcttcgtccgtcatcgccgccagttctttccccgtaatcaccagcggggagttatccctatccgccgcaaaattcaagcgattcttttctacgcgatcctcgacggaattttccgcatagtctttcatgcgcgtttccgcagaatttcccgtacggtttttctctccgtctttcctgttgaatccgttccgtcccctgtgcgcgaaatgcgaaaatcccttattttttgccgtgggcgcgagatctcgcaacggttgtaaaagtcccgcttcttccgcgactgcctttgccgtttcgatattgtcgcccgtaatcatgacgacctgaattcccgctctccgcacctcctctatcgccgcggggacctccgcgcgaatatcgtcgcggattccgacgagcgcgacaaaggtaagcccgtgcagatccttttcccccgtcacgtccgaacgagtgaccgccactgccagcacgcgcatcgccctgcaagtcatggcgcgttgttttcgactcatttcctcggcgtcgaagggacaaagcatgccgttcggagacacgtaattttgacaaaacggcagaattttttcgggcgcgcccttgacgaaggtgcatttcgccccgaatatcggcatgcttccgccgttttccgcgcgcacgcaagccgcagaaaatttatgggcactgtcgaaagggaaggcgctgactttaagataattctccgcgcggaaggagagcggcaagacgcccttgagcagcgcgcggtcggtggcgtttccgcccaaagccttattcgccgacacgacgctgcccgaattgaacactccgttcagccttaaaagctccgcgacaatctttccgcaggaatcgacgccgtcaaagacctgcccgctcccgtctatgtattttaccgcttccaattcgcctttcgtgagcgtgcccgtcttatcggtaaagaggatattcacccctcccgacgcctctatgccgacgggctttctgaccatgactttatccttcaacatcctcagcatattcgaggagagaacgacggctatcatcataggcagcccttccggcacggcgaccaccacgatggcgattgccagcgtgagggcgtgcatgagtcggggaacacagactttccaattccgcatatccgcaaaggcgagcgagaaattcattccgttatcgatgaaaaagctgttgaagagatccgccacggcaatgagaacggccgcgatatatcccagacggctgagcgtcttggcaagtcccgccagcttgacgcgaagcggactttcgggcggttcgtcctgcatctcccgcgccagccctccgtaaaaggtcttatctcccacgcgctccacgcgcatgacgccttcccccgcggagacgatactgccgcgaaaaagctgatttttgtgcatcagatcccaatccccgccggcggacagcggcaatttttccgcctccgcgctttcgccgttgagcgcggattggtccacgctgagctttcccgataaaagcacgccgtccgcgggaattttttcgcccgcttcgagaagaacgatgtctccgacgacgagctccccgacgggcagagaacggactccgcccgcacgccgcacgcggcattcgatgttcgccgaagcgcgctgcaattcgataaaggccgattcgctgccgtattgggacagagtggaaacaaaggtggcgagaaataccgccacggcgattcccgcggactccatccaatcggaatttcggaaaaggaaaatgacgttgattgccaacgcgaccagtaaaatcttgataatgggatcgccgaaactgctcagatattgacgaaaaaaaccctttctctttcgcttcgtaagggtgttggcaccgtggagccggcgggaggcaagcacctgttcgtccgtcagccccgcgacgctgccgcggggcaaaatctgttctttcatgaaaccgctccttccaaggcttattcgtttattaatatgcctatccgttcggttttatgagcgtttgtcccccttactttccgttcggtctttatctgcgccgcttccccgcgttcccgttttttgccattgccttaattattgttttcgctcggttttttccgcttttcgcctcttttgacgattccgacgataaacagcgccaaaccgcataaaaaggcggagagccaagtcacaaaaatgatgtttccgttgagatattcatcctcccaacaggcgaggttgatcctgaacgcatacggctgatgataaatcagggaaatcagagcgtcggcaaataagaagaacgttccccacaggacgcataaaaacgccgccttcgtccaaccgttcgtcctcacgtaagaaagaatggccgcagtcgcaaatacgggcacgaaacacagcgcggaaatttccacaccccgcaaaaatccgccccaccgtccgaactcacaggctaaaatcaacgcgatcagcagcacaaaatccgcacccacgctgatcatgggattattccgcttcaccgctttcggaacgggatacaaagcgagaaaaatcggcagaaaaattaccgaaaacgcgaacaaaaccgcagtcagagcaataaagaaccaatccccgtgcgtatagatacaacagcttaaaagcaagagaagcaaagagaccataaaactcccgctcacggcgagaagttttccgcggcggacgaacttcgcgcaggaagggaacagcgaaaaggccgtcatcagggcggtgagtacgataaagaaccaggacagggttttgtttattgcgagattgcagataaagcagatcaccagggcgagaagatatgctcccgtcagcccgaaaaaccaaccgtcggaaatttttctgtacttttccgcttccgctttcatgcggcggtattcggcgtcgttgccctccgctatcagttcccgctcgcttacgtccaaaatttcgcataaatcggaaatcaaagtaatgtcgggataggtgactcccctttcccatttcgagacggcggtaaccgtcacatacagcgccttggcgacatccgcctgcgtgaggccgcgctcctttcttttttcggcgataaatcgtccgaatgattttttgtctttcatctgaaaatcctcccgtaaaatttttttacggctttattgtacggcgggaatataaaaaagtcaacgttaacgcccttttttcgccaaaaaggcgtgtagccgcgtaagccacacgcctttttcaagaaattttttcttttcacgccccgaaccgagttccgatcgggcgtacgcggcaaaatcttcctttacggtttcataaattttcaaagtatttcaaagcgcccgtcataatcgattttgccgtagaagccaattcgtcgggggtctttttcatgcccgcatgaatccaacgcgacattaatcccacgcaaccgttgctgacgaaagaataaaaatcctcgatttgttctttcgtcgctttcggaaaatatttcgtatatgcggcgacgcagttctcctttcccgtctccaacattctgtataaaaaactcttgtccccgttttcccccagcataatcacgcacatatccgaattttccatgagacttctgaaaatccccttgaagagctccatattcatgggatcgttttcggaaacgacgtttttgagattttcggcaagctcgccgagcatttcgttttcgatttgttccaaaaggtcgtatacgtcctgataatgattgtaaaacgtactgcgattgatgcccgtacgttcgcaaatctcccgtacggtaatttcctgaatgggtttctttttgagcagttcggtaaattcctttcgaatgagcattttcgtcacccgtacccgataatctttttccataattatacgttcggcctcctatcataaaatgaatttgaaaagcacacgtcgccgagtccccgcgcggggctcttcttgtccgacaatttttgaaaaaacgtcgaataacctgccaaaacaaccgttttacgggaaaaactccgcagcgacgttaaaattgactgtttactttttcttctaactatattataataaatttgaacctaaaaatcaatacgctttgcaaaaaagaggtgatatttatgaaaaagttatacgtagtaacgggagcaaacggacacctcggaaataccatcgtgcgattattgtcggaacgcggcgaaaaagtccgcggactcatccttccgaccgaagtccccgaatttaccgaaaacgtcgaatacatcaagggcgacgt

SEQ ID NO: 2361 - DNA, 32759 bp, Unknown
  16S sequences of unknown bacteria
ccacaaccatccccctttgtcaacactttttttatctttttttgaaagtttttttaaaaacgacaaattccactatatattgtgtttctgcgaccggacagtaaatattttcggggtatttatttcattattccgcgcagctttgcgagaatttttttctcggcgcgcgaaacctgcacctgcgtcatcgacattatttcggcggttttgctttgggtaagcgaattataatacctgtaaattacaagctgtttttcctcgtcgcttagtttttcaagtgcggaatctattaaaagtctgtccgaaatttcatcctcggcgcttattacgggcagctcggtttcggaaattccgtcgtcatcctcataggttaatgagaccgtcggttgggaagcgcatatcgcctcggtcacttcttcgggtgctacgccgagcgccgacgccagttcactcacggtgggctcgcggcataatttttgctccagcatttgcctttcgcgcgatattttcattccgagttcttttacacttcttgaaaccttgaccgcgccgccgtcgcgaaatagtcttcgcatttcacccataattaccggcacggcgtaggttgaaaagcaaagcccgcgttcggtatcaaatgcgtcggtcgcctttatcagtcctatgcagcccgcctgatacagatcgtcgtactcaatgcctcgccccgcaaagcgcgcgcagagcgaacgcaccaatcctaaattattctctataaacaggtcgcggtcgtttatttctttaagcatttatgccgtagcgcctgctgattttttttagcattacaatagttgtgcctttgccgacctttgagcgaacctttaccgagtccataaaactctgcataacggcgaagcccagccccgcgcgctcgccgcctacggtagtgtaaagcggctccattgctttttccacattttctatgccgcagccggtatcacgaattttaattcttattatgttcccctcaagcagctcgcccgttatgtaaatttttccgattttttccctgtacgcgtgaacaatgcagtttgtaacagcctcactcacggcggttttaatatcgtttatttcttcaagcgtggggtcaagctgggcggcaaatgctgatatgcacgccctcgcaaagctctcatttgccgattttgccgacacgttcatcataaatttgttgtttacagtcattgatattacctgctttccagtctcgccagacgttcaagtccggctaatttcatcaccttatatatttgcgggggagtttcgcttataacaagctccgctcctgttttcgcgagaagtctgtatcttcccataacaagccctatgcccgagctgtccataaagctgatatttttaaaattcagcaccagccttgacggcatattaagctccaccgcgttatctatcgcctcgcgcattgcccgcgcggtgtggtggtctagctcgccggacagatacgcggttaccgtttcgccgtgtgctcttatttcaaccgacataaattcaccccccgaaaacaaaataaaaaagacaagccttacatatataataaaggcttgtccttaaaaaaattgtcgtaaagagtaatcaattataaaaattttttaatttttctctgattccgcttgcgagataaagcgagccgaaaacaaaaaccgggtcgccgcccgccgatgatcgggatttttctattgccgcgccgtaattttccgccgtgatacacgggcaatacttacttgccgcggcggctaatttttcgcccgctaatgagcgcggcatattttccaccgtcaccgccacagccgcgcggcaatacggcaaagtctttttcaagactgtttcgtaatccttatcccgcatcacgccgataatcgccgttatccgcccgccgtattttttcataatttcagccagcgcatcggcgccgtcgggattatgcgcaccgtcaagcacggtaagcggatttcggctgataatttcagcccgcgcggggaaaaaggttgcgccgagcgcttttttcaccgtttcatacggaatattaaacccgcttgcagaaaccgcctctattgccgtaagcgaattttcaatctgatattccccgcaaagcgacagcgaatattccttttccttatatatatatgtagtgccgctgccgtcgcactttaatactttaaggcgggaaacatcgggcacgacataattttcggtatatttttttataacactcattaccgcgcttttctgattcgccgaaacgaccgtggggaaattctttattataccgcacttttccgccgctattttttgggccgtatcacccagaattgccgaatggtcaagccccactttagtaattaccgccgcgcgcaccctttcaagagtgttggtggcgtccagtctgccgccgagacccgtttcggctattacaatatcgcacttttcatccgcgaaatatgaaaatgccgccgcggttataaattcaaattcggaaaggacaattccggtgtttttcaccctttgcgaatatttaattaaatcttcctcggatataaaattaccgtttatttgtatacgctcgcggaaatctattatataaggagaaatataaagccccgttttaaagcccgccgtttcaaaaattttcgcaagcattgcagaaaccgagcctttgccgtttgttccggcaatatgcagggattcaaatttattttgcgggcacgacagcgccgacaaagcggcggtaattctttggagccctgcgggcaatttaaaatttccgagagagtgtatgtaatttaatgtttcggtgtaattcatttttatctttccaatatttataatgtattaccttttgttttccgcataccataataacggacagcgacggaaaacatacaaaacagcgcctgatataaaaaagcgctcggtgctgatgcaaatgtgagtaagctgttgtcctcggtttcgggcaacggcttaccgtactgcacggaccgattttgacgaatggggctgccgcaaaaacggcggcttcattacatatataataacaccgattgcccgcatatacaagaaaaaccgacgcaaataaacgtcggttttaaaattatattatccagcttccgttatcgccgccgggcagtaaatcggcaactgtgtaggaatcaaaaaaattattaagcgttttgtaaagctcgcgccacattgaaatagtacggcagcgttctgccatttcacatggcggcgcgtcctctttaaggcaggcaaccggcgctaaatcgccctcggtaacctccaaaatttcacgcacactgtattcttcgggggcgtggcaaaggcggtagccgccgcccttaccgtgtgcaccctcaaccagtccgttctttgaaaggcttgtcattatggcctcaaggtatttctgcgatatattctgccgctcggcaatagctctcaacggaataaaatcacccgaggcgtgctctgccagatctaccattacccgcagcgcatatctgccctttgttgatactgtcatggcttattccgcaaaaagcggggtggaaagatatctgtccccggtatcgggcagaagcactactatggtctttccctcgttttcggggcgttttgccagctctattgctgcgtgcactgccgcacccgaggaaataccgacaagcacgccctcgtttttacctatttctctgccggcaaaaaatgcgtcttcattttcaacgggaataatttcatcgtaaaccgcggtatcaagcacatccggcacaaagcctgcgcctataccctgtattttatgtgcacccgagggcttacccgaaagcaccgcggagcttgccggctcaaccgcaactacctttacctccggctttttggatttaagatactgcccaacgcccgtaaccgtgccgccggtgcctacgcccgccacaaatatatcaacctcgccgtcggtatcactgtaaatttcgggacccgtggtttcaaaatgcgccttggggtttgccgggtttacaaactgcccgggaataaagctgcccggtatttcgcggcttaactcctccgcctttgcaatggcgcctttcatacctttagagccgtcggtcagcacaagctcggcaccgtaggctttcataagctggcggcgctcaaccgacatagtttccggcattacaattataattctgtacccacgagcggcagcaaccgcagcaagacctatgcctgtattacccgaggtcggctcgattataaccgaatcggctttcagcttcccgctcttttcggcttcatcaatcatagcctttgcaattctgtccttaaccgagcccgccggattaaagtattcaagctttgcgagtattttggcttttaagccgcatttcttttcaatatgcgtaagctcaagtaacggtgtttttcctataagctgatcagccgatgtatatatttttgacatagtaatttctccctttaattataataagttatcgtttcggtttttactgttttaaatttttcaacatcggctgcggctgcacattcgcctatacagcatttccaaagatttcatatcgttttacctaccaatctgatatgttggtagtattatagcacctattccctactttgtcaataggtaaaaggaatttttccaaaaatattttacgcgttttcaaacatatccgcaagcctttttaccgctgcgtgcaagtccttcataccgttcagtatattatcggcattgaattttcttaaataattatccgcttcaagcgtaaaccagcccttataatctatatcctttaaagcctttataattggctcataatcaatcgacattgaaaagggtatttggtgggagtcgtgccatttatcgttatcgtgaatatgcagcgcctgcaagcggtgccccaaagcgcgcaccatatttgccgctcccgagcccgagccgcgcatttcggcgtgccctatatcaaggcaggcaaccagaaaatcatccttcaccgcatcaatatgctccacaaagctttccgaggtggcacaggcggcaaatgccgattcatccttttcgttgtcccagttccacatattttcggttgctattttaacattatgctccttcgcaaagggcagcagttcaaaatacatttcggcattttcggcagctgatttattattatccgggtgaataacgcatatttccccgcccgcctcggcggtacattctattgcgcgcttaaaataagagcgtatttcggggctggaggacggaaacggcgcgtgtgactgattgcagactattccgttatcaagaccgatttttttaagccttcttgcaaacgcaaggtagttattccccgccagcgggtgattgttttcaagtaaagtgcccgtcttccaatcatatttacacattgcaaacaaagaaaaatcccatgcgtcaaagcccgcctttgccacatattccaccgctttttcttcgccgacaatgattgaagctatctctatttgagttgatgttttcataaagcgaccccttttattctgttttttctgaggtcattatactctgtattttccacaatgtcaattattaaaatttacttcatttaactattgtacccgcgcgaaaaataatgtataatatagtatattgtataattatttaggaagtgcgcgtttttgaacgaaatcgtttatcttgataacagctcaaccaccaagccctgcaaacgggcgattgacaatataaataccgccctttgtgataattggggcaatccgtcctccctgcacacattgggtattgaggcggaaaccgccgtaagcgcagcgcgggagtgcgttgcccgttctgtcggcgcgcggagtgacgaaataatatttaccggcagcggaacggaagcgaataacaccgccctgctctcctgccttaaagcggcaaagcgcggtggcaggattattaccacggcaattgagcacccttcggttttggagacctgcaagcgccttaccgccgcagggcttgaagtgatttatttaaaacccgcgaatgacggcaaggtattgcccgatgacctgaaaaacgcgcttaccgacaatacgctgcttgtaagtatgatgcttgtaaacaatgagacaggggctgttcagcctatagcagaggctgccgcgcttacaaaacgaataagccctaaggcgctttttcattgcgacgcagttcaggcatacggcaagctgcccataaacgtaaagcaattgggcgtagacctgctgaccgccagcggtcataaaatccacggacccaagggcattggttttcttttcagaaaaaagggcgtaaatattccgccatttataacaggcggcgggcaggaaagcggtatgcgctcgggaacagagcccgttccgcttataatggggcttaaaggcgcggttgaagacttaccgaacttaaatatgcagcttgaaaagcaaaaggtgctgtggagctatgccaaagatacgctgaaaagccgctgcggggcggaaataaactcccccgacgatgcgttgccttacatacttaatatatctctgccgggctatcgctccgaaactcttttgcattttttagaggcaagaaatatttttgtttcaagcggcagcgcctgcgcaaagggtcacggcagctatgttttaaaggaaatggggcttaaacccgccttgaccgacagcgcgcttagaataagcttttgcaaaaataacaccgaaaacgatattgacctgttggcggacgccttgtgtgacgccgaaaaggttttaagaaaggcgaatatatgaaagaaataatacttattaaaaacggcgagctggcgcttaaggggcttaaccgccgcaattttgaagacgcacttataaaaaacattaaaaggcggcttaaaagcctcggcgaaaccgaggtgcgcagctcgcagtctactatatatatagagccgaaatcggaaaactatgattttgaggaggctctctgccgcgtcaagaagatattcggcattgccgggttcagccgcgcctgcgtttgcgagaaaacaactgaggatatatttacgcgcgcacccgaatatttaaagccgataatggaaggcattaaaacctttaaggttgaggcaaggcgggctgataaaacatttccgctcacctcccccgaaatttgcagggaattgggcggcgtgctgcttgataatttcccgcatttaacggttgacgtgcataaccccgacagaacggtttacgttgaggtgcgcgattacgcggcgtatataagatgcgagcagataaagggcgcgggcggcttgcccgtaggcacggcaggcaaagcgtcaattcttatttccggtggaattgacagccccgtagctgcctggactatggcaaagcgcggcttacgccttgacgccatacactttgcaagcccgccctacacaagcccgcgcgccgagcttaaggtgcgcactctgcttaaaaaggttgcggcgtattcgggagcaataaatttagcaatagtaccgtttaccgaaatacaggatgaaataggtaaaaattgccccgaggattatttcacacttataatgcggcgaatgatgatgcgcatttccgaaaagctggcgcgaaattcgggcagtcttgcacttataacgggggaaagcctcggtcaggttgcaagccagaccctgcccgcgctcgtcacaaccgacagcgttacaaatatgcctgttctccgcccgcttataggtatggataaggaagaaattataaaaatatcccgcgatattgacgcatttgaaacctccatcttgccttatgaggattgctgcacggtatttacacctaagcacccgaaaacaagacctgccctttcagcctgcgaagaagcggaaaagaatttagcggtagacgagcttatagaaaaagccgtaaacggcactgaattttcggtgattgagtaatgaacgctgaaatttacaacacggcagagcagctggttgggctgcttaaagagaaaaagctgcttatagccacagccgaatcctgcacgggcggacttgtttcgtcctatataaccgccgttcccgggtcatcagcggtttttgagttaggcgtagcgtcatattcctgccgaatcaaaaacgagattttaggcgtaaaaaaggaaacgcttgatacattgggtgcggtaagctatgacacggctcggcaaatggcggaatgtatacgcgaaaaagccgcggcagacataggcgtttcggtaacgggggtcgccggacccgacggctcagaggggcatatgcccgggctggttttcatagcggcggcttataaaggcggggtcacggtgaaagagcttaatataagccctataagccgcgaatatgtgagagagcaggcggcagaacagcttttaaagctggcatttaatacagtcagggaagtattttaatgaaacacacacacgcaaaagaaagaaaaacggtaaaggattttttccgtaggctttacttatcctacataccgaacgggaaggacaacataaagcagataataattaaggtgtttttccttatatcgcttataacccttatcgtttccgcctcataccttgcgaattactttttatcggcaaaaaagcaggataatataatcaaaagcagccgcaatatatggcacggcgcgtcaataagcacgggctccgccgagcggctttcggtcaacgattatatgctgaaagaaaacagcgatttcaaggggtggataaccgtaccgaatactcgggtggataaccctatttatcaagcggcggataacagcttttatcttacccacaaccaaaaaaagcaaaaaagcgcatacggcgcgctgtttttcgattgcgataataaaataacaaaagatgaaaccgataaaaaccttgttatttacggtcaccatatgaaaaacggcagtatgtttgccgaccttacaaaataccgctcattaagcttttaccgacaaaacccgacaatcgagttttccacgctctacaaaaaaagcatatataaggtctacgcggtatttgtactcaatgcttctaaagcggacgataacggttatatctacaatatttcgcgccgtaactttataaacgatgaggattttgaaagctggtcgggcgaggcatatgagcgcagccttataaacacgggtgttgacgttacaaaagaagataacattataacccttgtaacctgtgtttacgattttgacgatgcgcgccttgtagttatggcgcgcgagacccgcgagggcgaggatgagacggttgacacctcgctttccaaagccaatccgtcgccgaggtacccgaaacgctggtatgacgaccgcggagcagcataccccttcaactgatatactaaagtcattatcacggcgccgccgccgcgataacaggctataaaaaaattcggcggcagaatggggaataatatgtttcagaacataaaggttgacattatctattacaaaacagctaccgattttgaaatggaatttaatctttgcggctgttgccgtatgcgcctgcttaccgataaagcacccgacagaaaatcaatggtgcataatctcgcgcgcgccgtttcaaggagcagggttataataattgtcggcagtcttttcggggatgagggggttttaagcaccgttgcgggtgcaatcggcaagccgctctcccccatagataataagctttacggcatttcagaaggcggagaaatttcggtaataaacggggcaacgccgcttgtaaccccggacggatacttcggcggctgcattattgaaagcggaccgcaatctatgatacttttgtctgacagcaagagtgtgcgcaaaacaattatgagcacgcttattcacccgtatattgaggagctttgcgcaaccgagcttaaagccaaggcggaaaacaccgtgcaaaagccgcagccggcagagcctgccgcgccgcccgtgccggaaattcccgcagtgccgcccacaccggcggagcctgatattttgcccgccgcagaggaaattaccgacctgttttcgtcctctgaaagcgcgggagaaaccgaacccgaggaggcagagcctgaaagtgtgcagcccgaggatataattatacccgatgatgaggacgaggaggatgttaccgttgaacaggcgcagccgatacccgagcctgtcgctccggcagcaccgcagccgcctaccgaagcagaggaaaagccgctgagctcgttcaccaccgccgaaaaggacggcgtattgcttgacggcggaatgatatttgaaaccgacgactaccgctcagccggaaatgacgcatatattaccgatgatgaggaatcggatttttatattgctcccgaaaagctgcgccgcagccacacccgccgcaataatgagctttacgcccccgatgcggatgaaaaccgatattatcatattgatgatgaacagcccgagctgccgcgctcatttttcaaggaaaaccttgctttaattattgtgctcgccgctctgcttataataactgccgtgctttgctattgcatttttgttgttccggcaaaatccggcgttgcctcaggcgaatatcttcgcaatatttttgatacgctgctcgggcggcaataaataattaactgctaaaaacgggatttgccctttcggacaaatcccgtttttgaaccgcaattttgcagttcgtttatgcagaaatcagtttgtagcctttgcaaccgattcttctctgaacagcagggatatgcaccatatgcccgcaagagctataacggtgtatattatacggctgattatggcggttgctccgccgaaagcccaagctaccaggtcaaactcaaaaagtccgacaagtccccagttcaaagcaccgattattacaaggataaggcagattttatcaaacataatatcactccttctgcaataatagtttttaccgcagaaaaagttttattcacaaaagggttgtttgttttaaaaaatcattgaaataataattttttccttaaagcggcaaggtcagcggaatttattcttccatcccccgaaacgtcaaggcactctgatgaaacaatattgttagatggattgacgaagaattttttaagacttattaaatcacgtatatcaattacgccatcaccgtttatgtcacccgctttttcgggcgttctgacaatcagcgccgcacttgctgcaccggcaaagcaggtagaagtttcggcttctctttgatacataaaatatttggtggcaggtaaaagtccgacaaatattggggatgcttgccaattaaagccgtcaatgctgtactcatacccctgcacggattttaggctgattgagttataggttttcaaggcgatttctggcgcttcgggaatatttatatttttgtttttaatataaacgctttctatgcaggtttccttacttttaacatgcttttccgtctcggcaattctttgataaaaattatgataactgtcgtaatcgaaaatttcaaaaacattgcttgtttgccactcgccgtcgtcgcatttgtactcgtagccctcgttatttttaagccttacttcaaccgatttattatcattattgcgtatatcttcaacaatcggcgataaaacgggtgaagttagctctgtaagataatagtttttattattcttaattgcaaatttatgtgccgccgagttttcaacggtaaatattttaagctccgggtcggtatctttaaaagcgtactcctctattttagtaacgctttgcggtattgttatatttttaagcgccgagcagcggtaaaaggcgtagttacctatgtcggtaaggctgtcgggtattgatacgcctgcaagatttttacaaccgtaaaaagcataattgcctatgcttgtaacgccgtcgactaagtatatgttttcaagctcggtgcaacccgaaaatgcaagctcgcttatataaaccgtgttttcgtcaagagtgatatttttaattttattgtattttttgaagactgttttaaaactatttatcaaactttgggatatagtaatatcggttatattgtcgcaaccgtcgaaagctctgctatcaatacttgcaatactgtcaagtatcgttacgcttgaaagccccgtgcaaccgctaaaagcatagtctcctatacttgtaacgctgtcgggtatggttatacttgtaagccccgtgcaaccgctaaaagcactgctacctatcatcgtaacgccgtcaggtattgttacgcttgtcaaccctgtacaattgctaaaaacatagtatcctatacttataatgttgccgggcattgttatgcttgtcagtcctgtgcagccgtaaaaagcataactatctatactagtaacgctgtcaggtattgttatatttgtaagccctgtacagctaaaagcataatcccctattttagtaacgctatcaggtattgttacacttgtaagcccttcgcatttgtaaaaagcagtgctacctatacatgtaacgccgtcttcaataataacttttgttatttgatatccccaaggtgtctcataataattacaattccccattttcccgtttccacttatagtaagcaccgtcccgtcaagcgtccaggtgcaatcgccggttgttccgcttgttgccgtttcggcgcttgcggttatgctgaacaatctcattggcgcaacggataaaataagcataagagacagtactaaggataaaaactttttaaatttcatttttactcaaactccttataatttttaatcgtgtaaaacattttttaaccacttatgtcaaaaagtataccttttgaactcctgtttctctctcttatataatctttaatttgcgcctgtggcggtaaaatgctgtttcgctcatcctacacaggcgctcttaatgcgtaaagctatattttatattttccctgttgagccgaatccgcccgctccgcgcaccgtatcggaaagctcgtctgtttcagtaaattcagcccttaaaaacggggttataacaagctgcgctattctttcgccgtcagcaatttcctgggtctgccctgagtgattatggagcgataccataatttcgccgcggtagtcgctgtcgataacgcccaccttatttgcgggcgccaagccgcgctttgtggctatgccgctgcgggcatatataagacccgcgtagccctcgggaatttcaaccgcaaagcccgtgtgaatcattaccgtttcacccggcgcaatgcttacggtctcgccgtgggtcagtgcgtaaatatccgctcccgcggctgatagcgagccataggtgggggcatgcgcgtttttatcgagttttttaaaatttactttcatttttatcattccttgtatttttatttattcgtaaatattcccgctgccgaccgctctttcccaaacgccgtcaagccaaacaatttcgccttttttaagtgttttttgaacgtctattatgcgctgattagcagaaccgcggaatataagcgccgggcttttcttttcttctataaatctgccgtccaccaaaacgtctatatatttaagcattttgagcgatgcagggtcgcttaatttttcaaattcaaagcccgtataacaccatatggttttttcagggaatttttcttttacctttttcaaaaatccggcaagcaccgatttgttttccggctcaaacggctcgccgcccaaaagcgacagcccggttatatagtcggctgaaagtgcggtcagtatttcctgctcggtactctctgtaaagggtttgccgtaggcaaaatcccacgcctctttattaaagcagtttttgcacctgtggcggcagccgctcacaaaaagagaaacgcggacgcccggaccgtttgcaatatcaaattttttaagcgccgcgtaattcattataaaacctctgtgacagtattaagggacggtgcaaagcaccgcccttttttaatttgaattgaaaattaaagatgtaaaactctttccttaatttcctgtgttctgccctgattccagaactgtgtgccgatatatccgcaggttctgcgggcaacgttcattttgtcctggtcggtattgccgcaattcgggcatttccaaaccagcttgccgtcgtcgttttcgcttatttcaatctcgccgtcatacccgcaaacctggcaatagtcgctctttgtgttaagctcggcgtacattatattatcataaataaacttcataaccgcgataaccgcgtcgatattgttctgcatatccggcacctctacataagagatagcgccgccgggggaaagcgcctggaactttgcctcaagcgccagcttatcaaacgcgtcaatattctcggtaacgtgaacgtggtagctgtttgttatatagtttttatcggtaacgccctttattatgccgaaacgcttttgcagacattttgcaaacttataggtagtgctctcaagcggtgtgccgtaaagcgaatagtcaatattttcatcggctttccactttgctgtgtactcgttgagcttattcattacttcaagaccgaactgctcgccctcgggctcggtaagctttttacctatcatactgtaaacacattcccacagccccgcataaccgagagacagcgtggaatagccgccgtgtaggtatttgtcaatagtctcgccctttttaaggcgcaaaagcgcgccgtattgccaaaggataggcgccgcatccgatacggtgccggtaagtctttcatggcgcgcctgcaatgctctgtggcataattgcatacgctcgtcaaatatcttccagaatttatccatatcgccctgagccgaaagacctatatcaaccaaatttacagtgacaacgccctggttgaaacgcccgtaatacttaggcttgccgttttcatccacataaggggttaaaaagctgcggcagcccatgcaggtgtagcagtgaccctcgccgtttttatcaatcttgtttttaagcataaccttttcggaaatgtagtcgggcaccatacgctttgcggtgcactttgccgaaagctttgttaagtaccagtactcgccgtcctcggttatgttgtcatcctcaagcacataaataagcttggggaaagccggcgttatccacacgcctttttcgtttttaacgccctgatagcgctgctttaaaacttcctctataataagcgccaagtcgcgcttttcctgctcgtttttagcctcgttcaggtacataaataccgtaacaaacggcgcctgaccgttggtggtcataagcgtaaccacttgatactgtatcatctgtacgcccttgcttacctcgttaagcaggcgcttttcggtaatttcgcgcgccttttcgggggtgatattcgttcccgcctcgcggaattcctctaaaacctcggaatatatttttttgcggcttatatcaacaaagggtgctaggtgtgcaaggcttatgctctgcccgccgtactgacaggaagccacctgcgctataatctgcgtcgcaatattgcaggcggtggaaaagctgtgcggcttttcaattaaggtgccgcttataacagtgccgttttgcagcatatcctcaaggtttacaaggtcgcagttgtgcatatgctgggcaaaatagtccgcgtcgtgaaaatggattattccctgctcgtgcgcctctactatatcgttatcaagcaaaagccttttggtaatatccttgctcacttctcccgccatatagtcgcgctgaacgctgtttacggtcgggttcttattggaattttcctgctttacttcctcattgttacattcaataaggcttaaaatctgctcgtcggtagtattcgcctttcttacaagcgcgcgctgataacggtaggttatgtatctgcgtgcaacatcaaaggcgcgctggttcataatctgatcctctaccatatcctgtatttcttcaacgcttaaagaacggttgacatttgcggccgcgctttcaacgtcctcggctatgcgctttatctgaatatccgacatacgctcgctcggaactacgctttcattagccttctttaccgcaatttcaatctttttggggtcaaaatcgacttccgctccgcttcttttaatgattttcattcaaacatccccttgtagccgcaaactgaaaaagcgacttctatatactatatcttgttagtgcaaagactattataccacaaatcacagaaaatgcaatagtcattttcaataatctttatatatttgttttgaatccttcgccgaggacctcgcccgcctcgcctactattataaaggcgtttttatcgcagcttgtggcgaggcggcaaaccgccgccacctcgtgccgccgcacggtgcacataagcatctgcctttttgtgccggtgtacgcgccggttacgtcaagcagggtcactccgcggttgataagcgacataatactgtcggaaagttcctttgcgttatcggttataacataaataattttgccgcggtctgcgccatagagtatcaaatccataacgcgggacgaggcgtaaatggcaattaccgcataaagcgcgctttccatatttttataaaccagtgccgaaagccccaccaccgccgcgtccgccgcgagcataagcctgcctacggtaaggtgcgggaatttgcggtttataagctttgctattatatcggtgccgcccgttgtagcaccccgcagcataaaaagactgatacccagccccataagcagcccgccgaagagagctgctaaaatggggtctattttcattttgggcataaaaagccccgaaatatcgagggtcagcgacattacagccgttgcaacagcggtttttgcaataaaaataccgccgaatttaataaaccccgccgcaagcagcggaatattaagaataaacaccacagtacctataggcagtgaaaatagataattcaaaattgtcgcaatgcccgtaagcccgccgggggatatttcgttctcggttaaaaaaagcaaaaccgccacggaatatatcataccgccggcaatgtaaaagagaagatcaaccaaaaaggagaaaagctgttttcttttcatacataatccctccgaaaataaaagctttcaaatatttttcccgcttttgcgaaaatatatttcacttaatttcttatattacatattatgatattgaagataacgtgttgccccggcgatacgacttcaattattctacaggaggcaatttttatggcagatttaaaaaacggctgcccgcccgaaaacggtacgtttaaggaagccgtatgcgtagacgccggcagagtgtacgattcctgctgcgaccgcgattgtctggaggatcttcgctgtttcttcttacccgaggatcaggggcttataagcaacgcgataagcgtgagattacgctcggcagaggtacttaatgttttcattgacgttgagccggtaaacttcaacaagggcttttattcctgcgatcttactttcttcttcctgcttgacttcgacgtttacaccgctccccattcctgccctcagtgtataaagggtatatcctcttactctaaaaaggttatacttttcggcagcgacggcaacgtaaaggtattttcaagccgcgaccgcgaggacggcgactgcgacacaagctcgcgcagaagcacaaatatgccgaaatgcgttgttcaggcagttgacccgattccgctttcggcgagaatttgcgaaattcacgattgctatgagaatgtccgctgtattccgaaatgtatttgtgattgcataggcggcaacgttgttaccgacctgcaaaacggcactccgacggtttacgtcacgttggggcttttcaccatagttcagcttataagaaacgttcagatgctgataccggtatacgatttctgtatacccgaaaagcagtgcgacgactcaaccgaccaaccctgcgatactttcagaaaaattaaattcccgaccgacgatttcttcccgccgcgcccgtgcgacgccgataccgactgctgcggctgccaaagagccgagcagtaataaccgatgaaattactgtgcaagcgcatatagtatatgtctaaaaatatgcaaaatttgcaggaaataaagatttgcgcagtaagggtgtccattgggaaatttgtccctttggctgtttaggagggttcccgacggttctttcccccatttctgaccggacagaaatgggggggaaaagcgcggcataagcgcataaaatgtcatttaaaatattgagtgaataacggactaattttttaaaatcggcgatatatcaagcttatcaaagcctttaaagaaatccactattcccgctatatcctttttaataccaccgggaatgcggctttcaaagtttatgggcataaccgggtcgtgaacgctcagcctaagcaggaaaaatccgttttcggtggatattctcacgccctcgcggtcatcgtcggcggttttgtaatcgggtcttgtttctgcgtattcgcgcagtttttttataaccgtttcgccgtattccctgaaattctccgccgttatattaaagcggaactcggcttcctcggcgggcattttaagcggagcgagaattttttcaatatcgcgcccgcgcgctaattctattactattttagtcactaaatacgcgccgtcgtcaagaaaatagttctccctcaaagccgcgtgcccagaggtctctatggcaagcgggcagtttatgccgtcgcggcataactcaatcgccttgtttataacgtttttatagccgcggcgatagcggtaatgcgtgtcgttaaggctattttcaaggtattcgcgcagcccgtcgctcgttacggaatcggtaactatggtagcgccgcccttttcgcccgacaccatatacgcggcaagcgctataaggcggttgcggttaatttcctcgccgtcagccccaacgcagcccgcgcggtcaacgtcggtatcgaaaataatgccgaggtcggcgttattattcttaaccgccgcgcatatgctcttcatagcgtcctcgttttcggggttgggtatgtggttcgggaacattccgtcaggctctaaaaactggctgcccgatatatccgcgcccagctttttaagcacgtcggtagcgtaaaatccgcccgcgccgttgcccgcgtccaccactattttatagcccgcaagcggcttttcctcttccgttttgcccaccgcgtcacatatcattttgcgcagtctcgcggcgtattttaccatataattcagctttacggtaacgcccgcgcggttgcatataatttcctcgcccttatcggcaagctttacaatctcggtaatatcgggcgaatcgagcccgcccgcgggggtgaaaaatttcagcccgttgcggtcaaacgggtggtggcttgccgttatctgaattgcggcgtcggcttttaaatccaccgtggtcataaacatagcgggggtagagcaaagcccgcagtctattaccgatatgcccgcgttaataagcgcgcttataacctgcttcgctattttttcaccggttattcttgagtccctgcccacggatattgtaagctttgtggggtctttatcatatttatttatgtaccatgaaacaaatgcggcggtaatatcgtgaaccgccccgtctgtcaggtttacctctttcccgccgaggggggatgctactccccttatatccgtaccgcttttcagtgaaatgtaactcataatattaaaactcctatccgaaaaaatatccggctgaaaaatagccgattataataagtattacggcggacgccgtgtaaagcatcgcctttaaaaacgcggtttttccgctgcttagcatattcatcacccggtaacagtgttcccgaatacataaaatttatttatcggaggcaaacgaatgacggtatacaggctggcaggcgataaagtaagaatagccctttccgacagcgaggtgctctcgtttttcggaacatacgaaaaatttgcctctttgagcggcggcacgcggcttgccgtgagtctgctgcttaaggaaagccttgaaaaatacggcgatattttaggcgacgacctgcttgttgaaataaaggcaagaaaatccgccggatgcgttattaccgtatcccccgccggcggcaaagagcgcggcaagggctgcgttatgcttattttccccgacagcgaaagtatgataaggggcattaaaaggctttatttgcgccgcctgccgcgcggaaaaagcagcctttaccgccttaaaagcagctaccgccttgttataacggggcacagccgcgatttttattttatgagcgaattttgcaccgtaaaaaacgcagccgagcccgaaattgcctataccgaagaatatggcaaactgctctgcaaagataccgccgttgagaccgtagacaaagctttctctaaagatttttaagggttgccaccgccttgcccatatcatctgacgagaatacgcagctgcccgccacaagcaccgtagcgcccgcgcttaccgcaagcggcgcggtttcgtaatttatgccgccgtcaacctctaaatcaatgcttaagccctgctttttgatttcctcccgcagggtagaaagcttataaagcgccgagggcataaacttttgcccgccgaaccccggctcaaccgacattacaagcaccatatcgcaaagcggcaaaaactcaaaaatctcttcgggcgcggtgcccggctttattgtaagacaagccttgcagccgcgctcccttatctcggtaagggtggcgcgcacattgctgcccgcctcgtaatgaaagcccagaatatccgctgcctcggcaaactgctttatgtacctgtgcgggcggtctatcataaggtgcacgtccagcggcagcgaggtatgcttttttatcgactttataaccggcacgccgaacgagatgttcggaacaaaaataccgtccataacgtcaaggtgcagcatatccgtgcccgcgtcctctaactttttaatatcgtctttcagtgtaagaaaatccgccgttaataccgacggtgaaattttaaccgacaatttttttcacccctatacatatataatatattttaaccgcaatacggcttattgtcaatgaaaatgaaaatataaatgaatttccgaaaaaaacaaaggctcccttcttttcggctttgccgaaacagaggggagcctgactgacctgcgccccttgccctaaaggggatagggccgcgcgtacgcttggcgaggggatttctttagcacaccgctcaataacaccgctaaagggctacttttctgccaaacgctttttcagggaaattaaatcaagtatgtttagcttgccgtcgccgttggggtcgcactcggcggttttgtttaacagcaaaatgcgcttaagatatgtaaggtcggttgcagaaaccgcgcaatcaaggtcaatatcaaacggcacgtcactttcggcaatgccgcaatctatacattccccgtcaaagaaaaggtgtccgttttttacaacgtctaaaacaaagtaagtttcgccgcaggtaaggcatttgtaataatcgccgccatcctttgtgcaggttgcgttttggtgctttaccaattcgccttgtttgtgcccctgcgctttggtggtgcgcgtttcggtttcgccgcatttgccgcagcggcgtatttccaccccgtcggttgtgcaggtcagcttttttgtcactgtccaatcaccgaagctgtgcccggtggcgggtacatagtttatattgtatatcagcttgcagttcaggcactttacggtatcgtacccgtcggttgtgcaggtgggcgccgttgttttaataaggctcgggtcgtgatgtgccggaataaccaaatcggttatttcgtttttatctttatcaaaatatttatggcaaacagagcattcgtaatgctcccttacgccgttcacggtgcaggtctcgggtattctcaaaatccattcgcccaaattatgccccgccgccggtatagacgtatcggttatttcctctttatctttatcgaagtatttatggcaaacagagcattcgtaatgcccctttaccccgttctcggtgcaggttgcgggtatttccgaaacccacccgccgagctcatgccccgtggcggcaacataattgaccgtgtatctgtagccgcagcttgaacattttacaatatcgtagccgtcggtcgtgcaggtaagaggtatttttttaagcagctccggattgtggtgagccggtattgccaaatcggttatctcgtttttatctttatcaatacttttatggcaggcggcacattcgtagtgttcctttataccgtcttttgtgcaggttgcaggcacttccgctatccattctcccaagctatgaccgttaatatcgcaatccgtggcattgtaaattatttcagcgtctgacggaatgtagctgtatactaagtcgatattattccattcttctttactgccgaggtaatatatttttttaagtaagatgcaatcggaaaatgccccgttgcctatacctataacactatcaggtatagttatgcttgtaagacctgtgcaaccggaaaatgcacattctcctatacttgtaacactatcgggtatagttatacttgtaagacctgtgcaatcggaaaatgcattgtcacctatagctgtaacactatcaggtatatttatgcttgtaagacctgtacaattggaaaatgcactgtcgtctataattgtaacactatgtggtataacgctgtttttacagcctaaaataagcttatctgtatccttttctattaggcagtttccgctcgaaaaatatttttcatttttaatgcctaccgtaaggctattaagatttatgcaaccgccaagcgcagaatgcccaatgtttgtaacactcttgccgattattatgcttgtaagacctgtgcaattggaaaatgcactgtcgcctatagctgtaacgctatcgggtatagttatacttgcaagacctatgcaattggaaaatacactattgcctatagctgtaacactatcaggtatagttatacttgtaagacctgtgcaaccgtaaaatgcatatattcctatacttgtaacgctatcaggtatatttatacttgtaagacctgtacaaccatcaaatgcacatattcctatacttgtaacactatcagatatagttatgcttgtaagtcctctgcaatagtaaaatgcacggtcacctatacttgtgacactattaggtatatttatacttgtaagacctgtgcattcgtaaaatgcatcggcatctatagttgtaacactattagatatatttatactcgtaaggtttgtacacttataaaatgcataagtgcctatagttgtaactttatctccaatagtgacatatttcacatcatagcgatattgcttccagggtaataaacgatcagtgtaataattatacatatcccccgtgccgcttattgtaagcgttgcggtcgcggtattatagctccaggtgagattatttccgcatttgccgtttgtttcccccgcggcgaatacggcggtgggaattattgacagaataagcgccgtgcaaattaagaacgataaaagctttttcattttaaaatttcccttcacttatattaaaaggaataccttttgaactcctgtttttactttgtaacagcccaaaacgactgaaaattttttcttgcacaagcttgatttatgcttttaaactactttttcttattgttcatatattcaacgtattcttcaaggcacatattcagcctgttcatttccttggcgttgtttatacccacaaagcggtagtgccacgattcataggttattccggttatttcctgcttatccttagggaaacgcagcacaaagccgtaatccgccgcgtgctcctgcatccaggtaaacatagccgtgctttcaaagctatcctccgcaatgttgaaatcggctgaaaagccggtgttgtgctcgctggtgccggggcgggtaactacggttgccgcctttgcttctgcctcctcgcttgaaagccccgttttaagccacttgttggtttcctgcgtgaaaagcattttttgggttgcatacgaacggtaaggcgagcgaacgtagagccagtttttcgggtttgtttcagccgcgcgctgggcgtctatcatcgcctgcatatacggccatacatttttatctatctgcttcagcataccgttgatatattttgtgggaatttcggtaaggttgccctcgtaatcgtaattctcgggcagcgggttctgtgcgtttacaagtaaaagctgctcatagtttgcgtccaagccgttaggccctgttgcagggtagctcggcgttgggccttcgctcgatacatcggatacgatttcgcccgctgcgctgctgctcccttgcgaaacatccgagccatcagtctttttgccgccgaacgccgactttacaacaaacgctataagcacagccaacgccaataaaacgcaaaggcaaaccgcaataaaaattctgcgctttactattgccttatgtctttctgctcttgtcatttttaatactctccttattcgtcaagctttaataccgccataaacgcctcttgcggaacctcaaccgagcctaagcggcgcatacgctttttaccctctttctgcttttcaagcagctttttctttcgggtaatatcgccgccgtagcacttggcaagaacgtcctttctcagcgccttaaccgtttcacgcgcaattatcttgcccgagaccgccacctgtatgggcacctcaaaaagctggcgcggaatataatccttcagcttttcggcaatgcggcgggctttgttatacgcattatcggaatggactataaacgaaagcgcgtccaccacgtcgcccgcaagcataacgtcaagttttacaagctttgatttttcatagccctttgcctcgtaatcgtagcttgcataaccctttgtgcgggatttcagcgcgtcaaagaaatcgtaaacaatttcgcccataggcattacatagtgtatatccaccctgtcgcccatatacttcatatcggtatacgccccgcggcgctcctcgcaaagctgcataattgcgcccacatattcgctcgggctgtatatatgcacgtccgccacgggctcaagcgcctcggctataaccgcggggtcggggtagtttgtggggttatccacagttacggtctcgccgtttgtaagcaaaaatttatactcaacgctcggcgcggtggtaacgaggtcaaggttatattcacgctcaagccgctcctcaataatttccatatgcaaaagccccaaaaagccgcagcgaaaaccgaagcctagcgcctttgagctttccggctcaaaaagcagcgacgcgtcgttaaggcttaatttttcaagcgcctcgcgcaggtccgggtatttagcgccgtccgccgggtaaattccgcagaaaactacggggtttaccttccggtagccctcaagcggcgtatccgccgggttttcggcaagggtaacggtgtcacccacgcgcgcctcgtccaccgttttgattgacgcggtaagatacccaacctcgcccgcctcaagcgtatcgcacggctccatataagtcgcgcgctttctgcctatttcaaccgtatcaaaatcggcgccggtcgccatcattttaattatatcaccggttttaagcctgccgcttattaccctgaaataaaccacaacgcccttgtacgggtcgtaatatgaatcaaataccagcgctttaagcggggcggacctgtcgcctttgggagccggaatatcggtaacaatgcgctccagcacctcctcaacgttaagccccgttttggcggatatcataggcgcgtcctctgcgggaatacctataacgtcctcaatttcctttttcacccgctccggctctgccgagggcaggtcgattttgtttataaccggcaaaagctccagcccgtgatccaccgccaaataggtgttggcaagggtctgtgcctctattccctgcgacgcgtccaccacaagcaccgcgccctcgcacgccgcaagcgagcgcgaaacctcatagttaaagtcaacatgcccgggggtgtcaataaggttcagctcgtattcgttgccgtccttcgccttgtagtaaagcgttaccgcgtgggcttttatggtaatgccgcgctcgcgctctaagtccatactgtcaagtatctgttcctccatatcgcgctcggctaccgattgcgtaagctccaaaaggcggtcagcaagggtcgatttgccgtggtctatatgcgccacaatgcaaaaatttcttatgttttcaagcggaaaagccactgttgtttctccttataaaaaatattcctttatattataatacatagagtgtattttttcaattattttcgcataaaaaagaagacccggttaatccgagtcctcatttcgattcgatattacagcctgcaaacatcctttctcggacgtttaaaccattttccgtttgtaaaatcgggcattatctgcggtgcgccgccctgctttattgacatttccgaaagcacagccaccgcctgccacgtagcggcgtcgtacacgtcaaccggaatttcctcgccgtttataagcgcgtcggtaaaggctttgtaggcaaaccaatccattccgccgtgacctgctttcagcgtttcctcggtaacgtttttccaaatttcgggtaagtattcgttttcaaatttaacggcgctattaagcgccttttcgtaatatttcaccggctcaaacgattcctcgtctccgtcaagaaataccgagtttgtatcctgcatatacattccctttgtaccgcgaaccgtaaaatcgcggctgtatgaacgcggcagggtcgtatcaagccgcaaaagaatggtttcgccccgcgcgcaggtcaaaacagtggtaacaatatcaccctgtgcaaagcgagcggctttcatctcatcggtcgcgtcatcgcgggttttaatatattcgctaagtcccgcgctttttgaggcaaaggaggaaacggtcattatcctgttgccgcggttaatatcaagcaactttgcaatgggtcccagctcgtgtgtcgggtagttttcacagcagcggttaaggtagttatcaaagcgatagtgacgtctgacatgaccgtaggctatttcattgcgcaaatcgtgcgcatatgcgcccgcgcaatgcactattgttccgaaaacattttttcgcgccattgatgttgcaagcagctcctccttaccccagcagcagttttcaacaaacatatagggggttccggtttcttcccttgttcttacaagtctttgacagttttccagtgtgtattcacacccaacctcgcttgcaacggcaatgccctttttcatagcgtaaacggcaatttccgtatgggtgctccaatcgctgaatataaaaacggcgtcaagccccttaaccgaaagtgcctccttataatcggtaaagccctcgggctcgttaccgtattccttgattttttgagcagcgcgcgccaccctgtcctcataaatatcacatactgatactatttcaatatctgtattcttcaaaagcacatcgcgtatcaacccatagccgcggttgccaagccccacaacacaagcctttattttcgccatatcaaacactcctttttgagtatattaccccaaacggagaaaaaacacaatgttaaaaaagaacataaagctgtctttttttaacatttacttttttacgttgttgtgttatgctttataaagaggtgttttatatgtggaattttatcaaaataccgtcgtatttcggaataacgaataatatcggcaacagcacggttttaggtgtagggtacgataatttcacagtaaccaagccggaaaagcatttcagaatacagacattttttacatggcattttattatttccggcagcggtacgcttgaggttgaagaaatgaaatttgagctcagcagcggggatatgttttttattccgccaaatgtaaaaatgaggtattaccccgatcccgccgacccgtgggagtacgtttggttttcgctgaacggtgacgccgccggacactacggtgagttagtcggcttttcggaaaatgtattcacgcttaaaaacaggcaccgcaaaataaccgacggaatattaaagagcctgtttgagtcacttatggaaaaaccgaacgaatacttcggcttgctttcggcattttataaaataatggatatatgtgtatcgcaaattccgcccggcagcataaaaagcataaaagagactattgactacagctgtttttcacagattttcagtataaaagggctttgcagagacgcaggtataagccacgcacacctgctgcggctctttaagagggaatacggaacaacccttataagctacataacggaaaaacgattagcccacgcctgcgagcttttggaaaccacagatctacctgttgcggaggtcgctttttcgtgcggattttcggacgaactgcattttatgaaaatttttaaaagaaaaaccggcgttaccgccttaaaataccgaaaagaaaaatctatgtatgataagaccacatagaacgactgccgtttaatttcaataaccgccgggtataacgcttgcttttccgtaaatactaaatgccggagagtgagcgcattttatggtaattctctttgcggacaaaaaaaccggcaccggaaaagaaatttccgaaattctgcgttgcagcggcatatccataataacagaatatgaaaaaataagcattaaagcaaaaaacagtattgccgtttttgccggcaataccgaaaatttacgcgatataagcttatctgactgcgcagtgggaatatgcgaggattcaaacctttcggcgcttaaaatacttatggaaagcggtattccggttataacctgcggaatgaaccctaaaaacaccgtaactctttcaagtcttaccgctgcctccgccttagtttcgctgcagcgtacagtgaccgatattttcggctacgaagcagagcccggcgagttcagaataaaattaaaccgcggctacagtccgtttgcggtaactgcatcagccgcggtttttctgctttcgggaatactgcccgatgaattttaagcgatattacagctttatttatatgccgaggtaattccgaaatattcctccaaggtcagcccgctcgcataaatctttgcggcgttttccactcccacatatctgtaatgccacggctcaaacatatagcccgtaatcggctccttgccctcaggataacgcaaaataaacccgtatttatatgcattttcggcaagccaggaagcctcgggcgtacccttaaacctatcgtcggcgtagttaatatcaaacgcaagccccgtttggtgctccgagtgccccgggcgcgcggaatacctgtccgcgttttcagcaccgtcccgccttacatagctgttataaaggtttttctgaacagtgtagctcctaaagcctgagcatacccacattttgagatttttttcagcctttgcagcggcaaacattttgttaagcgccgcctgtgcctctgaatttacaccgggattatagctgctcggcagtggataggtcttgtttactataagtattccgtccctataggtcagctctattttttcgggcgcctttaccgtcaccttaaattccgctttaatttcggggttatcaactgatgttaccgtaactatgcagctaccctctttttttgcggttatattaccgtaattatttacggttgcaacggcggcgtcgcttgtttcccacttttccgccttattggcagcgttttgcggcgacattgtaactatgggcataaacctttcgccctcggtaagcgttctttcatatgcgctgagcttaatgccgctgacgtgtataatttccggctcgcttgatactgtaggttcgctcgcaggctcgctgtttataacaggcaccgcctcgcttgtaagctcccattcacttccgccggttgacgctattctgtctgtgctttctgttttcttacaggcggcaaacgcaaaggcaatagccactgccgccgttaatgataaaattcttttcataaaaaccaccgtaaataatcataccacaaataaataaaaaagcaaagcttattataactaccctaccgtcataccttttgcccggttaaacggcagtaacaggctgcagttgatttttaaaatcagatttttccccttttggcaaagaaaagcaccgagccgccgctcaatattataacaaggcaggttataactataaatatgggcacattgtcgcgcgcaggctcgccctcaagctccgcatagctttccgctttgtttacggtagccccggcggtatcctctttttcatagcttagtgtggcggaggttttcggctcatctatgtatttaaccgcccccacagccattccggctgaaagcggcattgcggcaatgcaaaacgccgcagcacttattaaaagctttttaaactttaaaaaacggtttttcacttgtatcccctccccgtttcatctgaaattttaacacaataaactgtcgaaaatacgtctttcgcgtgaaatgctgttttttcggcgcgaattgcaattattataattgaaaaaagctgtatattgttgtaaaatataaccgaggtgaaattatgcttaaggttgccgtttgtgatgacagtgaaatattttcaaaaaacgccgccgatttaattgcacggtggtctgatgaaagcggaatacccgcggaggtttcagttttttcaaatggggacgatttaatttcggcagtagcctcaaatgataccgatattatttttctcgatataattatgccgcttttaaacggaatggacacagcgcgcgagctgcggcaaaaaaacaaagccgtaagaattatttttttaacctcctcccccgaatttgcgcttgaatcctatgaggttaaggcgcagggatatattttaaagcccgttacatacgaaaaaataagcgaggcgcttgacgaatgtgccgaggcgctctcaaccgagcctgaaaacataattttaaaaacgcagaacggctttaaaaaaatatattttcacgatattgagtttgccgaggcacagaacaaaaaggtcatatttcatttaaaaagcggcaagaccgatgaggtttacgagccgctgcacacctttgaaaaccgttttaccgagactgacggatttttcaaatgccaccgcagctatatagttttcctgccgaatgttgaccgattttccggcaccgaaattattacgaaatcgggcaagacagtgcccatagcgcgcggcagcgccaaagcctttaaagaggcatatttcagatttatgtttaacgaagggtgaaaaatattgcttgttgaaattctgagctacctgcacaatgccacaacgctgcttttcggggtttatatatccgcggcgtttctgggtgttaaaatgagccgtaaaaacacgcttatgctgctgcttttcaccctggtttcgggcgcgttttatgtgctgacctatgtgcttttcggtgaaaagctaacagaacagctttacccgcttatagtgcatttgccgcttgtaatttttctgacttcgttttacgaatataaattttcgctttcctgcctttcggtgcttacggcatacctctgttgccaggcaagcaactggttggggcttgcggcgcttaatataacaaattctcaggcggtttattattcggtaagaattattgccacggtaattgtgtttgttttgcttatccgctatgtttccgccgctaccgccggacttttgaaaaagcccacaaaatcaattcttattttagggcttatgccgtttgtgtattacgttttcgattatgtaacaggagtatacactgccctgctttactcgggaattgaatcggtggttgaatttttaggctttatgatttgcattttttacattcttttcatattcctgtatttcagagagtacgaggagaaaaccgaagccgagcaaaaaagccgtatgatgaagctgcaccagcagcaggtacaaaaggaaattgacactatgcgccgcagcgagcacacagtcagcattttgcggcacgatatgcggcattttctgctcacaatttccgcctttattgaaaacggcgatgataaaaaagcgctcgattacataaacgacgtaataaaaataacggacagcaccgtaaac

SEQ ID NO: 2362 - DNA, 4115 bp, Unknown
  16S sequences of unknown bacteria
ttgacaaatgcggcgacgatctgttctggttctttgcactgcctctaaaacatgtgaacgcagacggatcgccgataagagctattgccttctgggaataatacggcagcttggaaaggaaacgacaatgatagaatttttattaaaccatgcagacaaaaaaacagtttcatatcatatgccgggccataagggctcaaagctttacagacagctcggttacgggaaatggctggataattttatggactgtgatattaccgagattccgggcgcagacaatctgtttcaggcagaggacgtgttaaaggacatacaggacaggtatgcgaagctttacgatgccaggaaatcatatcttctgattaacggcacaagcggcggccttatagctgcaatacttgcatctgtaccggccggcaaaaaactccttatggcaaaaaactgccataaatcaatattcaatgcgctgacgctcggtaatattgaacctgtctatcttcatccggaaatcgatgaggaatacggcataacaggagcgataaatcccgaagaagtaaaacggttgctcgctgaaacccccgaagcagaagctgtgatactgccaagtccgaactattacgggatatgcagcgatatagaggctattgcagaggttgttcacaatgcgggcaaggtcctcatagtagatcaggctcacggcgcgcatcttcacttcttccacaaatacggagcaggtgatgatatgccggaatcagccgaaatgagcggagccgatatagttgtcggaagcactcacaaaacactggcttcacttacacagtcggcaatactgaatctgtgcagcgacagagtggacagatatgtgcttgaagacaaacttcaggctgtgcagagcaccagcccttcatatgtgctgatggcgtcgcttgacataaacgccgaaattctcgaaaaacacgggcagcagcttatgaataagtggcgtgaaaacctcgaccggttttacatagaggcagcaaacataaaggggcttaacattatgaaaaccgatatgatggatgataccaaaatcaatctcgatatgggcgcttacggcattacaggcggtcagcttgagaagctgcttatggaaaaaaatatatacacagagcttaatacaggcgatatacttatgtgtatgaccggcataggcaacacccgcagcgaccttgaaaagctgcttgccgctctggaagaaatcgcagacagccatgagcctgcagacagagcagagggacagcgaaaaatatctataccaaagggcggcagaatgcacccggtgccaaagtacaaggaatatgtgaagctggaggacgctgcgggcagagtatgcgcaggctcaataataccttatccgccgggaataccgtttgtatgtccgggagaggaaataagcggggaaacctgcgcatatatcaaagccctgagagatgccggagagaaggtcatcggagtaaatgacaagggacaggtgcttgtaggcagagaatagaataatgaatacaggataaaaggattgcttcggcagtccttttttgaaacacgttaggcatatattgatatcataggggaggtgttttccgctttgtgcaaactaatagagtgaataagcacaattatatcgaattttacgaaaatttcattaatacaattgacaatgggaatatgcgggagtaagataaaggtgatgcaataatcttaattttctataatttaaggaggaaatgtgatatgagtgaacaagtaaaaactcatgttgttgaagttgatgaacacggtttgaaaaagcatgacatcaaggtttcgacagtagtgttcatgattttctgtctggtagctgcaggctgctacggtatcgaagaaatgatacctgaatgcggtccgggactgacaatcatcatgttatgcgtacttccgtttgtatggggacttccgtttggtcttgttgcatcagaactcggttctgtaagaccgcaggagggcggatattacaaatgggtacaggaggctctgggagaattctggggattccaggcaggctggtggaggagtatttcaatatatattgataacaccacctatgtaattcttgccggcggatatgcggcaactgtatgggatatgggtattcctgcagaatttgcgcttaaattcgcaatgatagctatatttacaataatcaatatccgcggagttaaagatgtaggtattgcaagtacgatactttccattctggtaatggtggctttcggcgttgttgctatatgcggattcatcaactggggcggagatgcagagacagcatcaacaatctcattccagattactcctgaacctgcagagggaataggcgactggttcttctacatcgcaggcggcatatcaatcggtatgtggatgtactcgggctatgaatcaatgtcaaccatagcgggcgaggtttcaaaccctcaggtgattcctaagggaacaatcataacagtaccgcttatcatggcagtatatatcctccctacaacagcaggtttgggctcactgggacagtgggaatactggggtacagaagcaggctgcgtaggatatgcagatgttgtagctcacttctggggaccggcattcggagtaatatttgtaatagttgcaatacttgcccagtgttcgatttacaacacatacatagcatcaggttcaagaggcttcttctcacttgcagacgaccatcttgcaccaccggtaatggttaaatgcgacaagaaattcggtgttccttacatatcagtattatcagtaggtatattcaaccttatattctgtatgttcccgttcggatttatcgttgtacttgactgtgcgcttctgatggcatcatatatactggtatatatttcagctatggtattgagaaagagaatacctgaagaagaatacaaattcaggattccgggcggatacggattcctatgcctgatatgcatagttcctatctgtgtagctatatttgcaacatttgtaaatggctccgactactatcttggtggtatggtaggtattgtttccggtcctatactctacttcatctggagaagaagatacggcggacttacagttaaggatcctgtaagattccctaaaaatgaaaagacaggacttggtataggtgatactaagaaacttgcattcctgtttatgattatgactattatgaatgtaatagcattagtatttgaaccttggtatgaaggctggggaacagaagatgcgtgggaagcaggcgactacttcgacggtatgtttgaaaattctaatgtagatgtgattcttggttcgatccagacaggactttacatactgacagctgtatgcgcaatacttatgatagtattcttcttcgtatacagaaaggtagagcctaagaaataacgatatgttgattgccgttaaggcagccttaacataaaataactaaatattaatcacagcacaaagcggaggcgtttagccttcgttttgtgcatatgtatgagagattaagatatttgaacaggaaattttgcaggtattaaattcagataaaacttctgacataaagatgcacagataagctgtttgggccgaatcaggtttcagcttagacggtttttttatgtaacggcaatagagaatatatggattaataactgtctgaacaaggtacattattcaggttgattatataacatgcagtattatggattaagatatccggacaaaagaagcaactcatatgaagggtgtgtaaaaaacacatctatatacttaaaattaacctaaaaagtaaaaaagaaatacaatacaccaaaaatagtaaatgtttattgacatgttatgctcttactggtaatatatagctgtgagatacacagttatattattacataaatacatttatcaaggaattagagaggacaggataatgagtaaagcagcagaggatataagagcatatattacagaacagtttatgacaacaagaagaaaggaattcagctttactgatgatatggtatttcatattatatatggtcagggtacgg

SEQ ID NO: 2363 - DNA, 11156 bp, Unknown
  16S sequences of unknown bacteria
gcacaacttggaagcagagattttctgcggagatgtagctacctgtgtatctactccgtgtgacgcaatctttatttccgaagaacttgcagagcgtatcaaagatcgtgctactgttcccgtagtagtgatcaagagctttgtaaacaaaaatgaagttactgaaaaaacacttgcttactttgattcattaaaatagtttacaggagggagaacaatggctgtacttaactttatagtcaacgaaatttttggtcagggagctattttcctggcaatgatcgcaatgatcggacttcttttacagaaaaaggacttcagtgctgtcgtaagaggcaccctgatgaccgcaattggtttcttcgtattaaatgcaggtaccggactgatcaccggaagctccatcgatggactgagcactgcatttaacgcaattctgccacaggcacacaatcagccagatattgatatgtctgtatatggtacacagatcggtatcgtaatgattatcgcatttgcatttaacctgttatttgcacgtttcactaaatggaaatccatcttcctgaccggacacatgctgtactggttcccgtatgtattcatcgcagcaggcgttgatgcaggattgaccggaggaaaactgattattcttgctgctatcttcaccgctgcatacatggtgatctgcccgaacctgatgcgtccgcttgtcaaagaagtaaccggcagcgacagcttcaccattggtcatccaaccacgattctgtccctgatttccggatatcttggcaaaatcgtcggtgataaatcccattctactgaggatcttcatttcccgaagagccttggattcctgcgtgaagtatccatcaccggttctatcgtgatctgcattacttatattgtcatgacatttgttttgatggcaaacggactggttcctggagaagtatggggctatgctggtggaaatactggtatcttcacttatatcttcactaaatccatctacttcggtgtaggtatgactgtaatgctccttggtgttcgtatgttgattggcgagatcgttccggcattcaaaggtattgctgagaaagttgttccgggagctattccggctctggactgcccggttatcttcgactgtgcaccaaacgctctgattatcggcttcattgtagctatgatcacttcaaccattaccattgtcctcactgcaggtatgttcccgactatcgttatcccgctgacagttacctgtttcttcgagaacggctgtgcttccattatcggaaatgctaccggcggtatccgcggatgcatcatcggtgctatcctctccggtatcatcatggtacttctcgttggttttggttcttacttctttggcaataccatcggaaactggatgctggtatacggcggacaagatttctccctgtggggtattgtggaaggattcattgcaagacttctgtaggataacgacttgaacgaatctttccgatatagcagaccccggtgatccatacagaccaccgggggttcttgttatcttcttctattttctctttttcttcaggaaatcccagccgcagccaacaactgtcaatacgatcatgcttccaaacaccatcagtgctttttgcagcacttcaggcagtcccagcaccatcgctcctgcctggataaacatgtagacaaacatatgaaggcacaggatcggaagcgtctgctgtcccaccaggctgatcagatgggataccttggggagtttcacttccaccagtgcacccagcatgaggatcacgatggatcctgaaattccaaccaacagatatgccagcatgctgacaccatagttaccgcaggataagttcacactgccgcatacaaagcccagcagcagaaatacattaaaagaaccgatgcacagccgcttatcctgatccagcttctgtgctccgtctctctgtcggaatgcttctcctgctgcaaagaagcaggaaaaataaggaactgcttccagactccagggcaataagagaggtgtgacataatgccagatcactgatgccatgagtcctgccatcagcaactgatactttcgtctgctcttattgatcagtccataccaggtatagaccaggaaaagagctgtcagaaaccacaacggagaattcagaagattcaagagcactggattctctcctgtatagctgctctgccacatctgattccgtgaatagaggattcccagaagagactgtatcttcagatctcctggattgccgctcagcacggaatccttcagataaaaaaacagccatagaaaagcactggttccaaagtacgggatcagaagacgctttgcttttttccagagaaaagcgccataactctccccttcttttctacgaaaagtgtagcccgccgcgaagaaaaagatgggcatatagaacataccgccataataggtgagggctcccagcgagcagcctgcatggacagccagcaccaccaggattcccatggcttttccaaaatccagccattccaatcgtttcttttgttctgcatttctactcatcactgaaagcaactcctctttctttttcacccatcctacgtagcaggatctgcaacagaacttactgcttatctaataatgctgtcagcttcccactcaagggctccacataccgaacagacagttctgacaatcccacggtaatgacactgatcagtaccagattgatcagacaagtcagattatatccaagcaaaggctccacagtcagcaaaaaccaggatccaaatgtggcaatcaccagaaaatgaatcaaatacagggaataggaaatccgtcccatatacaaaaaaatcttttttgataagaacccctgcaccgacttcaagtttaacactgcaaatacgaagcagagcacgccaaagatatgataataattcacgaatacgaaaggaaggattccccacagagttccttcgtagccaaaacctgcagacggataacacataaaataaagtcccactgcaagcatgagccagtttaagatccggttaccacacagccactgcttccagttccagtccgtgcacataaagtcacacagcacataaccaagaaaaataccaagaaaatctgtccgcaacaatacaaccgccacaatcgcatacacgatccaacggaaacgtctgccaccggtcagcgccgccagcgcatagtcaatgtacgctcctaaaaacagaatctgcagagtccacagcacgccattataatcattcgttccaaacaggaaacatccgtacaaggattctttgagcatgctcaaaaatgatggtgaaaaactgttaaatccggcaaaccattcttctgaacctgccagtaccgctgcagccgtattctgatagagaccaaacctcattgccagatagatcagaatgttgatcaccagaaccgtcggcatcagacgaaggtatctctttttcgcacttgcagccagtctctttttatctccggttatcaggaagcttctgcacagcagaaaaccgctcaggatcaagaacagccgaaccgctgtatttccattaaaaaatacattgagcggggatttcccgatgacaatatctatctttcccggcagatgacagctcgccgggtcataatgatacattccataataaaatgcatagacaaaatgggtcaggaatacggccacacagccgattcctttgagcccatctaaatattccagtttttccgtacgcacagatccaccaccttcgcttccttcagaagcttcacacacagatacacaagtaccagaagctgcaatactgcaaatacccacataggcatcatagactcgccattcacgcactcctgataaccggcaaacgttacgatctgcagtgcagccgcaaggagaaattccttcggctccaccaacaccagaatcactgccagcacacagaacagataaccataagtctgatccatataaggcagaaaatacccggccgccagtccgaagaacagaagcagacgaagaacgggcaacatctggatctctgccccattttttctggtagctgcatcttctgaagtctcgtccactgccttggtcagtttccactcaccctgacagaatacccatacgccaaggaggagaagacccactgccacaaaacagccaacggttgccaccggatcaaagagctgtccctgcatggcttcccggccgacgatctcatagatgttgggccagtggaatgtcgtcaatgtataaccggctccgaaccaggcatgaaagctatagacaaatctggctgttccggtcacaagcagtactgccagctgttcaaaacgaagtcctttgtatttccacaaaatcattgccacaagagcaaggcctatatatttgacattccataacagtaaagctccagccaggatcgtgaacagccagacagctccactttccagatagaacaatgcacagatacatataagtgcgccgatactggcattgcttcccatgatcgtcccatccataacgatggtcggaaggatcatcaagattccataggcatagagtcctcttctgacacgtccggtcatacgcttcaccagcacgcctgcgcagactgccagataccattcttccatgagcatccacatatcaggcatcccacggtccgggaatgcggttcgaagagcgaatcccacacctgtgatacacacagcaagaagcgcttccataaaatcaaattttactttcccaacacagaacttccgaaagagaagtgtacgcaggaaatcatcaaaacctgtcataatcctgccctcccttctgtccgttcactctcaattctgtcagattccaaagttccaccctccagcacatttgccggatcatgcagataccggtaaacatccagactgatcagcaccagcagtgccagctggataaatgcaagtgccccataagacaccagcggtgcctgcttggtcagatactgcccatatcccaccacagtcaggaaggaggctgtcacaaacagcgggaatcttctgacacggatcaaggtatagatcagcagaaatgcatcggtcagatacagataccgctcatgcatatgcgggataaaataggtggtcagcattccgaagaacactaccagcaggatcacaaactccttcgttatccgaaccttttgataggccatatagcacatgaccagcataagtattcccaggatcagaagcatgcctgccttcacatactcatccaggaagaaattatttccaatgatctggtaaatattcgggaatttgatggataaagaccaacggtctttgcctccctggaacgcatagattcccaacagttccataaagggtcttcctgccagccatgccggaaagattccaaccagatacatgatcgggatcgtcacaaaatgcttcagatccactttccgccgtacccagaggatcaccagaaacgggaagataaacagggtctgaagtttcaccgcaaaagcagctccatagaaccacatacctgcccatttcttatttttcatcagacagtttacacattccaggatcaacaatgtatagataatatcacactgagaccagactgctgcattgaggatcaccgtcggaagaaacaagaatacaccatatgccagcatccctcgtttcttgcttccggtacagtctgtcaccatatttcctatcagacctgctcccacaaaatcaagcatacagcaaaaagctttaaatgccgtcatagaattgatggggagaagtgtgatcagatacagaagatacatgactggaggtgcataatcatagaagttccctgccagagctttgaagccgccagctcttaactcctcaagccacaggctccaatagtcggtccagtcctgggccacaaaagaacggacggctgtgcgcacccacacagccagtaccgtaattgccgccagaagcaatacgtctgacacgttcagctcctggccgcctaatttcatttttttatttagaaggtttctcacagactgatccatgtaaaatctcccttatctcaaaactttttcaatgatatatctcggacgctctttggtctccagataaatcttgccaatatactctccgatcacaccgatggccagaagctgcaaccctccaatagcccagatggatacgatcagggatgtccagccaatgcttgtatttccaaggaaatgctgtaccagggaatagatcagcatcagaatactgcacatgaagatcataaagcccaggaacacgatgaaacggatcggtttgatggacagagacgtaataccatccactgccagtgccagcatcttcttcagcggatatttggactctcctgccagacgctcatgtctctcataagtaaccacatcggtcctaaagccgatcattggcacgataccgcgcaggaacagattcacttccttgtagtttgccagttcattcagggcacgcttgctcatgagacgataatctgcatgattgaataccacttcgccgcccatcagattgatgatcttataaaatccttctgcggtaaaccgcttgaagaaagtatcggtagttctggcactgcggacaccgtagacaatgtcacagccctcatagtatttctctacgaactgatcgatcacatcaatatcatcctgcaggtccgcatccagtgatatcaccatgtctgcgtattcctttgcagtcataagtccacccagcaatgcattctgatgtcctctgttacgggacagcttcacaccctgatagagcggatcctgatcatgcagctcctcgatcatctcccaggtacggtctttggaaccatcattgacaaacatgatcttgctgtcacgggagatcatattccggtccatcagactttccattttttccttgagacgtcttgatgtctccggaagcacctcctgctcgttgtagcagggaatgacaagatacaagatctgattcttttctctctccataatcctcttccttacattcctttgatgtactcttcaattgcatcatgccagtcagcaaatctgtgttcaccggtcaggcggaacatcatgttatccagaatggaatatgccggacggttcgcagatgccggattatttttcacatactcttccgtcgtaatatgatttactttggttttctttccagccagacggaagatctcatcagtaaaatctgcccagttggtatcaccctcacaggtaccatggaagataccatagttctcggttggaagcagccatgccatagctcttgccagttctgctgcactggtcggagttcccagctgatcctttacaacgcttacctcgtcatgtgtctcagacagcttcagcatcgtctttacaaaattgtttccatcgccgtagagccatgcagtacggatgatgaagaactcttttgcaaactgctgaacgaatttctcaccggcaagcttggtcacaccataagcactcttcggatccggagtatcgaactctgtgtacggtttggttccatttccattaaatacataatctgtggaaatgtgcatcatcttggcaccggtctcagttgccgcaatacttaagttgcgcggtcccagtgcattgatcttccatacgatatctcctgcggtctcacagccatttacattggtaaatgcggcacagttcaggattgcatacggttttacctcccgcgccatctccattactttatcaatatcggtaatatccagttcagccacatcggtatttaccagctcataatcttcattacctgccagctgcttgttgattgctcttcccagctgtccgttacatcctgtgatgatcagtttcttcttcatgttttgctttctcctttttcaactcttgttccaggtcctgtaatctcttctcattgagtgccaccatctgatccagggtacgcacactgttggacaggcgggacaatgccaccgtcagtgaaaagataatgagcagggaaaaacagaatcccaggaaaaatatcatatttaccggtgcgtagattccaaggaatccagacaccacatttaacaaagccggggcgcagtcaaatacaaacaatgctgtcagaaccagcatccagaccaacgcatatttcagttccagacttctgcggcggatcatattgatcaggatcgccaatataaataaaatagccagaccgaccacgatctgcagttttactgtcatcatggcaattacctcctaagtctttccatcagaattgccagcgtcaccttgatcatataataagctgacttaaatcctgcgatagaagagctgccctcttccctttctctcataactaccggaagctccgtgactttcttgcccattctgaggatcgccatcacactctccggctccggataatccttcggataattctgtgcgtagatctccataacctgacggttcaccatacgcataccggaagtgggatctgtcaccagctttcctgtcatcagtttgatcagaactgagaaatagcggattcccacacggcgcagtcccgatgactgaaatccttccttttcaataaaacgggaaccaatgaccatatcactgcctgtccgttccagttcctctgccatctgttccagataagacgcatcgtgctgtccgtctccatcgaactgaaccgccagatcatagccgttctggcatccatacagatagcctgtctgcacagcaccaccgattcccaggttaacagacagatttacatgtttaattccatttttccgacatacttccaatgtatcatcggtggaacaatcgttgattactatataatcaaatcccggcgcattctgccggatatcgtcaactgcccgctcaatacttgcactttcattaaaagcgggaataatgaccagttttttcataaaaacagttctcctgatatcatgcttcttttaagcataccacattttgacttgtttgtcactctccgcgggcggtcacaaactgagacagcacccggaatactctgcaaagatccgtaaaccatgcaaaatgcacaccattttccttcaatgcccggtgtccttccaacatggattccacataggctcccagactgttggtgctggttccgccatgggacatgtacaccagcacttccggaatgtaagataattttactttatctttgtataaaattcgtaccataaattcataatccccggaaatccgataatcagtccggtaatatccgtacgaatcatagacttcttttctaagatacagagtcgggtgtcccggcatccagccgctcctgatatgtccctgaccctggtgccacttccgcaccacccggtcaccgtccatatagcacaggtcaccgtgcacaccgtctgttccttcccgctccatgatctccaccatgcgcgccagcacagtctcatctgcaaaatgatcaaagcaggtgccgataatatcaccggtacacagcttaagtcccttattgatggcatcatagatgccatcgtccggctccgaaatccagcggaaagctcccggctgttcctctgataatcgggtcagcatctccacggttccgtccgtggaaccgccgtccacgataatatgctcaatatttttatacgtctgtttccgcacttcttccataatgcggcaaagattgtccatgtcgttgtatgtggtcgtcaccaccgacacttttggcattgtactcatctattccccctgaccggtcagtctgtgatacagtttcacatagtccataaaccgatcctgtttcttataatatgctgctctttgtaagcagtcttctgtagtccctggacaggctgcctcttctctgatcgcatgctccagtgccgcttcatcgccctttggcacgacccgtccacacttctcatcaagactctccggacttcctccagtctcataggtgatcaccggtgttccgcaggacaatgcctccagattggtggtcggaaaattatcctccagagtagcattcacaaatacatccgccatggaataatagtctgcaagctcctgtgcactctccgtacgctccagccccatcacattggatggcagattcttcaattgctttttactaagtccaatcaagatgatctgcatggatgccggcagtttttccgccagttttaaaaatgcaggcagtccttttctgcgctcccacacattggcaacacccaggatcacatactttccttccagtccaagcttctgcctcagggcagttccgtccgtcggatgaaatacactctgatcaataccgttcggaatcactaccaccggatagtccttgaggaacgactgctccacctgacctttcagccactgggaaggtgttacaatggtcagattcttcacgccggtaaatgcagccttctttcgcacataattctgctccgtatgattgcagaacagcgcatatgggtaggtcttccgatattcccgacaatgtttacagcctgtcttccactggtcgcagcctgtataatcataaaatgcacagtgtcccgtatagggccagcaatcgtgcaaggtccacaccactggcttacctgcctgcttcagataagaaaacaattcttccacctgcaggataaatccatgtatattgtgaagatggatcacatctggatcccattctctgatcttctcaatgagctttctggtctgccctgtggatgcaaagccatgctctccgcggaaaaaggtagacaatacatgaaatcccatatcaagatccgatccaaaccggaatgcctccacgccttctggtgcctgtcgtcttccataggcgatcagcccttcatcaccgcagcttttcagtgtatggtaaatatccaccgtgatacgtcccacgcttccgcttccgcacactgtgctgatctgcaataccttcatgttctctcctttgccgcattgcccgcttttcaaatctatgctatactttttcataagtatagtataagcgaggtaattcaatgataatcatacaaccttccggcggtttatgc

SEQ ID NO: 2364 - DNA, 2927 bp, Unknown
  16S sequences of unknown bacteria
ggtgcgcgcgcagctgctgattcatccggctcagagaagccgctgcctgttcgacctcatgcgcgctgatcgatacactgtccatgtcatccctcctctctagcagcgcaggcggctggccattgcggcacactcatcctgaaggcgggcatagaccgctgcgctttcccgaagataggatgcatactcgatcagcactttcttcatcaattcaaaatcactgcgaaatgcattcagctgctcgctgaaggcaagaaagtctttccctttccaatagccctccatctgctgcagcagccgatagacgctgccgtaaacctcggcatattcctcagcctgaccctgaataaatgatgcattctgaatcagctggttcatgtccacgttgatcctcatgtcttcctcctaaaataaaatcaggtgatcgcccggaaggatccgggaacgatacaggcactctgcgcccatcagtatctcgccggtccgcgcgttgcatagaaaatggccgtcatcgctcagcgaaagacccatctgctgcgagatccagtcgatgagatgacgcaggatatccgcagccggcgcataaagcgggatcgacgcatcaaagcgcatggacaccgccggtacctggatgtccaccagtatattttcatccatatcatccttcctctgtccacagctggatcagctgttcctcatccccatggcgcacgatcatctgggtgctgccgcagcgcagcgcgcgaaacccgaagcgaaagccatgcacgtccgcgccgctgcccatccagcaaaacagcgcgtcatggcggggcgcatccgcaagggcgcggatctgcggatcctctgcccatcccgccgccacctcagtatgcgcagtgcaccaggatctcaccttctgcgcgaagcgcgcgcactgcgtctcctgcgcgcaaagcacgatgaccatttccgccttcggccagaaaaacaagctgccgctatttacgtcgacccctatgctgggcccgctcagcgtcataagctccgccatgctgtcttggatgcagcgggcatagcagcgcggatcagggcgaagacagatgtatgccgacagtccttcctcatcagcgacgatgccgcagcccggatgccgcaggagcacgccgccagccgtttggccgaaaaactcctgcagcaagccggtctcgtgcaccgcatagctcatctttcccatgcctgcgggcagacggctcatgagcgcatggtcacattcctgcatcagcaccattagatggatcatggggcggcgcagcaaggcgtgcagggcagacgcatagcgcgcatcatggaacagcgaaggatcatccgccagcagataagcttctctttggatctggctcagcacatggatgagctgagccagcatccgctcgcgcttcatctgcggatggctgagatcaaacatcatgatcccctcttcctgcgcgatcgccgcgccgcagcacaacaagaatcgctcctgttcctgtggcgggcagatggccagaaaggatctgcctttgatggacaaaggcatgacacactgacgctgcggacagtcacgccatcccagctgcatgctttccttcggcggacattcggcatattgcggcagctccggcgcacatatctgtctggcgcgcatccccatcttttcggcgcaggcgcaaagatgatccaccaccgcgccaagctgtttctgtgtgccgtccgcatcctgccagcgcagggcagagtgcgtgcgcccctcttgatccaggatctgaagaagatgcgcggcacaggtgcgggcctgcgggcagtaatccgcattcacataggcgctgacgccgcggatgctcttctccccatctccgacctgcaagatgaattcgccggcattacgcagcgcaagcgcctcatcgccctgcagcatgtcacggctgtctgccctgctctgcaccttcatgcagatgcggaagcgcgcattgctgcggatctgctcatcgatgatgcctccaggcttctgcgtgcacaacagcagatgtatgcccaggcttcgtccgatgcgcgccgctcgccgaagctcatccagaaactgcgcatgctcctctctgagctgagcaaactcatccacgatgatgaacagatgaccaagcggaacataagattcatcgcaaagctgctgataacgcgctatgctcaggctggacagatgatgttcgctcatcatccgccagaactgttcctgccgcatcgtgatctcccggttcagcgagatgcggacccgctgcaaggacgcctcatccagattggtcatcacgccgcacaaatgcggaagcctgcgcagcgcgctgaccatcgaaccgcctttatagtcgatcaggaaaaagctgaccgtctccggagaacagctgcaggacagcgacaagatataagaaagcagcagctcgctcttccccgaaccggtcatccccgcgaggatgccatgcggtccgtctgccttttcatgcgcgtcgagaacgatcggatcgccttgctcatcccagcccagcaccgccgccagcgatccgctcagccgctgccgtttccagcgcatctcagcctgaagctgagcacagctgctgcaggaaaacagcgagagaaaatcagtgggacgcggggcatggacgcattcccgcgaggccatccgctgaaggaagtcatcccacctttcatcagaaagctcgctgagggaaaccgggatggtctcctttgcccgaagcatggcggacttgccgtcgatgaccagcgcatccgaaggcgggcgccgcctgcctgtggaaagcacgatcacccagacctcatcatcgacgcgtgcgctgtccgccgcaagctcatcacagagcacgatgcgtgtgccatgtcccgaagcacgcaccgcctgc

SEQ ID NO: 2365 - DNA, 32759 bp, Unknown
  16S sequences of unknown bacteria
gtacagcccggacagcaggccagcgtgtttatcaaaaatattattccttcccgtatgaaaattaaactgattattattgacacatttgaatatcaatatcgtccttctgcgcccaaatatttttatgaaggaaatcatatggatcaatttttatattcgcctccctgctgtgacaaaagcattataacgaaattttagaagttgtttctaaatcaaaatgttccattcgtactgtaaactgcagtaaattacataagctatcatgttttaagaaatttaatataggatacaaataaaagcagttcacattgtgtgaactgcttttattttacaattacgcaacaaatgatatagttttaaaacgattggtttctttccatatgatactatactgcctgatttttatgcgattgctttttccccactgcctgaagcaacataataaaaaacaatacaatacctgcacccaaggtgatatgtgaagcaccggcaataccggatatcatagctccaccatcaaaacctactacttgcataatacctctgaccaggaacataactaccataaaaggcagaccaatattatatacaatcagaaacggtttccataattttgtttggtccaactgaagcttgctgttgaacaatgctactgccaaaaatataactgcgcccaacataaataaatgtacatgggataccgccaaggtagttgtgcccgtaaaatcaaaaaacttagtaaattcacggtaaaacacgccgcaggccattgcagcaatcgcatatccaaatgcaatccaaataggttttttcattacatacactcctaactgctaaataaaataataataactattattataagttatttcgtgaaaaagtcaaatgcatcttatatcaatatattgattggcaattaaccaccatgtatcaaatagaatggcagaacattttatgcagctgtaccattaaaacgaagattgataaagatatatttaaaaaattaacaagaaaagagcgcaatttcagtatgactgcttctaacgggactattgacgttatatatttttcaacgagtaagtttacttctctttccatataaaaatgaccacgtaataaaaaaagaactgctccgcaatattgcgggacagttctttttattcattgtattattttacatcaaaaacaaatgcgtcgtctctgtaatcgcaggtcactccatgttcactgtcaacttttccttccagcatcagctcagacaattcatcttcaattttggattgaattgctctgcgcaatggtcttgcaccgtaaaccgggtcaaagcctgcttttgcaatcgctgcaaccgcttcatctgtaaaggtaatgtcaatatccaaagcagccaaacgttcttttagattattcagcataccaactgcaattttttgaatattttcttctgtcagtttgtggaacacgatgatgtcgtcaacacggtttaaaaattccggacggaacaactttttcagttctgccaataccaattcacgaacatcttgattgtctttctcggcagttttctccttatcatcttctttatgaccttggaaaccaagatttgctttgctgtctgtaattaatcttgcaccaacattagaggtcatgatgataaccgtatttttaaagtcaacttttctgccttgagagtcagttaagcaaccatcttcgagaatttgaagcaacatattaaatacatcgggatgtgctttttcaatctcgtcaaataagataaccgaataaggtttgcggcgtactttttcagtcaattgaccgccttcatcatatcccacatatcccggaggagaaccaaccaaacgagacacagtatgtttctccatatactcggacatatccaaacgaatcatagcattttcatcgccaaacattgcttctgccaaggttttgcaaagttctgttttacctacgcctgttggaccaaggaagataaaggaaccaattggacgtttcggatctttcagaccgactctgccgcgacggattgcttttgcaactgccgtaacggcttcatcctgaccaacaatgcgttgatgcaatacctcttccaatttcagtaaacgttcgctctcttcttctgttagctgtactacaggaatgccggtccaagtagatacaatattagcaatatcctgtggtgttacttcaccgttgccgcttacttttttctctttccaaacttctttttcctgctccaaacgttctctcaattgtttttcttcgtcacgaatttttgctgcgccttcaaagtcttgtgtattgacagcagcagctttttcctgctccaattgtttgatacgtttttccatatcctgaatgtcattaggctcagtgaacgctcttaaacgcactctggatgcagcctcatcaattaagtcaatcgccttgtcaggtaagaaacggtcggcaatataacgggaagaaagttttaccgcagcatcaattgcctcatctgtaatttttactttgtggtgcacttcatatctgtcacgcaaaccttttagaatttgaattgcttcctcttctgtcggttcgcctaccataacaggttggaatctgcgctccaaagcggcgtctttctctatatgtttgcggtattcatcaattgtggttgcaccaatcaattggaattcaccgcgagctaaagatggttttaagatatttgcagcgtctgcggaaccttctgccgcacccgcaccgataatggtatggatttcatcaataaacaggatgatgttgccgctgttttttacttcctccattgctgctttgatgcgctcttcaaagtcgcccctgtatttggtaccggcaaccatactggttaaatccagtgcaactacacgtttatcttttaacagctcgggtacttctccctgtacaattttcaaagccaatccttcggcaaccgctgttttaccaacaccgggttcaccgattaagcaaggattgtttttggttcttctgcttaaaatttgaatcacacgctcaatttccacttgtcttccgatgacaggatctatttcaccttttttggccagttctgttaaatctctgccgaattggtccaaagttttggttgcgctgttacctttgccctttgcacccggctgtacagcacctgtggtattgtcatcttgttcaccgctgcttagggcattgcggatttcttccataatatcgttttgacgtactcccagcattctaaggaaacgtacaccatagctgtcgccttcctccaatactgcaattaacaaatgttctgtgccaacgtaattgtgatttaatctggaagcttccatcacagcaatttgtaaaatacgtttgctgcgtggggtaaaatcatctaaagacaggctggtacggctgcctgtgcctattttctcttccatgcactttgtaaatgcttcttccgtaacgccaagtttacttaaaacttctgctgctacgcctgaattttcttttaacaaaccaagaataatatgctcactgccaatataagtatgacccatgtcttctgctgatgttaaggctaagtttaatgcgttgtttgctttttctgtaaatccatcgaatctatacatatcgtttgcctcctatcaaattgcaacgttgtttgttttccttttattttaatccttcgcttaccatggaagcacgaagaatatctctttcttctgctgataattgttttcctttcattgtcatcatggtagccggttgtgtttgaatcatcagtttatttaatgtttcataagatatgtctttgataaagcctgacgccacgccaaggcggacattggaaagcaatttcataaattcttccgtactcaaaatctttgcactttttaatatgccaaaagaccttgctacagcatcttgctttttcacattctccatcagactttttctgatattgcgctcctcttccacaagctgcatgacaatgcgttccagattttcaatggcttccttttcactcagacccaatgtaacctgattggacagttgatacaacgcacccacaggctcggttccttccccgtatgtgccgcgcagggttaaacccaattttgacaaattatcggaaatacgtttaatcattccgttctgctgcagagacggcaagtgaagcatcaaagaagctctcataccggttcctaaatttgtggggcactgtgttaaataacccaattcagaatcaaacgcaaagtgcagtgtatcattgagtgcagaatcaatttggtcagccaattggtatacagcgcttaaatccataccttctttcatcacttgaatgcgaagatgatcctcttcatttatcataatggcaatactattgtcttttgataacaataatccccgcccttttggatttgaaataaagtccggactgaccaagtggttttctaccatagatacagcttcaattttatctacttgttccatatctatataaatcaaattgcgtaaggtagcatttgtactttgttttgctgcctgcacaatgttatcccttacctgcctcttttgctgctcattcatgcgaataggaaacggtattttttgcaggtttcgtgccagacgaattctggaactgatgacaacatcgccttcttttccgcttttctcaaaccatttgatatccattgtcattcaccttacctttcttttcctgttctgtttattccaatttctctgataatgctttaatcttgtctcttaattctgctgccaattcaaaattttgctcgtcaattgccgtttgcaattgttcttgatactgttctatttcacttttttctttcggcggttctttttcttctgtttgttccactacctgcaaagcagttcccattggaatttttcctatatggtgggtattgccgtgcattctttgtatggaaggcatcaactgattcaaaaatgttttgtaacagtcggcacaaccaactttgcctgtatcggaaatatctgataaagaggcaccacatacaggacagcggagtgtatcttccataagagaatttttaccaaagaaactgctgaaaaattgatcaaatgtgttgcttgggaagaatgaattgccatatcccattttttgcgcacattcggaacaaagtgagtgttccgtcaattctccattaataatggttttaatatgtgtattggcaggacgttttccacaggattgacataacatatgaattcctcctctaaattataattgtgtaattaacatatttttaaacacggatgctcttaattgatctcgtttttcttgcggtacaacagcataagcttggtttgatacggctgctgccattgcttttaaagtattggcctgcaccgcttgcttttgtgacaaggaatgaaggatagattttgctgttgcggcatccagggtatcccctatattatgcataatatgcataatataggattctttgttgtagctcatacgcgtaatgcgaatatatccgccgccgccgcgctgactttccactaaatatccttgttcgggagtaaaacgcgaagtaattacataattgatttgacttggcacacagcctatggtatttgcaagttcgttccgtttaatctccacactctcatcttcgttttcctccaataattctaatatatagtttgcaacataatcgctgattctcatttgataaccacatcctttatcaaaatcatttttgactttgactttctttggctttaatattattatacactttcaattcaaataatcaaggtcaaataaagtcaaacaactgttaaatttcttaattttttcaaattatctctctcattcttttattttctaataatatctagttttttcttttgttttaataatatttttattatcatatgtaattggaaagaaaccaaataaattctgtaacacctttttggtattcgtaataatatggaatataaaacaaacaaggaggaaaacattatgtgtaattctaacgtattcggtggcggttgttcctggatcattatcatcatcttaatcctactttgctgcggtggttgcggcggcagcaattacaacaacaacggctgcggttgtgacaactgtggctgcggctgctaatttcgtttgtaaatgatataaaaaagggctgcgactaaaaagtcgcagcccttttttatgttataacataaaataaattgtacaacaatttctgacacctaaacgctaaaacgttcttgtcaacaaccaaaatctttgattttgtaattgttgcaaggttgttataacatagaggcgaaaatagatggaatggggtattccctttcatataaatccattaccaattgttttcctgtctgtgttttaaaatatttttctttcgcaatttgtatttgctctttgctcattttctcttcaaacatattaaccaaaaaatcagcctctatcaaaatttgataatcaatatcatctacactttgataagtgtgatgatgtgcaattagaaaacaaatacgctgtaccatatcttcaggcacattgcaatcctttaaaagtttcagtgcaataggtggtccctctatttcctgatactttcctgaacaggattgatattttgcttcactgggacgaataccaatgtcatgcaaaacagaagccatttctaatatcgtttgttttttctctggaagatgttcctcttccccaattatcttggcaaaaccatatacttttagtgcatggttgaccaattcgggacaaccataattatagtcaatcatttttagcattactttatgaatcacattactgcctccctacttacatcttaaaataacagattttttgattcaagaaatatcttctctaaatgaatcatgaagctatcctttgttttataagaaaatgcacgcttttctttaacatgatatccactttactgtgtagcaagcagataacttgcatctattctgcgacaaatttctttaaaaggtacagaaccatcaagaataatcgtgcaccaatgttttttgttcatgtgatagcccggaaaatacattttataatctaccaaagcctccaattcttccggtaacatacgaaaatcaaaaatttctgccggttcatcttccagaagtcccaatttttgctttgataccgtcaataatataccgtaccatttttgcgtatccttcctccgccaaattgcatttttcggaaactttttccataaaaattccaattcatctccgtatgtttttctaacataatctattaattcatttgattgctttgattgaaatatatctatctggaagcattgagtggcaatttccaacagtgtttcctgatactcatatttaaccgtttctacaaatcctcctgttgcatgacccaccagatgtaatgtataaagctcatttaaagaaggatctataatttctgtagaaatttcaccttgtggtgtaacgtgaacgtttaatagaaatccactttctgataaagtcttacgataaatatagccagattctgtttgtacaaatccaaactgtaacagctttgatagatttacttttttattactaaatatactgtacatgatgtttgacatatcacacctcataaacgtatagctatatttttattgctttatactatcaatattgtaccacattgctttcagtaattccacacaatgcagcacaagtaacctcgcttaagtatcgaagtgtaaaaaacaaaaattataaaaattcatttactttctaatatgataatgatacaataacagtaaattgcagggggactgaaaagttgagaaggtagaacctgaccctttgaacctgtcggttaataccgtagtagggagacaagccataacatcattgttgaaccaatattttgttatttattgtctgcctatttctaaatttaggcagactttttatttttacataaggaggaatgattgtgaaacatgcgttaaccattgcaggttccgactgcagcggcggagccggtattcaagcggatttaaaaacatttgccgcacacggtatttacggtatgagcgcaattgtatctgtggtagcagaaaatacatgccgcgtactggatattcaggatattacgccggatatgattgaaaaacaaatcattgctgtttttgaagatatcgaggtacacgctgtaaaagtgggaatgctgtctactcgtgccggcatgctggcggtgagcaaaatgttaaagcaataccgtccaaaacacgtggtaattgaccctgttatggttgcaaaaggcggctgtgctctgatgcaggaggaagcattatctacattaatcgaagaaatgattcctcttgccgatgtactgacgccaaatattcccgaagcagaagccattacaggtatgaagatacaatcggaagaagaacgcaagagggctgctgtttccatatatcaaatgggcgcaaagcatgtactgattaagggaggacatctatctcaggaagaagatgccacagatttgctgtacgacggcaattcttttcagacatttgctaccaaacggattcctaccaagaatacgcatggtacgggctgcacattttcctccgccattgcttcaaatctcgcattgggttatgcaatgccgcaagcagtcgccaatgcgaaagattatgtcactatggcaattacccatgcattggaaataggcaaaggtcatggccctacacaccacttatatgacatttatcaaaacggactgaccgtaaaggagaacgaacatgaattataaaacacaaatggatgctgcaaaaaagggcattttaacaaaagaaatgaaaactgttgcacaaaaagaatttatggacgaaaccaaactaatggaattggtggctagcggacgcgttgccattcccgcaaatattcgtcatacttctttaagtgctgaaggcattggcgaaggactaaaaacaaaaatcaatgtaaatttaggaatttccggtgactgcattgactataccaatgaaatgaacaaagtaaaacttgccattgattttggtgcggaagccattatggatttgagcaactatggtaaaacccatgatttccgcaaagaattaatcgcatactctcctgctatgattggtaccgtaccaatgtatgacgccattggttatttagagaaagaccttatggatatcaaagcaaaagactttctaaaagtagtgcaagcccatgcagaagaaggcgtggattttatgaccattcatgcaggtattaacaaacgtgccgtagaatgcttcaaacgcaccaaacgtatgaccaacattgtttcccgcggcggctctttattgtttgcatggatggaaatgaccggaaacgaaaatccattttacgaatattatgacgaagtattagacattttacgtgagtatgatgttaccataagccttggcgacgcactgcgcccgggaagtattcacgacagttcggatgcagggcagttaagcgaattgattgaacttggcaacttaaccacattggcttgggaaaaagatgtacaagtgatggtagaaggtccgggacatatggcaattaacgaaattgcagcaaatatggcaattcaaaaacgcttgtgccacggtgcgccgttctatgtgcttggcccattggtaacagatattgctcccggctatgaccatattacctctgccatcggcggagccattgcggcaacttacggcgctgactttttatgttatgtaacccctgccgaacatttgcgtttacctgacttggacgatgtaaaagaaggcattgttgcatctaaaattgcggctcatgcagcagatattgcaaaaggaattcctcatgcaagagatatagacgacaaaatgagcgatgctcgcagacgcattgactgggaggaaatgttctcccttgccattgacaaagaaaagccaaggagatattttgaaagtgcccctcctgccgacaaacattcctgctctatgtgcggtaaaatgtgcgctatgagaaccactaacagaattttagaaggacaagacgtggtacttcgtgacgaagagaaataaaaattatgacacatattgattatactttatatctggttacagaccgttctgtgatgtctgcaaaatcgttggaacaggcagtagagcaagcaatacagggtggctgtactgtagtacaattgcgtgaaaaatatgcatcttcccgtgaattttttgaaaccgcacaaagagtaaaacaaattacggattcctaccatattccgcttattatcaatgaccgtacagacatttgtctggctgtaaatgcagcaggtattcatattggacaacaggatttacccgctaaaattgtccgcagtatggtaggacctgataaaatcataggtgtatctgccgccacattatccgaagccgtacaagcagaacaagacggtgccgattatctgggagtgggcgccatgtttgctacctccacaaaaacaaatacacgtcccgttacgatagagcagcttactcaaatcaagcaagccgtgcaaattcccgtggttgcaatcggtggtatacagtcatctaacgtgacaacacttacagatacaggcattgacggaattgcagtggtctcggcgattttagcacaagaaaatataacacatgctgccgagcaattaaaagcatgttttacaggagccggacatgaagtttaaaggcgctgtttttgatttagacggaacattattggattccatggaagtttggaaaaacattgatatagaattcctttcaaagcgtggattggaagttccaaaaggctacagtgatgaaatattggccatgagtttcagagaaacagccgaatataccattgcacggtttggacttcaagaacaacctgatgatgttatgcatgaatggaatcaaatggccatagaggcatatgggcatcatgtgcagttaaagccaggcgcaaaggaatatcttctaaaattaaaatcccatggcattcgtttaggggtatgtactgccctttcacaaaagttatatttgccttgtctgcaaaataataacatctatgaattgtttgacgcttgtatctccacagatgacgtcagccgcggtaaaaattatcccgacgcttggctattgtgtgcggcacgtttgggaatttcttctcaagactgtatggcgtttgaggatgttcttcctgcaatacaaggagcaaaagcagcacatatgaaaatttgcggtgtatttgataaatactctgaaaaagacaaagcggatatcttaaaattatctgatatgtacattcacagttttcacgagctgctgtcagaataaaaacggattacattcattcggcgattgaaactgtctaaaacgagattccttttcaccatgaaatgaaagaagctctctactggttcccctttctctgtctggaatgttcccactcaaatgaatagctattaaaaccgatgacaacactttcacatctcctttatcgcaagatgcaattctgtacctatcataaaaaaagctctctattgtgctgaatcatatctgataaaaactcactctattctatccgttacggttgagccatcagaatttccgcacacgctccgaaacgtcctaatatacgctatttccgcgtttaagcaataaagactcagcacagaatgttagcctctgtgctgagtctttttacgaatgcttgttccaagatttgagtatgctttggtgctcttttgggcatgagtgggcatttcctttgtttctttaccatcaagcccttctgtttgttatttttcttctaatgaactttgattatgctatgttcccgtcctttgataggcggaggcttttttcggctctgcgttaccatttacacattctaaccataatagtgtagcgttttatcttccttatgatatccaaaataaaatccaactttggtcagaaattctctgttaatatcataaaaaaacgggctgttttcacagcccatttttctgtttaattttttcccatagcttccaaatattcatcaaaggttgtcatacggtcgatgataccttcatctgtaatttcaataatacgatttgcgatggtttgtacaaattggtggtcatgagaagcaaataagagaatgcctttaaagtcaattaaaccgttgttgactgctgtaatagactccaaatccaagtgattggttggttgatccagaaccaaaacattggagccgtacatcatcatacgggaaagcatacagcgaaccttttctccaccggaaagtacattgaccggttttagcacatcatcacctgagaacaacatttttcccagaaaacctctcagataagtttctgtagtatcctgtgcatactgttccaaccacttaataatgctttcattacagtcattaaagtattcggaattgtcttttggaaaataggattgagttgtacttactccccatttatacgaaccttcatccggctctaattcacccattaaaatttggaataaagtcgtattcgcaatatcattttcgccgacaaaggcaattttatcccctttgttcacacgaaatgaaactttgttcagcacttttaccccatctactgttttagaaatatcttctaccgtcaaaatctctttgcccggttcgcggtccatttggaatcctacatatggataacggcgagttgaagcgggcatttcttccactgtcaatttctcaatcaactttttacgggaagttgcctgtttggattttgatttgttggcagagaaacgttgaataaagttttgcaattctttgattttatcttcgttctttttattttggtcacgcatcacacgctgcatgagctggctggattcgtaccagaaatcatagttgcctacataaagtttgattttattatagtcaatatccacaatatgagtacaaacgttattcaagaagtgacggtcatgggataccacaatcacagtacccatgtaatccattaagaaatcctccagccagttaatggatttaatatccaaaccgttggtaggttcgtccaaaaggataatatcaggctgtccgaacaaggctcttgccaacagtacctttaccttttcactttctgttaatgcactcatttgcatatatagcatatctgtttccaatccaagaccttgcagtagtttacctgcatcggtttcggcatcccaaccgttcatttctgcaaattctgcttccagttctgctgccaaatgaccgtcttcctcactgaagtccggttttgcatataactcgtctttttgcttcattacatcgtacaaacgttgattgccctgcataatggtatctaaaaccgtaaattcttcatatgcaaagtggtcttgtttcaatacagacattctacacttagggtcaatggaaacatcacctttggttggttccaattcacctgacaatacttttaaaaatgtagatttaccggctccgttagcgcctatcacaccataacagttgccgggagtaaacaacaaatttacatgagaaaataaatcttgaccgctaaagccaacacttacatcagatactgtaatcatagttcctccagtatagttgaattttattatgaatcgttctaatcattgtatcataaattgcaattttgtcaaaatatcctgtgttcagtttcgataaatggtcttagaaaccacaatggtatttctccgctcaaacatatcatccaaaagcgcataataactgcccggtgtaacaataccgctgacatccaatacatccaaccctgcagaacctgtaatataatcagccaatttcacacagttggtattaatggcaaaataggttttaaattctcctgatttgattttgtatatctttgctcccgttgcctttaccagttcactggcagcatcgttacaaggttcctcctgagacagtgttccattttgtatccgttcgtatcttgtctgccacggcattgctacctgcataatttcgtctattttttcttccactttctttttttgagcatctgataaacaaaggccgaaacctaccaatattttcttttcaaacgataaacaatggcgtatatacagttctctgggcgcctttacaatggtcccctgactgaacataccaaaaaatttatgctctgtttcgtcatacgctccataagaatacacggtatctccataacagaaatcggaatgaccaaattcatttaaattctctccgcataaatggataaatacttctaaatccacccgttcttttccttcaggtgcattgatttcttgaatcatatttgcttttacattatgttctctgaaatatttattaaaattgctcattaatctggacggtataaaggcagtaataaataacggaagcggaatacgaactcttcttgaagtgttatcatcatttaaattccatttaaaaatttccgaaaagaaatcaaacaggacagtaagcccatataaaatcatatagatgcctacaatacgcaaaacggttgtgcttctcataaacggattcataaacaatataattgcaaatgcaattgataaaatcgaaaccaatgcaccaatcaggcggccttgagactgctttttgattgtttgtatgcaaatagcacctctgataatacctgtacataaaaaccaaagtgcaaaaatccatgtaacagatacaatgtaaaaccaagataatacaaatagactggctgcaacgacaacgtatgccaggccaataagcacaccttgtatcatatgtttatttaaaataatgcctaccgcatgtgtgatacctgccactatgattgcaattgcaataccaatcatcagcacacgggaagccaaatcatggtcgattaaaataaagataccaattcccaaaaacaaaacggatgttaccagcaaaagcaatggattcacaactttcgctttgatattcattctgtaacctcctcaatttggtaatattactcttctttccagctttcaaatgcaaagaacatgccaaataatccaagtgtaatggaaacggccgcgcaggtaattgataccacttccaaacgaaagggactggtaaacgcggcaacaattgcacatatgattgcaatgccgaaaaaaatccatgcaatttttcctgccatatacatacttccttttcatgaaaaacaattcaatcactaattaacgatgattaaaaacctttacaccaaattgactaccacatttatatcctcgaatatattgctgcaaagtagtgcttcaactccataaatcgaaataaacgcacttaatcatacaatagatttcatagatacaactttcatgatacctaacactgtatttgttctatgattgtttcttggcagagcttcaaagtaaatttacttcgccttatttggaaataagagattacaaagcgttccaaactgctccatggttaattgttctgccctggcagttggctcaatgcctgcctgttgtaaagctgcagatagttcctcttttgattttccaaggccggtattcaaagagttcaaaactgtctttctgcgttgcccaaatgctgcttttaccaatttgaaaaactgtttttcttctgtttccaattttacgggaggttccttacggatattaagccgaatcacagccgaatctacattgggagcaggaaaaaagcagtctctgggtacatcaaataatatctgtggctggctgtaatattgcaccgctacgctgactgcaccgcaggcacgtgtaccggaagctgcacaaatacgcacagccgcttctttttgtaccataaccgtcagagattccaccggaagcttttcttccagcaatttcatgataacgggagatgtaatataatatggaagattggcacaaaccaaaacatctaaaccggaaaattcatcctgaatcagttgatgcaaatccacttccataacatctgcctgcacaacttttacattattaaaatctctcagtgtttctgccagtacagcaggaagccgtttatctaattcaattgctaccactttattggctcttgctgccaattctctggtgagcacaccaaagccgggaccaacctcaatcactcctttggtttggtctgccccacattctgtagccattttgggacaaatttcaggattgattaaaaagttttgtcccaacgcttttgaaaactgaaatccgtgacgggacaataagctttttacgacattaatatctgatagatttttcatgcagtcctccagtgaaaaggatatttttcgattcttatgataatattgttattatataccaaccgctctatgcaaacaagagcaaaaaaatcatagctgcggtgataaatgtcgcagctatgattttttacataataaagcccaataactcttgtgtaataaatgctacaacaaccgaactaacagctaccaacaacaatcctctgttgaaataagctaagaccattgctgccagcatacctaccaaaccgcccaaaaagtataccagcgaaaaaccgccgtccggcgatgtggaaaatagaatgctcggaaatgtcatagcaccaagtaccgcatagggcacatatgccaaaaatgatttgataaattgattctcaatggttttacggaagagaaccagcggcagcattcttggcagatacgtcaccaacgccataattaaaatactaagaagaacataagtataattcatgattccttgtcctccttaattggaaatttccaagctgcaaatgccgacgccaccactgcacaaatgataatgacccaaccgttggacaattgatttaaaacaggcgtccaataaaacaaacagctgattgcaaccgaaatgaggatgacgattgcaatggatttcatttttcgtgcaggaggaataataatggaaataaacataccatatatggcaattcccaatgcactgcgaatagcaaaaggcaaaaatcccgttacggttgctcccaacaaagttcctaatgtccaccccagataaggagttaacatcaaacctgaaaggtatctggcgcctactttgccttcctgctgcatagcgactgcaaatacttcatctgtattgccaaacgacagcaatgcacgctcaattccattcatacgcttttcgattttttgagaaagcgacaacgacattaacagataacgaatattaataataaacgttgtaaccaacatttcaacatacataccaccggacacaatcagggcaattcctgcaaattgtcctgtaccggtaaaacaggtcattgaaatcagaacagccacccaaggcggtaagccgccttcgactactaccataccaaaggtaaaggcaaccgataaataccccaaacaaatgggaagcccgtctctcaatcctcgacggaaggtaagatgggaacgttcctccgcagaagcttttgcagttgtattctcttctgccgaatttaattcagcggcattagattcttccgtacgtgttttttctttataatccatgaatacccccactctcaaacacagagaaaagctccaatgattggttggagcttttctttatgaatatcttaacatgaaagcagttggcagacaaggtcacccatttcagaacaatttaccaatttcataccttctgtgtgaatatcgggagtacgtgccatggtcaacgccttagatacagcgtcttcaattgcttgtgctgcttgtggctgattcaatgtatatttcagcatcatagaaacggacaaaatggtagcaagcggattggcttttcctgttcctgcaatgtcaggcgcactgccatgaattggttcatacaggccaaactgattttccccaagacttgcagatgccagcataccaatggaaccgctaatcatagaagcttcatccgaaagaatatcaccaaaaatattggaagttaaaataacatcaaattgttttggattacgcaccaactgcattgcacagttgtctacatacatatagtctaacgtaacatccgggtattcttttgcaattttggtaacggtttctctccacaaacgggaggactccaacacattggctttatcaacgctgcataggcgtttgtttctcttttgtgccatttcaaaaccgatacgcgcaatacgctctacctcttttacagaataacgttccgtatcaaatgcagattctacaccatcaaccgtatcacggccgcgctgaccaaagtaaatgcctcctgttaattcacgtactaccatgatatccaatgcgtctccaatgatttcttcttttagaggggaagcatcgcgaagcggttcaaaaataactgcaggacgtaaatttgcatatagtcccaatgcaccgcgaatgcccagcaaacccgcttcaggtctttgactgcctgataaggaatcccattttggccctcctacagcaccaagtatgacagcgtcggatgctttacaagaatccacggtcttttgcggcaatggttcgcctgttgcatcaatcgctgcaccgccaatatattcttcctgataatttactttaaagtcgaacttttcagcagttttgttcaacactttgattgcctgatctacaatttcagggccaatgccgtcgccctttaatacggtgatttgatattctttcatgatgtaccttcctttttatatgaaatgataacgttctgttttatttttgtgcacgattgatggcacaaataatacctttaatggaagccaaactgatattgctgtccaaaccaacgccgaaaatagtgttaccattgggacattccaactgaatataagaaatggcttttgagtttgcaccttctgaaacagcatgctcactgtaagatacaaatttataatttgtaattccaactgttttcaatgcattaaagaatgcgtcaatcggaccgttgcccacaccggaaatcatatggtcggtatgttcaaagcgcagatttccttcaaagtgaactactgtttcattttccacatcattttcttcataaattttatagctttttaagttatatggtttatgaacatgtagatactcttcttcaaacaatgcaaaaatttctttcggcataatctctctgccggctttgtcacatgcggctttcacgattttgccaaactcaggatgcatggcttttggcatttgataaccaaaaatctgctgcatgataaaagcagcaccgcctttacctgactggctgttaatacgaataatcggttcgtattgtctgcccaggtctgcagggtcaattggcaagtatggtacttcccaatactctgagttgttttgtttcatatagtcaacgcctttattaattgcgtcttgatgagagcctgagaaagcggtaaataccagttcacctgcatatggatgacgttcatgcactttcatttcggtacattgctcgtatacttctttgattttgttcatctctgaaaagtttaattccgggtcaatgccttgtgtgtacatgttcattgcaacattcataatgtctgcgttacctgtacgttcgccattgccgaacaaagtaccttccacacggtctgcacctgccaaaatacccaactctgttgcagccgttgcagtgcctctgtcattatgcggatgcaggctgataattgcgctgtctcttcccttcaaatgacggcagaagtattcaatttggtccgcatgctgattcggcatcataccttcaacggtattcggaagatttaaaattactttatgttccggagttgcacccaatgtttccaatactttgtcacagattaatacagcattgtccatttcagtgcctgagaagctttcaggagaatattcaaaacgaatattggcgcctgtttttgcaacttcttgctcagttagttctttgattaatttagcaccttccactgcaatatcaataacaccttgcatgtctgtatggaatactactttacgctgaagtgtagaagtagaattataaaagtgaacaattacattttttgcaccgctgattgcttcaaaggtttttgtaatcaaatgcggtcttgcctgtaccaatacttggatggttacatcatccggaattaaattacggtcaatcaatgcacgcaaaatttcatattctgtttcggaagcggatggaaaacctacttctatttctttaaaaccaatgccaaccaaagtttgaaaaaagagcaacttttcttccaaattcattggattaacaagcgcctgattgccgtcgcgcaagtctacgctgcaccagattggcgccttctcaatgactttgtcaggccatgtacggtccggtaatttcacaggttcaaacggaatatatttttcaaacccttttttcatgatgattctctcctttatatcaattacaatttttacaaacaaaaagccccgaacagctgtacaacatacgctgttcggggcgaatatatcaattcgcggtaccacccaaattcggtttgtgctcacgcagcaaaccctcaccatctctaacaagattcggcctataacgcagccttacgtccgtccctatgaaatcatcaggccggcaactccgggatgagctatacataccaggttcagtgctgcctcacaccaaccggcagctctctgaaattctgtccctgctatcttattcccttcaaagtctttcacgggctatctgaaatacttcagataaatttacttgtaaaattattatacgcataatgcatgtgatttgtcaagggtaaaaagaatttgtctttcacagaaacctaacatgacagtacaaagtctttgacacaccactctgtattttattacaacatccattttaagattctgtttcttctttatcaccaaacgcacggtttgccgcttctcttgcatagtctatgacagtatgttccctattttgctgctgttctctcggaggaatggtatcgtacacttccgctaccatcgagcgcatccaaagacctggtgtaatacgcaaagaatagccatgtcccggctctaccatccagtcataaaacggcgctcttggcaacccataggccgataaaatagacataatggttccgccgtgtaccatcaatacagccgatgtctctccagtacgcatcatacgttccacaaatgtttcaaattccatacagacgcgctgcataaagtggcctccatcttcccctccgggcggagacatggtggaaccgctttccatccattggataaaatcggggtcatgttccaaatcttttgctgattttccttcccattttccaaagttacattctttaaaaccttcaacgacaattggttctgcattgggataaatgagttttaaactatccacgcaacgactcaacggactggtatagtaagcttgagcgtacggataactgttttgctctgccagctgttttaattgttctttaccttccttggataaaggggaatccgttactccaatatactggccgagtaaatttccctgagaaataccgtggcgaatcaaatgtatggtataagacttcatatattttgctccttttttgcctcagatacgacatatagtgtctttacaaagcgttatatttattgtatactttacatattgttaagtagttttcaaaactatgatatcagatgaagggaggtacctatgtgaacgacgcattcccacgaattattactttgttgcgaaaagaacgcggtctgagccaaaaaaaggctgcagaggaattacaagtttcccaagcgctgttatcgcactatgaaaagggaatccgcgaatgtggcttggaattcgtagtaaaaattgcaaacttctataacgtatcctgtgattacttattgggaagatctccaaaccgttcaggtgccaccatcacaatagatgatttaccggaagacacggaatcaaaaggaaggcgcaaaacaggcattattgctaccttaaataaaaaattgattatgaactccattcatgtcatttacggtattttacaagaatgcaataaccatgcactgacagaagaagtctcttcttttttatctacaagcatttataaaatctttcgcttgctgtattctgccaatcctaaaaatccccagggactctttgccgcaccttacaaaagacactttggtcttgccaatgcttctatggaactatccgaagcaaatgcggcttgtctcatcagcggagaagctgtagagaatttggagccgcttgaaaaagaaaaagctccccatttatctcccgagtccattacaaaaaaatatccttcttttgcagcttccctatttaatctgattcaaaacgtagaacagaaaatgggaatcaaaaagaaacaagatcattaaaaggacacttgtattataacaagtgtcctttttatttgcaaatatctgcacgattattccagctgttttaaattgttatgttcttttcttctgcttaaatatttctttgtttcttttattacttgatttgatagtaaaaaaatagctactaaatttggtattgccataaatccatttaacgtatcacaaatgtcccataccaatgttaaatccatgccgcagctggctgctgcaaaaaaagcaaataggatacgatacggtatcaacaatttatctccgcacaagtatcgcagtccgcattgtccgtagtgagaccatcccaacatggttgcaaatgcaaataaggtaatagatacagaaataacaccgtctccaaatactccaaataccgtgtgaaatgccgctgtactcagtgcaccgccatctttgcccgttgtcatagctccgctgcataaaatacaaagagctgtgatggtacacatgacaatggtatcggtaaagacctgaaaaattccccacattccctgctctgccggctctttgcagtccgcttccgtatgcgccatgaccgaagaacccaatcctgcctcatttgtaaagattccccgtgataccccgctgcgcagagcaatcatcataacagaaccgctgatgccccctgttgcactttgtaaattaaacgcgccggagaaaatttgaccaaacacacttggaagcatcgttccatgtaccgcaatgacaatgatacctgccaaaagataaatacccgccataataggcactactttttccgttacttttgcaattctctggataccgccgcttaatacaataaatacaaccagcgcaacaacaacacccgtaattgtagtatttacgccaaagctatcccgtaaggctccgccaattgcatttgcctgcgccatatttcccattccaaaggaagccagtacgcaggcaatggcgaatacaatggcaagcggtttgcattttaatccgtattctatgtaatacatggcgccgccaagccattttccgttcttatctttttttcgatatttcataccaagtactgtttccgcatatatggtcatcattcccaatagggctgaaatccacatccaaaagattgcgccgggacctccaagtgtcagcgcagttgctacacccacaatattgcccgtacctatggaacctgccaatgctgttgtcagtgcctgaaagggagaaatgccgtcattgctttgtttttttctccgaaacataccggcaaaggtgagtttcatccataaacctatttttgtaaattgaaaaaaacgcagcctaacggtaaataaaattcccgcaagcaaaatacatattaatacaggccagccccatagaataggttgtataaaatgatttactttttctatcacctgcaacaacctttcaaccgcctttcttttccattaatcttattagattgtattctcgcagtatctatttcatgtatctttcaccataaacataaaacgtgaaagccaaattctcttcttttgaaaatgaaattgttacaaatatcaacagttgccttatgctataatttgaacttactgctttgaattatggatgtgcgatagaacaataacaatgttaaatttttgtgcatattttcttaacattgccgaatatcaaaaataatttttaggataatagcaccaaaatccttgaaatttccaaaatttatgctatcattaaattagacgaatataggatgcgaaagggagttatatattgtgaaaaatatcaacaatcaagaaaaaaatcaaatcccgttacagttatttcatcaaggaaccaatccatatgcatatgagttcttaggagtacataaaactataacagacggcgctcagggaatggtatgccgtgtttgggctccaaatgccgtttccgcttctattgttggagattttaatgagtggaattcctctgcgcatcctatggaaaaaatcagtgacggtgtatgggaatgtacgttgccgtttgaatttgctcagtttgaaacttacaagtttttaatcgaagacgacaatggcaatttcatttataaaagtgacccttacgcacaccattttgagacaagaccgggaacagcctccaaatactacgacctttcaggataccgatggaacgattccgattggtacaagaaaaaagaaaaacacccgcactatgaacaacctgtcaatatctatgaaatacatttgggttcctggaaacgctatcaagacggacatgtattctcttatgagaaaattgcggacgagttaattccatacatgaaagaaatgggttatacccatattgaattaatgcctatcaccgaatatccgtatgacggctcttggggataccaagtcaccggatattttgcacctacttcccgttacggggaaccaaaagaattcatgaaatttgtagacagatgccaccaagcgggtattggtgtgattatggactgggttccggcgcattttccgaaggacgaaagcggacttgcccgttttgacggtactgcctgctatgaatacgccgaccccagaaaaggagaacacagcgattggggcactttggtatttgattacggaaaaacagaagtagtgaactttttgatttccagcgctgttttttggctgaaagaatttcatattgacggcttccgcgtcgatgcggttgcctccatgctttatttggattacagccgtgaagacggacaatgggttccaaacaaatttggcggaaaagaaaacttagaagcggttgcatttctgcaaaaattaaacgaagtcgtgtttgagcttttcccaaccgttatgatgattgctgaagaatccacttcttggcccatggtatctaaacctacttactgcggcggccttggttttaattacaaatggaatatgggctggatgaacgatatgctcagttatatgagccttgacccattattcagaaaaggtagtcacgacaaactgacattctcgtttttttatgcattttcagaaaactttattctacccatttctcatgatgaagtggtacatggcaaatgttctctcatcaataaaatgccgggcgacaatgaccaaaaactggcaggtattcgcgcttttatgggatatatgatggcacatccgggcaaaaagctaatctttatgggtacagaattttgtcagtttattgaatggaattatgagcaggaattggattggcttttgcttgcttatccgtttcaccaaaaagcaaagcattttttccaatcattaaatcatttctatttgaatacaccttctttatgggaagttgatttttcttgggaaggcttttcctggattgctcacgatgacaatgaacaaagtgtcattgcattccgcagaattgataaaagcggccacgaaatcattgccgtatgtaactttgtacccgtacaacgagagcattactgtattggcgtaccatttgcaggcacgtatgaagaagtctttacaacagatgcggaagaatttggcggaaacggtattacaaatggaaatgcaatcaaaaccttggatgaacctatgcatggctttgagcaatgtattccgcttaccttgccaccgctatccgttatttatttaaaatgcaaacgccgcaaacagaccaaagcggctgcacatacagacaaaacaccaaccaaagtaacgaaaactgcgagaaaaacagcagacaaaaaaacgaaaacaacagataagaaaacgaagaaaaaagcggattaatccggcagcaaaacgcatacatcaaggaggaatgaatatgttaccaaaacaagaagtagttgccatgctgcttgcaggcggacaaggcagcagattaggagtattgacaaaaaaacttgccaaaccggcggttccttatggcggaaaataccgtattatagatttcccactgtctaactgtatcaattccggcattgaaaccgtaggtgttttaacacaatatcaaccgctgatattaaatgattatatcggcagcggacagccttgggacttagaccgtctggatgccggtgtacatgttcttcctccctatcagcacattgacggttccgattggtacaaaggaaccgcaaatgcaatttatcaaaatatcaattttattgaacgatatcatccggattacgtcgttattttatcaggcgaccacatttataaaatggattattccaaaatggtagcgttccacaaagagcatcacgcagcatgtaccattgcggaaatagaagttcctatggaagaagcttcccgatttggcattttaaatacatacgaagacggaaccatttacgaatttgacgaaaaaccaaaacagcctaagagcaacaaagcatctatgggaatttatgtattcagctgggataaattacgtaagtacctaactgaagatgaagcaaacccaaattccagcaatgactttggcggagatgttttacccgcaatgctgggggcaggagaaaaaatgatggcttatgaattttcaggttattggaaagacgtaggcaccattgatagtttatgggaatccaatatggacttgctcaatccaaaagtccctttggatttaagcgatgaaagctggaaaatttattctcgtaatccaacactccctcctcattatatttccaatgaagcacatgtacaaaacgctttaattgcagaaggctgcgatatttacggagcattggattcctccattgtatttgaggatgttaccatcggaaaaggcgcagtcgtccgtgattccattattatgccgggtgcaaaaatagaagaaggcgcagcggtacaatatgcaattataggagaacaagctgttataaaagcaaatgctgaagtgggaaaacgacccgaggatatggaaaatttagagcagtggggtttaactgtagtaggcggcggctatattgtagcacctaacacagtaattcctcccaaaaccatgttagatgcagacgaccaaaaggaggaaatataatatgcgcggcaataatgttgtaggtgttttattttctaatgtacatgatgataaaattcgtgaactgacagaaagacgtaccatagcttccgttcctttcggcggcagataccgcttaattgattttcctctttccaatatggtaaattcgggtatcagtaaagttggcgttgtgacaaaaagtaacttccaatctttaatggatcatctcggttcgggaaaagcatgggatttatcccgtaaacgcgacggtcttttctttcttcctccttttggaaagcaagaccaggatatatccaacagccgtattgaagcgttggaatccattcgtcattttttggtaacatcaaaagaagattatgttttgctcagcgactgtgatattgtctgtaatattccctatcacgatgtagtggaaacacatatacacaatcaagcagatattactgcggtgtatcagcatggcatcattccgcagcatatgagcgaacctactgtatacagcgtaaaagaaaacggcgcattgcgcgatatgctgattcatccaaaagtggacggtccatgtaattacggattgaacatgtatgtcattaatcgtcccctattaattgaattaatagaagactgcgtcagcagaaacatgtataattttaaccgtgattttattcagcgcaatatgtttcaatatcgtttttattgttatgaatttaaaggttattccaaagtaatttgttccacacaggattatttccaagccaatatggatttattaaatcctgatgtgaaaacacagttgtttcagcctgataaaccaatttacactaaagtgagagatgacatgcccgcaagatacggacttggttccaatgtgaatcaatccttaatcgcagatggatgcgtgattgaaggcgaagtacaaaacagtattttattccgcggtgtaaaaattgcaaaaggcgcaaaactgaaaaattgtgtcattatgcaggatacttgtgtcggcactgactgtaacttacaaaatgtaattacagataaagatgttatgatacaagacggacgctctttcatgggtacagatacttaccctgttttcatcagcaaaggcagcattgtatagataccaaatagaaaggcatgtgatagtaacatgaaagttttatattgtacaagcgaagcgcttccctatattgcaaccggcggtttgggagatgttgcaggttccttaccgcaggctttgcgccagcgtttgattggctgcagaattgtaatgccgctttatgaagatattccacagcatttgcgtgatgaaatgaaatttgtcaccagcctttctgttccggttgcttggagacgtcagtattgtggtgtatttgaagcaagatacggcggtgttatttattattttatagacaatcaatattactttaaacgaagcggtatttacggtcattttgatgacgcagaacgttttgcatttttctccagggctgttttagaaatgttgccttttatagatttccagccaaacatcattcactgtaatgactggcaaactgccctggtacctatttattaccatctgttttatggacatcaggaattttatcaaaacatgaaaacattgatgaccattcacaacattcagtatcaaggcaaatatggccttgaggtattgacagatgtattggggattccaaaagaagcaacctccttggtagaatatgatgactgcgttaatttgctcaaaggtgcagttgaatgctccaattgggtatctaccgtaagccctacatacgctcaggagattatggacccatggttctcatataaactggatggtatcttaaaagaacgctcctggaagctctcaggcattctaaacggtattgataccaaaaactatgaccctgaaacagattcggatatttatgctccttacagcgccgcacatcccgaaggaaaaactgtaaacaaacaaaagttgcaggagcgtctcgggttggagcaaaatccggatattccattgattggtatggttacccgcatggtatccgccaaagggttggacttggtcattgaaggattggaccaaatcatgtgcagtaaccatgtccaatttgtgattttagggtcaggtgattttgaatatgaatctttcttccgcaatatgcaggataaatatccgggaagattggtcgcatgtcaaggatttgtaccggaattatcacgcaaaatttatgccggttcagacattttcttgatgccatccagaagtgaaccttgcggattatctcaaatgattgcattacgttatggttctatccctgtagtaagagaaacaggaggattaaaagactccattcaagacagcggcgatggcaacggtaacggatttacctttcaaaattatagcagcggcgatatggtatatgctgttcaacgtgcactaaccggatatgaaaacaaagaaggctggtcaatattagtggagcgcgctttaaaaagtgataacagctgggggcgttccgccaatgaatacattcgtttatacaaacaattattaaaataatgaaaagacactgtttgaatcatcagacagtgtctttttcatcattaagcatacaattcacttctgtcattcatatggacgtagtaatcaaaatacagatatattgtaatatcaaaatataaaaggtgcttctgccgcggcagaagcaccttttatatttcaaattattttttattgccgaaaatagccataatatccgtataagaatcgtcttcatccaatggagctgcttttctttggctgtccactctggtagcaggagcagtggtatttgcttgtccaaacagtggaagatccaaatcatcattttgtttcttttctgtctctgctgcttttgcggctgcggacaaagctcttgcttcaggagaaaaaccggtagcaataaccgtaacactcatttcatcttccatgctttcatcaaaagcagtaccccaaatgatatttgcgtcaggatgaaccatatctgcaatcatttcagaagcaattgtaatttcttccaagccaatatcaggagaagatgtgatgttaatgataacacccatagcaccgctgatggatgtttccaaaagagggctggaaatagcgcgctctgctgcttgtcttgctttatcttctccggaagcacgtcctacacccatatgtgcgtaacctgcatctttcataacggagttgatatctgcaaagtcgaggttaacaatacccggatttttaatcaggtcagaaatactttgtacaccttggcgcaaaatatcatctgcagctttaaaggcatttaataaagtcaatttttctttactgattaagtgtaaacgctcatttggaataatcacaagagaatctacgtgttgacaaagagcttcaattcctttttcagcttgttccatacggcgtctgccttcaaatttaaatggttttgttacaataccaacggttagaacacctaaatcgcgtgcaacttccgcaacaataggagctgcacctgtgccggtgccaccacccataccggcagtgataaataccatatcagcacctttcagctgctctgcaattttttcacggctttcggacgcagctttggaacccatttcaggttttgcacctgcaccttttccttttgtagagttatctccgattgtaactttttctgttgccatagagcgattcaacgcttgctggtctgtattgattgcaataaaatcaacaccttttatacccgattcaatcattctatcaattgcgttgccgccgccgccgccaacacctactacttttatttgaacaacatcgttttcattatcaatttcaaaaggcattgctttgttcctcctctaaattctctcaacgtattcctatataaagttaagttatctgcaaaattagttatactattaatttatcacttttagcgaaaaatttcaataagttttctcatgttttgtgttagattattaactttgtgcatatatcgagtaaaagcgatatactttttaatgaaaatgtcattgattctctgaaaatttttcagcaaaatttttaatttgttcttattttacttacatcttgaaaacatcttaaaaatcgcattgtattcaacccattttatgtctgtttttttctaatgattgttgcttattttgatatatcataaatataaaaaagcaagaagtcaagcggtaacatatggcttcttgcttttcaaatatgtcattttactttatgcagcgtctgaaccggatgaaacagaatagtcaggtgaaaaataaaccttattgttatctgttaccacggataaatccaatgttcctttttctgttgactgaatttttcctgaatcaaatatactcttagcaaatctcgctttataggttaagtctgttgcaataccaaaattcatagttactctgccatcatatactgctttgatactgtatgtgtcagaaatatcaatttttgtaattttatccagcccgctttgctctattgcatttagcaactcagtaaatgctattttttggtcattatcggcataagtaatctctgttccaatcactgcctcagagatatttaaaccaacaatttcaggataatccgttggatattctgttagctgttccacggcttttccattgctgtctatcaccagatatccgccgttatacgatactgcacctgctatggtcgcatcagaaacgctaatagatactgtgccaggaagcttacgggatattgttacctcaccgatataaggaagtttctctttgatattctggacagcatagtctttattaattaaaaataaattgtttccctcagaaattccactttcttttataatatcctctacactgtatctggaagtacctgttacttcaatggtactgattttaaacaaaacggttaagcttaatgtaattgccgctgctatgattaccacaaaaatagagagatagaataaaattaaattacgcttcctgtgttttgctttggcctttacttttttggcctgcatactgcgtccacgcggttgagaatgagcaggacggtttcgatattctacttttttacttgcagtcttttgtaagttatttttttggt

SEQ ID NO: 2366 - DNA, 1538 bp, Unknown
  16S sequences of unknown bacteria
ccggcagcacgtcgatgatcatccactcgggcttgttgccggagatacggaaggcatccaccacctccaggcgcttgacaatgcgcgctttcttctggccggaagcgtctttcagctcagcgtgcaattcctgggacaacttttccagattaatgtcggccaaaagtgtcttcaccgcttcggcgcccataccagcctggaaatcatcttcatatttctcacggtaatcgcggtattccttttcgctgagaatctggttcttgatcagcggcgtctcaccgggatcggtgacaatatacgccgcaaaataaagcaccttttcgaggatccgtgggctgatatccaacagcagacccatgcgggaaggaatacccttgaaataccagatgtgggaaacgggagtggccagctgaatgtggcccatgcgctcgcgacgcaccttggcgcgggtaacttccacgccgcagcggtcgcagatcttgcctttgaagcggatctttttgtactttccgcaatggcattcccaatccttggtggggccgaaaatgcgctcacagtacaatccgtccttctcgggcttcagggttctatagttaatggtctcaggctttttcacttcgccgtaagaccaggcgaggatctgttcaggggatgcgatcccaattttgatcgcatcaaatgcagcataactcattgtgccatttttcctccttcatatcgtgtgatcgttcctgctgaactgcatggtgcagatcaaatgtccagcagatcgtcgcctgcaccggaataggcggcgccgctggccgcttcctctgcatcggcaatagcaaatccgctctcttcgatctccgcatcgtccgccacataccgatcgcggtcgttgtcggcgtccatgcgcgccagattgaaggtatccatggcgtcatcgtcgtcctttagctcgatctgctgaccgtccttatccagcacctgaatgtccagacacagggactgcagctccttgatgagcaccttgaaggactcgggcacgcccggagtgggaacgttatggcccttgacgatggcctcatacgttttcacacggccggtcacatcgtcggacttaaccgtcaggatttcctgcagggtataggctgcgccataagcctccaaagcccacacttccatttcgccgaaacgctggccgccgaactgggctttaccgcccaggggctgctgcgtcaccagcgagtacggaccggtggagcgggcatggatcttatcgtccaccagatggtggagcttgaggaagtaaacataacccacggtgacacggttgtcaaaccgctcgccggtacggccgtcatacagccagctcttgccgtcggggttcaggcccgcctcttccagcatggcgctgatatcggcctcgctggcgccgtcaaagatgggggtagccactttgcagcccatttcgtgggccgcgtaacccagatggacttccagcacctggccgatgttcatacgggaaggaacgcccagggggttcagcacaatat

SEQ ID NO: 2367 - DNA, 30701 bp, Unknown
  16S sequences of unknown bacteria
gaagccccagtaaacggcggccgtaactataacggtcctaaggtagcgaaattccttgtcgggtaagttccgacccgcacgaatggtgtaacgatttgagcgctgtctcaacagggggcccggtgaaattgaagtatgggtgaagatgcccattacccgcgactggacggaaagaccccgtagagcttgactgtagcctgatattggatttcggtaacggatgcacaggataggtgggaggcaaggaaggcaggactccggtcttggtggagccaccgttgggataccactcttctgttgctggaattctaacatggcgccgtgaaaccggtgaatggacagtgtcaggtgggcagtttgactggggcggtcgcctccgaaagagtaacggaggcgcccaaaggtaccctcagaatggatggaaaccattcaaagagtgtaaaggcagaagggtgcttgactgtgagagtgacaactcgatcagatacgaaagtagggcttagtgatccggcggtattgagtggaaaagccgtcgcttaacggataaaagctacctcggggataacaggctgatctcccccaagagtccacatcgacggggaggtttggcacctcgatgtcggctcgtcgcatcctggggctgaagcaggtcccaagggtttggctgttcgccaattaaagcggcacgcgagctgggttcagaacgtcgtgagacagttcggtccctatccatcgtgggcgtaggaatcatgagaggagctgttcctagtacgagaggaccggaatggacgcaccactggtgcaactgttgtcgtgccaacggcatagcagggaagcgaagtgcggatgggataaacgctgaaggcatctaagcgtgaagcccacctcgagaataagattccaggcagcaatgcgagagacccctggaagactaccaggtgataggtcgtcggtggaagcgcagtaatgtgtgtagcttgacgatactaatcggtcgatagcttgatttagtcgatccaagaccaagaagaagaaatgatgaaagatctcgtcggaaaggctcatatgcagttgtcagggtgcagaggcgcccgataaagaagttcaccctttgcggtggctatggcctgggggttccacctgttcccattccgaacacagaagttaagccccagcacgccgatggtacttggctggagacggcccgggagagtaggtcgctgccgcatcctttttccccgcttgtataaacaagcggggctttttctatatttgcgcccactcctatctttccagctgcatcatccgcgccatggcggcgtagcgggcgatgaaatgctccaggtcaatggctccctgcacatactgattgagaaggccgaccatctccctggaatctgatgaaaagaaattaagccccgtcctggtgcggatgcgcagatacggagtcagcgccttatatctttcgatcatttcggcggttgtggcatagcgatgagcctccaggtccgcaaggttcaaccggacggcttccagccgggtttgtaatgtcatggattcatccgggccagcgtgcgtgagggtactgcaaatgtcggcttcctcctccagcaaaaccgccttgtcctgatgatagctctcttgctcaatcggagacgcttcggcagggatgtactgaatgcgtttgtgagggggcaggttttgcgcataggtctcgagataggccagtgctaaatcgcgaattggcgaggcgggattgatgacgaaaaccgtcacgtcggcctcaacagtgggagtgtctcccggacttacggtcaggggcaaaaaagcggtggggattccgggttcatcctgtggcagcagcgtggcgccggcataagacaaaaggcaggtttgggcgaattgatccaaatcatatcccgtggaaggcagaggaggcgtcgccgcatagatgcgctccatggcgggcagtgcttcctcgtattttgccagcagcgcccgaaaggcgggcgtatcgatttcaacgctgccgtcatctcgggcaaactctgccagatacgtttgcaggaccagttgcagcatttctcttttgaatgccgcagcgtcgccgacgtcggagaggaaaaagcgccagccgtctgagagcagatcgtcccgccgggagaaggcgatgcagacatccagcagctcctgcgcggtggcaggcaggggaccgaggttcgctgcccgccatgcttccagatagacttcgtacaggagcggcgcattgatatcgcccatgggaagggcggccagcgcaccgtcgggggtgtagagtgcttcactcaggaacggcgcgtaggaggctgctgcttctgtgagggtctcactttgagacagatccagcgcatagcttttggaaatgaccgcacgatactgtggggacgcggcatcaaaaagataaatgtctgcagcatgcaagccggcaatcagctcgacggcataatcggtacccggcggatcgctgcgagaacggatggtcaccagcggataggcctgcgcaaaggcgggattgtcctgtggggaaatgctcacgccaccggcaaacgtcagcacaacgggctccagaccgcccaaatcggctgtaacggttgtgatgccgccggccgcgcgaagcgacaggtaacgcccgtccacaaggcaggcgaagccgccaggcgtgcccgcactgattttcgccacgggaaggggggtggtatcctgcccgcggcagaggtaaacggttcctgctgtctccaggcatacctgcccgccttcgggcacaaaggcgacggactcgggccggagggaggccagcgaggcaaacaagagggtatcggagtttgaagcatcatagcgaatgatatcgcaggcggacgccgcatcgcgtatgtcgtaggaagccatcaccaccgaaccgtccccgcagggggcaatggcctgtatgttctgattttcaagcgctttccactggccgttggcaaggcataaggcgagcagatccgtttttagggtgatatcgctttccaccagcagatacagccagccacctgaaacggcatagccgcgcatcagacgaagcgcgcccgctgcatccagcaaagcgggtgaatccaaagggtagatttcggaggaaacgacatggtccacctcgctgatgtccagccgggtcagggtgccgcgtctgaaattgagaacgtaaagcgacgaggtgtcgcccgtgagctgaccgtcgattccctgccccacaagcgtgacgcagccgctttcatcccaacggtaaaggcgggattctacggtgaaatagagcgtttcacctgccattgcaaagccgtccgcagcagaaagcagcggggaagggtccgtactgccgtcggtcgccacggcgacgggcaggctgaatgcgacagcgaacacggcggtcagcagaagcaacagccatttcggtttcatggagtcggcctcctctttttgcagtttgggcgcggcgaaacggttcgcggttccatcataatatacgacggaaaacgcatccatttttatgcagcgtcagaacattttcccggggcttgacggcatttgaaagccgccagaggcatggggatatcttgccctgttcccggcgctgtgatatgataaggcaaatgcaaatcggcaaggaggcaacagcaatgaagatcggctttatcggcatcggcgtaatgggcgagagcatggcgcgtcacctgatggagaaaggtcacagcctgacggtatacaaccgtactaagagcaaggcggaccgcctgctggcggagggcgcggcctgggcggagagtgcgggtgcgtgcgcgaaggaccaggacgccgtgattaccatcgtgggatttcccaaggacgtggaggaggtctacctggcggcgggcggtattctggacagcgccaggcccggcgcgtacctgatcgacatgaccacgaccagtcccgcgctgtggcagcgtatcgccggtgaggcgaagcagcggggcctcaggccgctggacgcgccggtgagtggcggcgacagtggcgcgcgcaacgccactttgagcatcatggtgggcggcgatgaagcggactttgaggcgtgccgtccactgtttgaagccatggggaaaagcgtcatgctcaccggcggtccgggctgcgggcagcataccaagatggctaaccagatcgccattgcgggatgtgtggcaggtgtggccgaggccatccgctacggcgaggcaggcggcctggatgtgtccaacatgctggactgtatctcggcgggcgcggccggaagctggcagatgagcaacaacgggccgaaaatggtgaaggaagattgggcgcccggcttttacatcaagcatttcattaaggatatgcgcattgccgtggaggaagcggaccagcgcggggcggaattgcccgtgctcaagcaggtgctgaacatctacgagcgcctgcaggaacaggggcagggcgacctgggaacccaggccatcatcaaggcctaccggtaagaacacagcgcaaaagcgcggcacccgaacgtctcgggtgccgcgcttttcaaatcaaaccaggggagcagactgcttagaaatgcccgacgggctccgtcccataggggcgcaggcggaataaaaagggaggatagtgcagtgtggcgatgatgctttcgcccgtctgaagagcggtgaggtcctcgtcgctgatgacgtgctcgtccatcacctgctccaccatgcctcgctgtaccgtagaccggtagctttctaccgcgcggtggcgtccatagaggctcttgacataggaacggctttcgcggtcccaaagccggaaggccacagtcgtgccgatctgcccgagcatgggacctgccgctgcctgatagcgcgccttgatcgcggctacgccggtctcggccatcaggatgcgcaggcccctggcacggcccagggcgagcgcatcctccagatggggcagacgccccagcacacatggcccatccagaagcaacgtcacggttccgtcgcgctctacccgggacagggcctcggtcagacacaggtccatcagagcggcaaacacaggccgcgtcagggggccacgtgccgggtcgtagcagacgaagatcgtgcggccgccgcgtgcgcgcatcagcttgcggattcccagcgtgccccggctaccgaagcgaccggcgagcagttcacgcgcggcctgctgcagatgtgctaccacgccctgcgcgcgttccccctcgcccagatagctggcaaaggcgcgaaactccggcgcggcatcaagaatctggcacatgctttccatgtcgaaaccatcgatcagttcacgcagggcctggcaggtacagagctcgctatcgccccggcgcttgagatacacggccagcgccatgatcagatcgcgcgcggcggtaggataaaagggatgggcggcgctttggatgcgctcctcaaacagcaggccgaacagcgcggaggcatcctcgatcaggcggctgtcatcggtaaattcctcaaacagattccagcattccgggccgtcaggtcccgcggcgcgcttgtcatcggcaaacacaatgtctcccttctggtacagggcgttatagtactcgccggtggggtccaggatgaccagcgcatcattttcggtctggttggcccgcaggccgcgggccagatgcagcagcatgtttgtcttgccggtggcaggactgcccagaatcagcatgtgccggtcgatcaggctggcgcctacgggcaggtagacgcttttgcccatgccgtccgccccgcccagcgcaaacagcgcatccggttcgcggtagggaatgtcgcgggcgatttgcaagcctttgagtaccgttgccataacacacctccggggcggatcaggcccgcccgtccgcatcattgttttcggtttttatgtccttcaggagctgcgccatcatgctggggcgggacgtgccttttgtccctgtcagctgggagagcgaccgcaccacatatggcgcgggtgcttcggcagatttggcaggggagggcggcaaagcgtccgccgaggcctgctccaccgcggtaaacatgtcaatctgctcaaagcgcggcataggggaagagggcgctttgacgacctttttgaccttgacgcggcgcagggccttggccggtctggcaatgggcgcgtctgccgggccggagggcgcgctctcggtcggagtggactcttccgcctcttcgcagggggcgggaaccgggtccgccggcgcttccggtttgggttcggccggctcggcggcggcttcctccggttcgggcgcaagctcttcttcaggtgtttcgatctgcaggtccgcaaggtcgaaggtgcggacggagcctcgcatggcatagccgctttcgatgcacagttcgcgcagcgcgtcgggcgcgaagagcacgcgctcctgcttgtcgtcgtcgggcacgccctcatggtgacgccacatgcggcgcaggtagtcgatgtccgcgtcatagccgctgagctgggcgccggtgagggaaacggcggcgcgctgttcctcgcgttccatggcgtttacctgccgggtgagcagatcactggcgcgttcataggcaggggtgcccacctgaagctgcgaaagggcgctttcacggcggtagagcgcatccaccagccgccccttccattcctgccagcgggccatggcgcgcatgcgccggtattcctccacgccgacggcagcgttttcacaggtcagggatgcgggctccagcaccagacggcgctggcgcagcagctcacggctatccggcaggcagaccagcttgttgagcatgcccagaggattcatgccgctaccataggcggggttgttcagcacatcggcaaccagcggacgcagctcgcggtcacgcacggcagcgatgcgaaccacggtgggataccggccgccgcgggtggcaggatcataggcgggcgcgatctggaagccttcgcacagggcacgcacatccaacgtcatgcgctgccggtcgatatactcgcacgcatcctggtagggcagccacaggtcacccggcgcgccgtcctcgtcgtaggacagctgcaacaggcgcgccgtggtgcgtgtgacgggcgattcctcgaaggtatcgcaggcgtagcgccagggttcatactgccgcacgctctcggcgcgcttggcgctcagggtatagaggcccttggccccggacgcgccgtcgtccagcccgcgcaggatacacagatcctgcatcacgcgtcccagctccttttggcgcacgcacacggcatttagcccgttgagccgaaggtaatcctcctcaaagcgcacagggtcgtatttttcgcccatttccaggcgggttttcaggtaggtcatatagtgcgcgcagcgggccgtaatgcgcagctcccgctccgcgccctccagaatcccgccgccgcgtggaaacacgctttccggcacggccacggcctggtggccgccgccgatcaggtggatgaccagacgctcgccaaaaaagggttgatattgcggaaacagcgtggcccatgccctgtccaccgtcaccgcgccgccgccccggtagcggccctccgaatcaaagttgcgaagagcgttttccccggtgtaaagttcggggatctcggcacagagcaggcggtggtattcgtcgggatcggtggaaaagcccgccggcgatactttggccaggttgcgttcccggcggcccacgtagctcatattctggaccagctcgatgggaaagatgggtaaaaaggagcgaaaccggtcgggcacggattcgtccgactgggcgaacatgcgcttggcggcggcccacagcgcgccttcctccaaaccggcgtagctgatgattcccgtttgtcgcgtggtgaggcgcatggccgcacctcctttccggcgaaagcgtcagatatcgtagacgaattgcagcttgggaagcagccggtccaaccccagcttgaggtatagcggcgaggggtcgcccgtcgcatgctggatgaaggcctgcccatcctcagcgcggagcatgagcaaaagcggctccgcgccgtcgcaggtggtggccatgcagtaggccagcggcagggtggggtgttccctgcggtagaaccccgcctcctcaaaggcgcgcgaggggggggcggattccgtgttcttgcaggtttcaaaggtgcggttatacaaaaagctcagcgggctgttcatatgtgctaccgggagatgaaaatggatctccagaaactggcacatggacagatattccacaatgctgtggtgaaactgctccgccagcgggcccagcggcacgttgccgtcctgccaggggataggctgccagaaagcgtagccgggccgttggcagccgggcaacagcagcttttcgtccagcggagtacgaagaaacgtaaggggccggcggcccgtctccttgatggccgtctgctgaaagcggatcagataatcccgcatgataggcgcaagcgccgtctgcatggtggttcaactccctttggtatggtggaggcgtcagtcctccggcatgtaagatatcagcgccgcggactgcccggtatacggatcggtggacaccagcagctcgccgaaggggcagcgtacgcgcacgctggccatggtgtccgggcacgggtccttgaggtgaagacggcgcatcaaaaaagcgcgctggcggtccatgccgggccgctcgcggccgcccgcggcgctcacgtacagcgtcaccgccaccagtgccccctcctgaaacagacagaccggggccagcgtgccacccgttaccgggcagggctccagaaacagctcccggtcgcgaagggtggcatagcggcctgaaagcgccgccggggccatcagtgcctccagacgcaggccgtttgaaaaggtgagggttcccgtgtctatgtccaacaaaggcgtcatctacatccctgccttagccatggcttttgaacgcattgccagcgtgcggcccaaaccgctccaatttagagtctatcattcgctacggggcctgtcaatgattcccgcgcggtttttccaggtttgacagaagcgggaaaagcggctatgatggctctggatgcaaacagaggaggtacggccatgcacaaccggctggactggaaaaaacagctcgtgcgcgcggcgatgtgcgccatcaccgtgctggcgcttgcgcaggagacccttctggcggaagaggggccggtgctgtcgggcacggctctgtgggcgctggcggcaggcgcggcatgggcgctgtatggcgcgctgctcaggctgcggcggccgtttgcgccggcaaggctgggcgtgctggccgctttgctggccggagtggtggtgctggggcagagctttgccgccgtgggcacggcggagatggcgaccagccggctgtcgtggacggcgctggtccttgtgggatatgcactgttgattttttcggccatgcggcttttgctggaggcactatcggcatccggggaaaagggcggcgggcggtttccgctgcccggtcccgcgccggtctggttgggggcgttgctgctggcatgctggctgccgtggtttgtctgcttgtttcccggcacggtgagcaatgacagcatcagccagctcaaggagctgatgggccttacgcccatgaccaacgcaaaccccgtctttcagacgtggctgttgggcgcgttccggcaggtggggctgtggcttggaggaccggacacgggggtggccctctactgcgtgacacaggcggtgctgatggccagcctgatgggcgcgctgctggatggcatccgcctgagcgcgtccccgcgctggctgttctgggcggcgcttgtgttctatgcgctgtgccccatttttccggtgtttgcattttgcgtgggcaaggataccaactttgccatggcggtgctgttcctgtcgctgatggtcaagggcgtggtggatgagccgggacgctgcggcgcggtgcgggccgcgggtctttgcgcggcggcggtgctgtgcgtgcttctgcgcaatccgggtatttatttggtgcttcttacgcttgcgctcctgctggcatggacgctgcgccgccgggaacgccgggcgtgccgcgcatggcggatgccggcgctggcggccggatgcgtgctcggtgtttatggcgccctgcacctgctggtgcttccgggcctgaatattgcacccacgccggaaagcgaaaactattccctcccgctgcagcaggtagcccgtgtggctgtgggcggcggactgacgcaggagcaggagcaggcggtttcgggcgttctgccggtggaggagctcaaagctgcctacaatggtgagttgagcgatcctgtcaaggccctgtggcgcgaggacgcaaccgcagagcaaaagggcgccttctggcgcgcgtggcccggaatcgtgctggaccatcccatgacctgcctgagcgccaccttccacaatacctatggctatctctaccccggctacatgagcgtcatcaagcccacgttgctcatcggcgatcagtccacccgcacggcgagcgtcaaggggctgtacgattataccgtcaatccgctgagcgaaggactggaggcacttatcgaccgcttggcccagaatccactgtaccggctggcggtgtcgccgggcctgtatggctggatcgcgctgatgagcgcggtgtggctgctgcgcggaaacagggggcggcttttgggcgccgtgcccgcgctctttacgctggggggatgcctgctttcggcagtgaacggatacttccgctacgccatgccgctgtacctgtgcgccccgctgctgctgtggctgacgacggacggtggaatgcggcggcacagatagagagctgaatttttttgcctaccccattgacagggaggcggggatgcggtatactttggtcactgaaacgtttaagtgaattcgctcccccgttctgaaaggagctgtcaggcccatgaagcgcgtaagcatcaaggatgtcgcccgtgaagccggcgtgtccgccactacggtgtcctacgtgcttaaccggaatccggatgaaaccatcagcgccgaaaccacccagcgcgtgctggaggcggtgcgcaggctccactatgtgcccaacctcaacgcccgcagcctgtccagccgccgctccaacctcatcggcgtgctcattccacagaccgagccgggcaaggaattcatgttttccaatcccttctatggggaactgctcagcgccatcgagtatacggcccgcaaaaacggctaccacctgctgctcagcggcacgcaggaggaccagagctatgtgagcgtggcccagaaccggggcgtggacggcattatcatcgtgggcgcctatcctgggcgcaatctggaggagctgcgcggcatgaacgtgcccatcgtcctggtggacagctacgtcaaggacgcggcctttcacaccatcggcatcgaggaccgggagggcgcgcgcatggccaccgaatacctgctgcgcaaggggcaccgggagatcgccttcgtcagcggctccatccgcgagcacggcgtcaacagcaagcgctatcagggctactgcgacgcgatggcggcggcaggcatcccgatcaacgaggatgccctctattcgcagaccgtatcgtatgaatacggcgtagaggccgccgacgagtttgtgcggcgcggctgcaagcagacagctgcctttgtcacagcggacgtgctggcagctggtctggtaaagggcctgttgcagcacggcctgcgcatccctcaggatttatccgttgtgggctttgacgacgtatacctctcccgcatctgctacccctcgctcaccacggtccatcaggacatcgcccgcaagggagccgaggcggtgcgcctgatcatggaggcggcggcaggcgcgcatgaacggatggaatgcattctgccgctgacgctggtggagcgcgattcggtgatggaaaggagggggcggtaatgctcaagcacctgccggaggggctggttccctttgaggactgcggtttcgcccgccatcccttcgcgccgctggccatggagccggtccgggtggactgccgcgtggatgcggaggacgggcggcccgtgctgcggctgcgcgtggacggaggcccggaaagcgaaatcgcgcccgaaagcacagatggccggcactatcattttgggctgggcggctttgcactgggacagaaggtcggctaccgcatcgtaacccggcgggaggaaagccgcgttttcacctttgagccgctccgggagcggcaggcggcgcagccgcgcgccattctggaggaggaggaccgcctgcacgcagtgttcgatggatttgccgtcaccttttcccgggaagacggcacgctgcgtatggaggcgcacacccggcctgtctgcggcgcctcctgcgaggcggcacagtggacactcggggagcagttttgtttgactttggcaaagcagcagcctttttgcaaactgaaacgtttaagtgagcttgctttcgccatcgaccgctatgtgctgcgcgaaacggcggagagccgcatcgcgttcctgcggctggaaggacggcttccggcccggtatgtctggggaacgggcgaacgctttgaccgcgtgaaccagcgcgaagggggcagcaacggccgggtggtggaaaagtttacccggcagggggaccagacgtatctgcccatgcccttcttcatgacggaaaccggcctgggctggtattgcgagggcgatatcccctcggaactgcactttgccggcggcctgtccatcgcccggcagacgcagggcgaaacgctcggttgcgaccggctgtttttcggcgcgcccgcgcagctgctccggcgcttcatcgagctgaccggcgaaccggcgctgccgccggaatgggccttcggcctgtggatcagcgccaacggctggaactgcgaccgcgaggtggacgcgcagctggaggccctgaaagcgcacgactatcccgccgacgtgatggtgctggaggcgtggagcgacgagcagaccttctaccgctggaacggggacggaagctggcaggaccccgccgcaaccgtgcgccgtatccgggagagcgggctgcacctggtgctgtggcagattcccgtcatcaaatatgaatggaacggcgcgccctgcgaggcccttcaagcggatgaacgcgaggccatcgcaaaggggtactgcgtgaaaaatgcggacggaacgccgtaccgcattacggaaaactggtttcatcacagcctgctgatggacttcaccaatcccgacgccgtgcgctggtggtttgacaagcgcaaatacctgctggatatgggcgtggagggattcaagaccgacggcggggagtttctctttcctaaggacgcgcggctttacgacggcacggacggcttgggcggacataaccgctatccggcgcgctatgtgggcgcatatcatgacttcctgcacgcaaacggggtgaagggcgtcaccttcagccgggcggatttcaccggcgcgcaaacgcgtcccctgcactgggcaggcgaccagctgagcctgtggcccgagctgaaagcacagcttgcggcgggcctgagcgccgggctgtcagggattttgttctgggggttcgatatcggcggctttgccggggaattgcccacggcggagctgtacctgcgcgccacggccatgggctgcttctgccccgtgatgcagtggcatgccgaaccgcgctccggtcagttttatgccacgcatgaggacggcttcaacaacgaccgaagcccctggaatctggcggaaaagctggacgcccccgagctgatggacatcgcggccgcctatgcgcgcctgaggcggcggctcaggccctatctggtgagggaagccgccaactgcgtaaaagcccggcgccccatgatggcgcatctgtgcctggattttcccgatgatgaacgggcgatcgcctgcgaggatgcatacatgctggggcgggacctgctggtggcgcccatcgtggagccgggcgcgaagggacgcgccgtatggctgccggcaggcacatggcgcgatttcttcactggcgaaaccctttcgggcggccgggaacgctacgccgaatgcccgctggagcgcattcctgtatacgaaaggatgaggaccgatggctgatgtgcgcatcaagccgtggcacattttgctggacgggccggtgagcgagtattcggagtcgcttttcgcggtgggcaacggttgtctgggcatgcggagcttcagcctgcagacgcccaagcgtcgcccgtacgatcatgccgtgttccgcgcggggttcttcgagcccatccgtcccggcgtgacggacatggtgcagctgcccgacgcgctggggctgcgcgtggtgggggaggaacccgcacaggtttcgcaggaactggacctgcgcacgggggtattcacccaacgctggcgcgggcggaccgtggccgtggagacgcagcgcatggccagcatggcggaccggcagctgctctgtgtgcgcctgacgctcacggcccttgaggatacgcaggtccgggtgcaaagcgtcatggatgctcaggtgtgcaacctgcccgtccatgacgatcagatggtggaggaaacgcagacggtgcgcctgctggaacccgtgcgccagagcggtcgggagctggtgatgcgcgcggtgcatacgggacgtgagctgcgcatcctctgcgacggaccggaggagatgaacgccggcctgcgcgcgggcgagcggatcacggtggaaaagcgtgtgcgcgtgctgctggacgcagaagcggccaaccccgacgtaccggacccatggggcgaaaatgccgcggcgtgggaggccctgtggcgggactgcgacatccagctggatgcggacgagcgcattcagggcgcgctgcgctacaacgtgtttcagatgctgtgcgcaaacgcgccggatgaccccgctgtgtccatcggagcgcggggactgacgcacgggcgctacaagggcaatgtcttttgggataccgacgtgtttttgctccccttcttctgctggcagaggccggaagcggcgcggagtctcgtgcgctaccggctggaccgactggacgcggcgcgcgcgctggcccggcggcagaacctgtgcggcgcgcgctatccgtggatgagcggcgaggacgggagcgagcagtgcgaaagctgggatatcggcctgtgcgaaacgcacatcacagccgatgtggcctacgcggcggaccgctaccgcgagattaccggcgacggcacgctggacggggcgctgtcgcagctgtatctggaaacggcgcgctactggctcagccgctttacctgggagccggacaggaaccagtattccagcttctttgtaaaaggtccggacgaatactgcggcgccgcggtcaacaacacctttaccaactatcttgcgcggcacaacgtgcggttggcgctgcggcacgcggccatggacggcggagagcgcgggcgcctcaaacactttgaggagcatgtggcgctgctctatgacccgaaaaggcacctgtaccttcaggatgagctgtttgaccggctggagcccatgccggacgggcacgcgcagggcgagccgctgtacaagagcgtgtgctttgaccgcatgcagcgctaccgtgcgctcaagcaggccgacctggtgcagctgatgacgatgttcccggatgatttcagcgacggggaaaagcgtgccgtatgggaccgctacgaacccctgaccgtgcacgacagctcgctgagctttggcatccacgcgctgctggccttccggctggggcttgaaaaggtgggatggcgctactttgagcgctcgctgtgcttcgatttgtccgacgaactgggcaacaccggccgcgagggcatccacatggcggcgctgggcgcgagctggcaggcgctggtctacggcgcgctgggcctgtggagcgacggcggggagcttcgcctcacgcccaggctgccgccggagattcgcggcgcgtccctgtgcgtgtatcacaggggacggcgcctgcggttgactgtcagggacggagagggacgcatcgaacaggagggatgagggatgtacctacccgacaaagcgggacggaggcgtgccacaacggtctttttgctgccgtctctggtgggcattataggcttttgtctcctgcccatcgccgggtcgctgttcttcagcctcatggactatgacctgctcaggcccatggatagcatgacctttgtagggctgaaaaactttgtgcgcgttctcacgggacgggagttccgcggcgtgctggcgcacaccttcacctatctgggcctgtacctgccgctgatcatggccgcctctgtgggcgaggcgctgattctcaacaaatcctttcgaggacacgggctgttccgcacggtgtgctacacgccggtcatcacctcctgggtggcggctgcggtggtgtggcagtgggtgctcagcgggaagtacggcctgctcaaccagatgctcgcggcggtgggcattcagggcccggcctggctgtccagcgccacgtgggccatgcccggcatcgtgctggcctccgtatggaaggataccggctattatgccctgatggtgctggccgccctcaagtccatcgatcccggctactatgaggccgctgacctggacggcgccagcggcgccaagaagttcttttccatcaccctgccgctcatctcgccgacgctgttccttttgatcgtcatcaacatcatctatggcctgcaggtgttcgactccgtgctcatcatgaccgacggcgggcccggcggcgcgacgacggtgtttctggagcgcatctacaaatacgccttcgtgcagtacaaaatgggcatggccagtacctacgcctgcatcctgttcgtggtgctgctgctgtttacggccgtgcagttctggatgcagaaaaggtgggtgaattatgatgcgtagatcctcccgcatgcgcctcgtccggggtacgctgttttacctgatgctggcggtcattctgctggtaacgatcctgccgtttctgtggatgctgtcctcctccttcaaggggcaggaggccatccgcaccatccccatccgctggattcccgagcgccccacgctggagggctacgaacgcgtgttcaacatgcagggcttctccttcacgcgcgccagcctcaacagcctcctgctggccgtgggctgcacggcggcggaggtggcgtcctcggccatggcggcgttcgtgttcgcaaagctccccttcaagggctcaggcaaggtgtttggcatctacctggctacgatgatgattcccaacaccgtcaccatggtgcccaactacatcatcctgcgatcgctggggctgctggacacctacacgggactcatcctgccgtatctgggcaaggcgttcagcgtgtttctgatgcgccagagcatgctgggcgtgaacgacgcctatctcgaatcggccttcctggacggcgcgtccctctaccgcgtgttctggaagatcatgctgcccatggtcacgcccacgctggccacgctcacgctcatttccttcatgggcagctggaacagctacctctggcccctcatcgtgctcacctccaccgacaagcagacgctgcaggtggtcatgggcaacatgaagggcatgtacaaaaacaacgagcacgtgctcatggcgggcgcggtgctcacgatccttcccatcctggcggtatatctggccacgcagcgctatgtggaccagggcatcagcctgggcgggctgaaatgatcccctgtacgccggcgcgccaaggcgcgtttgcaataaagaaaacgaacggaggtatctcacatgaaaaaactcgtatccctcatccttgcgctcgcggtggcgctgtccctgacgggcgcggccttcgccgaggagccggtcaccatcacctacgccaccttctccgcctccggcgcgcaggaagagacgctgaaaaagatggtcgaggtctttgaggaaaagaacccggacatcaaggtggacgtgcagctcaccggctacgacgactacttcaccaagctggccaccaccgtgggcggcggcaatgcacccgacgtgttcgagatgaacatggaaaacttcctggcctacatgctgcgcggcgcgtgcgcggatctcaccggcctggtggaccccgccagctacagcgagggcacgctgtccgccgtgagctcggacggcaagctctatgccgtgcccatgagcttctccacctgcgtgttgttctacaacaaggcgctgttcgatcaggcgggcatcgactatccggacgatacctggacctggaccgaggcgcaggcggctgctgaaaagatccgcgcgctgggcgacgacatctggggctattatcagcccatctcctacaacgagttctacaagtccgtcaagggcaatggcgggagcctgctcaatgaggactacaccgccttcaccgtcaatacgcccgaaaacgtggccgtgctggaggccatgctcgcccgcgtgcgcggcgaggaccgcgtgatgcccaacgccgaggacatggcgggccgcggcgactgggacctgttcagcgagggcaagctgggcatgctggtcagcggcatctggggattccagaccttcaccgatcagtgcgactttgactgggatatcaccgtggagcccggcttcaaggataagagcaccttcttctttgccaacgtcaactgcgtatcgaccgaaagcgacaagcaggaagccgccgcgcgcttcgtggacgccatgggttccgaccccgacatcgtacagctgcgcctggacgccagctgggaactgcccaccatcgccgatcagaccaagctgacccagtacctggaggtgaccccgcccgacaaccgcgaggccgtgtttgacagcatggactatgccgtagcgccgcccgcgctgctggaacagggcgcggtgagcgagatcatcggcaacgtccttggaaccctggaaaccaacgacatgaccgcccaggaggcgctggacgaaattcaggcccagctggaggaagcggacctgctgtaagcgaatcttcttttccatacgcatggggaggcgcgcccgcaatgcgcctcccctttcttttgaaacgacaggaggagagcacatgcccgcctatcaggtgacgggaaacgaatacgtgtccctgccggccatccgtgaggatacgggggccgtccaggggctgacggtgttgcatatgggggccaaggggctgttggagctgtgcggcggcgacgcgccgctcattgcgcccgtggtgcgggtggcggggcaggaggccatgctcgcgaagctccgctggcggcgggaaaatgcctgggtgcctgtggcccagggcgaggcgcaggggctgaccgtgacgctgacctatctgtgccccctgggggagcgggccttctttgtgcgcctggaggcggaaaaccgacgggatgtgccgctggaggtgtggctgggcgtgcgtggacaatggacgcgcacgctgcacgaggtgaacgaaaccattgcgctggacggtcgacgcacgcaggaggccagcggatggaacaacgcctttgtgatgcaggaggtggcgggcctgccgctatgtgcctttgcgcccatcgcggaagcgggggtaaaatggacgtggggagatatggcctttgaggggggagacggggtttcccttgcgccgggcgggcacgcatgcgtggagctgatcttcggcgtgggcgtggagacggtggcggcggctacgtcggccaagcaccttttgcgcctgggctatgagcgctgcctgcgccagacgctgggatggcttaagaagcgcatgcttccggcgcaggacgctacggttgcgcgaatgatgaacgaaaatctgttcttttcattcttctttgccagcgggcgcacgctggacacggaggaactgtgcctgatgacttcgcgcagcccgcgctactatgtctcggcggcctactgggaccgcgacagcctgctgtggagctttccggcgattgtgctcacggatgcggcctacgcgcgggagattctcatgcacgtgttcacccggcaaatcctcaacgtaggccagcacagccgctacattgacggcacgctgctggaaccgggatttgagctggacgagctgtgtgcgccggtgctcgcgctggaaggctaccttgtgcgcacaggcgacccggcgctgcttcaggagccctgcgtgaaaagcggcctttttcgcatcctctcggtgctggaaaccaagcggcatcccgaaatcgaactgtatgagacctttttgcagcccactgatgacgagatcgtctatccctacctgacgtatgacaacgcgctggtatggcgcgtgcttctgctgctttcagaatggctggagcgcccggacctggcccgccgcgccggcggcgtaaaggcagccgtctaccgctattgtgtcagagaggggcagtttgtctggtccacggatctggaagggcactacgatatctacgatgagccgccgggcagcctgcagcttttgccccattacggcttctgcgccatggacgatcccgtgtggcaaagcaccgtacgcgccatccgttcggaggcgtacccgctgtccttcgcgggcaggcccatcgcggagatcggctgccgccacgcgccgcacccgtgggtgctgtccatctgcaacagcctgctttgcggccatgcggacacggcgctggcgcacctggcccgcacccgcatggacaacggcctggcctgcgaaagcgtcaacgaggacacgggcgaatgcgaaaccggcgcggctttcgccacctgcgcgggatttctggcctacgccctgtggagcgccgcgcgttgacagccggcgggaaacggggtatgatagccatggcggaaggaggaacgaaagatgaacattgcagtcgtcggcatcggatatgtgggactcgccatggcggtgctgctgtcgcagcggcaccatgtgaccgccgtggatatagacgccgcgagggtggacaagctgggccgccgccaggcgcccattcaggacgcggatatcgaggcgtatctctccgggcgcgagctggacctcaccgccacgcttgatgcggcggatgcctaccggcaggcggactgggtggtcatctccacaccgaccaactatgacccgcatctcaattatttcgacacttcctccgtcgagagtgtgatcgaggaggtgctggccgtcaatccccgcgcgtacatggccgttaaatccaccgtgccggtgggattcacccagcgcatgctggaaaagcatcccggcgcgcggctggtgttcagcccggaatttttgcgcgagggacatgccctcagcgacaacctccaccccagccgcatcatcgtgggcgcgccggaggagccggagctgtggcatgcgggcgaagtctttgcagcgctgctcaaggaagggtcgctggatccggatgcgcctgtgctcctcatgcgtcccaccgaggcggaggccgtcaagctcttcgccaatacctacctggccctgcgcgtgagcttttttaacgagctggacacctacgccgaggcacgcgggctggattcccgctccatcatcgacggcgtatgtctggacccccgcatcggccgtcattacaacaacccttccttcggatacggcggctactgcctgcccaaggataccaagcagctattggccaattacgatcaggtgcccaacaacatcatcggcgccatcgtggacgccaaccgtacccgaaaggactatattgccgaccgggtactggaactggcgggctatccggccaacccggacccgctggtgggcatctaccgcctgacgatgaaaagcggcagcgataacttccgccagtccagcattcagggcgtgatgaagcgcatcaaggcccatggcgtgcgggtggcggtgtacgagcctgcgctgaaggaggatacctttttcaacagccgcgtggagcgcgacttggcgcgcttcaagcgcgaatgcgacgtgatcgtggccaatcgctatgccgatgaactttccgacgtggcggaaaaggtctatacccgcgacctgtaccgagccgactgaccagctgcggcaaaagcccgaaggtgcgaaaccttcgggcttttgccgtcggtatgcgtcgttgacaggaggcaggaaaaacggtatgatatcgttggtttgatatgcacaccagacgtaaggaagggcctgccaatgaagctgattattcagattccctgctataacgaggcggaaacgctccgcgtggcgctggaccacctgccccggcacatcgacggggtggatgagatcgaaatcctgattatcaacgatggttccaccgaccgcacggtggaggtcgcccgcgaatggggcgttcagcatatcgtatcctttaagcagaaccggggccttgcgcgcgggttcatggccggcatcgacgcctgcctgcacctgggagccgatatcatcgtcaatactgacgccgacgaccagtaccggggcgaggatatcgagcgtctggtgcggcctattctggaaaagaaggccgatatcgtcatcggcgagcgccccatcgacgagacggagcacttctccaaaaagaaaaagatgtttcagcacctgggcagctgggtggtgcgcgtggcctccaataccgagattcccgacgcgcccagcgggttccgcgcctacagccgtgagggcgcgctgcgcctcaacgtggtcaacgattattcctacacgctggagaccatcatccaggcgggctggaaccgcattcccatgaccagcgtgcccgtgcgcaccaatccggagctgcgtccctcgcgcctgttcaagagcatgtggcgctatatgaagcgctcctcgtcggtgatcctgcgggcttttgccatgtataagccgcttcggttcttcggcatcatcggcggggtgttcttcgggctgggcgtgctgctgggcgtcaggttcctcatcatctttttcagcacagggtccggcagcgggcacatccagtccctcatcctgtgcgccgcgcttttgatgatcggcgtgcaggtgatcgtcgccggcgtgcaggccgacctgatcagcgataaccgaaagctcctggaggacgtgcagtaccgcgtgcgcaagatggagatcgaccgcgcgggggaggaaaacaagcaatgaaggccatgatctgctttacccacccggcctgggtgcaccagttccatcatatcatctggcgcatgcgcgagcgcggcgacgaggtgctgtgctttgtggccgaaaaggacggcaattccacacttctggagcgctacggcattccctatgtgcgctgtgccaaatccaccggcaaaaaccccgtggaaaaggcgctgctgtttttgaagctgtccgcccagttttccctggcggcgctcaagtggaagccggatatcatgatcggcagggccgcgcccatgctggcggtggctgcgtgggtaagcggaaagccgcaccttatttatgaggatactgaggtgagcaggttcgcgctgcgcatctgcaagcgtctgtccaccaagatcctgacgccgcggacgtttttgaccgacctggggccccgtcaggagcggctggatacctacaaggagctgttttacctgcacccctccgtgttcacgccggataagcaggtgctccgcgactgcggcttcaacccggacgaaaagtatattctggtgcgcttcgtggcctggaacgcaagccacgacatcggcaagcacggcctggacgacgagggcaagatccggctggtgaagcggctggagcgctatggccgcgtatatgtgagcgccgagggcgacgtgccggaggaactccggcccaggctgctcaaaaccccctatgagctgattcatcatgtgctggcgtttgcacagctggtgttcagcgaaggcgcgaccatggccagcgaggcggcggtgctgggcacgcacgccctgtatgtcaataccattgtatccggcagcacgcgcgagcagagcgagcgcttccatctgatggactgcttcaacgagggagaggaccgctacgagcgggccgccgcgcgggccgaggagctgctggccacgccgggcctcaaggaaatcgggctggaaaagcagaagaagctcctgagtgaaaaggtggatatcaacggctattacatggccgagatggacaggctggccaaggcagggaggaagggctgatgacgtggcttgacatcggcaatggctggcgcaacctgtttctgctctcctgcgggcttcaggcggcggcgctgggcctgtggttctgcctgcggggctggttcagcccccggcatcgggtggcctgctttctcacgggtgtggccgccacgcccctgtgccagtatctgtggatgctgctgctggcgctggtgtggccccaggccccaaggtgggtctgtatcggtgtgccgccggtgctggcggcggcaggccttgcatggatggggctcagccgccttactcggctgcgggcctttttgcgcggaggcgcgcccgtgcatgccgccgcacagcggctgcgggcctttttgcgcatggatcgggccacggtggccgcggcgtgctttgcggcttgcgtggtcattttgcttgcgccggtgtgcgtgcgctacatgtccagcatggagagcgtgcgcgggggcgacgcgggcgaatacctggccctggcccagcgctactgtgaggaccgcgacctgggaaacctcctggaaaaggacgacaccaccggccattttcgcggccacagccatttcccctcgctggaactgtacatgagctacggcctgttccataccggcggtcaggtgggctaccccaacgacaaggctgtctttaccgggctggggctgaacaccttctacgtggcggcggcctatctggcgctgctgatcgtggcgtgccgggggcgcaggcgctgggtgttgctgggcgtggtgctgtttaacctggtgccggatctgttcttctccgtggaaagcgcgcccagggacatctggcgcattctggcgcttctgtgggcgatgctgttttttgccgggcttgagccgcagggttcgcgccggtcctatctgggcaagctggtactgagctttgccgtgtgctttacggtgatgagcacgcatgtggtgtgcttcgtggtcctgcccttcattgtggcagcctgggtgatctggcggtggctggaagcccgcatgacggagctcaagggcgcggcgggcgtgctgctgcgctcggtggggctggcgctgtcgggcgcggcgggcacgctgctggcgttttcgggcaacctgtggtgctacttcaaatggggagagatgtcgccctggcggctgatgaccacctataccgacgccccgtggtacgatatgtacatggacatcgagtacaaactggaggaaaccaccacccacctccatttctttgaggccaaggattccattttgcagtcctacgccacgccggtgggggaatgggggcttcggctggcgctgattacgctggtgtgcgtgatcgcgtatgccatggtcagccgggtcaggatgcgccgcagggcgcagctggaacagtcggacggtcccagcgccgtgctcaaccattcggagggcgcggcggtcgcttccacggccgggctgtgggcgctgtacacgctgctgaccctcgcgcccatgacggggctgctggacagcccgctgtacagcttctccggttcgtttctcaagctgccgcgctatacgatacaatggtttctgctggcctgcggcatgatctgcggcgcgctttcggcgctggagacgctctggccgccgctcgtggaccgcatgcagcgcgcgctgagtacccgcatgaagtcgctgcggcaggccgccgcctccatacgtccggccctgctcaaactgcccgcctgcctgtgcgtgctcctgtgcctgctgggcgtggtcaagggcaccaaccagaccggctacaccaataccttttaccgctacagccgcgacgtgatggagagcgagcgcattttgctggacaacggcttccgcgagcgctacggcatgctcatggcggtcgcggagcatgtgaaagaggatcagaagatcctgattacaagggtcggctatcagtacccgctcagggggcgcggctacgtgcttacgaccaatcccatcgtgccgctgatgaacctgccactggaggaggtgggggaggagctggcgaaaatgaacgtagccatgctggcaaccgaacccgatttctgggacgaacggtactatccgctgtcaacgctggcagactatctggaggcgctgccggcagaccagattgtggaaaccgaggatatgcgcctctatctgctggaccgctcgctcatcccctatgcccttgcggcaaaggattgacgcgcgctccggcccgtgctatgatggaccgtattcccatggacctttttgaaggagggacgatatgaactgtcccaagtgcggaaccccgatcccgcagggcgcggcgttttgccccgtctgcaacgagcctctttccgcctatgtccagccgggttacatgccgggttatgcccagggcatgccccagggatatccgccgccgggtcccggcgtgggtgtgcaaccgcccatgagcggggcgcagggcatgcagccgccgcccgcggcacagcagccgtatatgggcgcgcagcagcagccctatccgcagcagcagaacctctaccggcagtcctatgcgcagtatcagcagggaacctatccgccgggattccagcagccctacagctacggccagcccgccgcgcgggaggccaatccgctgcttacggccctcagtgcgctgccgcgtacctttctggacagctttacgcggccccaggaggtgctgcgcggcatgctggaaaagcgggatctgctcacaggccccatcgtggcgggactgacgctgctgctcacattcctgtgcggcatggtggtgatgcgcagctttgtgggcgtgctgctttcggccatttcggccctgaccggggtcagcctggccagcgatgccgcctccatgaatcagggcatcagctatatcgccgggcgcatcgctccgtcggtgggcggggcggcggtgctgtgccagctcatcggcatggcggtgccggctctggtgtttctggtttacctttgcggggtcgccaaggtgcatttttcctgggagctgctgctgggttttgtggcggtgaccacgctgcccacggcggcggtggcgctgctggcgatggtgctgtcattgctgtccccctggctggcgctgctggtggcgctgtgcggcatggcggtgagctatacgcaggcgtgcggcctgttaagcgccgtcacgggacggtcggacgcacagctgctgtcggtcaaaatgctgctggtggccctggccctggcgctgacgctgattgtgggcggccttgtgggcggccttttgatgcgcggcgttacgcagcgcgtgatggtgctgctcaatagtgtggggtccttgatttgaagaaggaatggatgaagcggcgcttcgtgcgaatcgggctggcggccggcgctctggtggctgtggtgctggcggcgctgtggctgtgcggggtttttgcgcccgccgtggagctgccatcgccctcccaggcgctgatcgaagcgcgggatgggctggacgcggtgctgatcgaggcgtctttgaacacggaggcatcggagctgaccgtttcgcagacgcttacgctgaaaaaccgcaccggccaggcgcaggaggcggcggtgctgcgcacgtggcccaacgcgttccaaagcccggatacctcgcccgccgcggctgaggaagcgctgtatgaaggctgctatccggacggcttttccatcggggcgctggtgatgagcggcgcgagggtcgcccgcgtcggcggggaatccaaggcggtggcctatcgctataccgatgatgcaaagactgtgctctccgtcccaataaccgatggctggcaggcggaggagtggatcgaaatcaccctgacctatacggtgcagatcccgcatatggcgtaccgcttcggtgaggacagcggcatctgggcgctgggaaacgcctttgccattcccgccgtgtgggaagagggagcctggcgcacggatgaatacgctcccgtcggcgatcccttcctgagcgactgcatgaactggaccgtaagcgtatctgtgccggagggctttttgtgcgccgggagcgggtatcccacggcggagacggcggacggacgcacccgctatgactttgtttcccctgccatgcgggatttcgcgctggtggtgagcgaccgttttcacaccgcgcaggcagagcaggacggcgtgctcgtcagcgcctacgccaccgacgcgtcccgcgcgcgcgagctgctggactatggaaagcaggcgctggcgtgcttctcagcacgatatggcgcgtatccctaccagagctatacgctttgcgagatcaacttccccatgggcggcatggaataccccgccatggcgatgatcgccgccgacctgctggacgcggggggcgagtcgctggaaaccgttgtggcacacgaggtggcgcatcagtggtggtacgccgtagtgggcagcgacccggtcaaccaggcctggcaggatgaggcgctgagccagttcagcatgctggaatacctggaggaccgccatggccttgcgcggcgcgaagagtacgagcagcgggagctggagagcgcgctgcgcgtcacggtgccgcggggcgttacgccgggtgcgccgctggaccggttttccagcatgtccgaatatgccttggtggtctatgatcgtggagccgcgatgttttgtgccctggaccgcatgctcgacagcggactggatggttttcttcgggcctactacgaacgttatgcctttgggcgcgccacgcgcgagaattttgaaagcctgctggcggaaacgaccggcgaggacctgacccctttgatacgcgattacctggatacctatatcctgaattgacacaggcgattcacgaaaggaatgaacgaatcaatggcacagacctgcgcagggcgcacggccgtggtcatccccgcctacaagccggatgaccgcctgcccccctatgtacaagcgctgaaggacgctggcatcggcagaatcgtcgtcgtggacgatggcagcggtcaggactaccaacggttctttgatcaaattccccgggacggggtgagccatgtcatcagctaccagcccaactgtggcaaaggagtggcgctcaagcgcggtatggcctggcttatggacaacagccccgatcaggacatcatcgtgacggccgacagcgatggacagcacaccgtggaggatgtgctgcgcatggcccaggacctggcgcgcgacccctccgggctgctcctgggcagccgggacttttcccaggagcatgtgcctcccaagagccggatgggcaaccgcatcacctcggtggtgttcaagctgctctacggatgctgggtgggcgatacgcagacgggcctgcgcggcttccaccgcgatctgctgcccgccatgatcgctgtgcccggtgatcgctatgagtatgaaatgaacgtgctcatcgagtgcgcagccatgaaggtgcccatgcgccccctgcccatcgaaaccgtgtatgaaaacaacaatgagggaagccatttccgcgccttccgtgacagcgcgcgcatctatcgcgtgatcttcagcggcttcttccggtttgtgggcacgtcgatggtcagctttttggtcgactatggcctctatctgttgtttaacaacctgatcaaatacttcggcacctccctggaccaggaagtcggcgtgctgttcattcgggtggtgccccatatcctgatcgccaccgtggccgcgcgcctgttgtcgggggttaccaatttctttttgaaccgcaacttcgtttttaccgataagggcaaggtgagccaggcgttcctgcgctatctgggcgtgtttttcctggtgatgctgctctccgctttgctgaccagcagcctgcatctgtggctgggctggagcgataacaccgccaagattccggtggacatcgtgctgttttttgtcagctaccacctgcagcgccgctgggtatttcaaaaaaagcccgcgaaggcgggctcaggctgctgacaaagtgtggggtgcagggggatcatcccccctgccggggtttggggc

SEQ ID NO: 2368 - DNA, 8144 bp, Unknown
  16S sequences of unknown bacteria
cgctcactgaccagtgcatcatagacatctgcaatggatacaacctgtgctgaaatcggtatctcatcacccttcagtccatccggatagccactcccgtcatagcgttcatgatgccagcggcagatctgtatcgcgatcctgacaagtacctcatcctgataggcgtccagactttcaagcatcgaagccccgatcagcgtatgtgacttcatgatctcaaattcttccgctgtcagcttcccgggcttattcaggattttctcatcaatgccgatctttccgatgtcgtgcagcgcagatgccagcgcgatcaggtactgctctgaccaggacagatgatactttccggtcttctgcacgagacgggcgagcagcatttccgtgagcacattgatatggcgcacatgcaagccgctctcaccgtttcggaactctacgatctggctcaggatcccgaccatgagccggctgttcttttccttttcatagatctgatccgtgacaagcgagatcagccgacgctgctttgcataaagcttgatcgtattaagcacacgctgaaatacgaccttggaatcaaacggcctgctgatatagtctgatacgccaagctcataggcccgccggatattttcctccgaatcctcactggaaatcatgataaccggaatatcctcaatcatatgtgtctgtgccatatgtgtgagcacctcaaacccatccttgaccggcatgacaatgtccagcagcaccagcgcgatacccggattctgctgcagcaccagcagtgcttcttcaccgttcgtcgcctcaaggatataaaaatcctcctcaagcattgtcgccagaatctcccggttcagctcagaatcatccacgatgagcacctgctgcttgatccgttcccgatccttcaaaggatatgccttcccgtcctttccgataccgctgctctctgtgacgaccatatttttctgattcttcgcctgatacatgagcttatccgcccgtgtgactgccgcctctactgtactgcctgcagagagcacgcctccgatactcaccgagagctgcagccttgtgtagcccggcacatccgctttgtggaccttattatgaatctgctgcagtctgcgtgtaaaattctcttcattgatacccgggagcacgagcagaaactcatcaccgccgtagcgaatgagcatgtctgtcttccgaatgcatttacggatctcggtcgccaccgtgaccagtgcgatatcgccggtattgtgaccataggtatcattatagagcttaaaatcatccaggtcaatcatcgcgatcccggtcgggtctgtgcggtgcttgacttcatcctcataataacggcggttgtatgcaccggtcagggcatccagatagagcttctccttgtagctgctcagcttgtcgagcagctgctcccgatcatgcgcatcacccagtacatccttatccattctcttaatcagctccatgacgcagggttcaccatcaatgactacgtatctggcagtcacctgataaatttccgaatccagaaattccagcttggagcactgagccttctcttgaaatgcccgaagggatacacaattgccgcatgcctctccgcgtttccagaagtcatagcatctgcacggactcacatcaagctccttcgccttaccttcggcaagcagctgaagctgttccagccctataatgcgtacgaccgaaaatatcttttgaaactgctgcatttcctcctctgcctgctctctggtcatacaataatcatccattgatgttttcccccgtgtatgttacctgtattctaaacatatcatatgttgtatagtcaaacaaaaaacttccatacaccactgttcttctgtagtatacggaagtaagtttatttaaatataatcaaaacacagtctgttgtcaactattctgactgtattttccatgcattttgtatacgcacatgaaatgaacattcgcagctgcattcacaaaataaactccgacatcacataattactgaggctcacaccctgcctcgtcagtcggatgcttccgttatcgcgtatgagaagcccttccttcaaaagccgtggcagcacagacccgtacaccgcttccacgctctgtccgaagcgtcttgcaaactcctgttcccgaactccctgcatcatgcgaagcccgagaaacataaactcttccatctcatcctgtaccgtcagcgcctcctgactgcacacctgccctgccgcttccgcggtgcctgtgccatatgccagcagatagcactgcatatcctctgtattcttgtaccggacgtgagaaatcagagaggaagccccaagtccaaagcccgcatactccacgccggtccagtagccaatgttgtgaagacatgcaaagccaggctttgcataattggatatctcatatcggtacagcccggcttcagaaagcagcagctccgtatcctcatacatctcccgctcctcttcctccgatggcaaatactgcggacattctccttttgcacggcgttcatcatccgcatgatatttttcataaaagggagtctgttcttcaataatcaggctgtaggcggaaatatgctccggctgcagtgccagtaccctgttcagcgtctccctccacgattccggagtctgccccggcagtgccgacatcagatcgatgttgacattggaaaagcctgcctgccgcgccgccgcataagtctcacaaaaggtctcaaagctgtgaatccgtccgagcaaacggagctcacggtcatctgtcgactgcagcccaaagctgatccggttgatcccaaggctgcgatacgcgacaagctttgagacatctgccgtccccggattgcattcaatcgtgatctccggctcatttacaaaggaaaacgtatcatgcagcgccacaagcaccatttcgatccagtcagacggccagatcgacggggtaccacccccgaaaaagacagagacgacctcatactcttcttttcgcggaaaactccggatctcccgcagcagcgccagcaagtactgcctttgcgcttccgtcgacgccggagccgaaagaaaatcacagtatgcacattttttcacacaaaacggaatgtggatgtaaatctccagatttttcataccgactcctctcatctgcccccgactggatttttatgtggtaccgttatttgcagcatgatgtgctgacgcacggcaaagatatctgacgcaggacttcacgctatgatggactggattgtttgcagtaatttatgaaattgctataggtccgcgctccagaatcttccgaatcttcagtacaaacagggctgtacacgttataactgaaattatatctgccatacattctgcaaaataaatgctatatacattgctcgtcacaagcggaaagatcagtgcaaacggcacaagcaaaatgacctttcgcagcatcgctacaaacagagaaatttttgcctgccccagtcctataaatgtcgtctggcaccccatctgaatgccaaagagcagcattccggcaaggaataccggtgccacccgtccgacgagggcgattagctcctcatcctgcgtgaacatccgcgcgagcgcttccgggaaaagtatttccagaagcgtgatcacaaaggagaacgccgccgtaattccgatgattctgcggtagcccgctttcacacgttctaaattccccgcgccgaaattgtagctcaggatcggctgaactccctgtgtaaagccgttgatcggcgcactcgtcagctgcatgatactctgcaggatcgtcagagaaccgacatacaggtcgccgccgtagcgctgcaggccgctgctcatcacgatcgaaatcaggctctccgtactctgcatgataaacggcgccatgccaagtgacaggatcgccccgatctgatggaaatccggtctcaggcaggcacacttcagccgcagggatgtctttttcgatgtcataaagcgcagtacccagatggctcccgccagctgtgaaagtatcgttgccagtgccgcacccttaacccccatatggaacacaaagataaagatcggatccagaacgatattcagagcggccccgatgagcaccgagcccatcgctgtctttgactgtccctgcgcagtgataaacggattcagtccgagcacgatctgcacacagatcgttccgatcagataaatgctcagatactcgctcgcatacgggtaggtcgcatcactcgccccgaccaaatacagaaacggtttctgcgccgcataaaatacaagcatgataatcgccgaaaaaacgcacagcagcgtaaagacatttccggtaatccgttctgccttttcccggtcgccctgtcccagcgcgatcgctgccagcggcgccccgcccgctcctgccagcgcgctgaaggccgagacgatcgtgatcgccggaagcgccagtcccagtccggtcagagcctctcttccgacgccctgcccgatatacacccggtcgacgatattgtaaagcagattgatcatctgagccacgagcgtcgggatccccatcgagagcatcaacgagccaagcgattcagtccccagcttttcttctgtatggttcatatcactcctcttttctgccttacttgtaatccagcttgagcacgctcataaatgctttctgaggaatctcgacattgccgacctgacgcatccgctttttgccttccttctgcttctcgagcagcttcttctttctggaaatatcaccgccgtagcactttgcaagcacgtccttgcgcatcgcacgcacggtctcacgtgcaatgaccttgctgccgatcgccgcctgaatcggaatctcaaagagctgtctcggaatctcctccttcagcttttcacacatcctgcgacctctttcataggccgtatctgcaaacacgataaaggaaagtgcgtctacctcttctttatttacaagaatatcgagcttcaccagatccgagcgcatatagcccttcatctcataatcaaaggacgcatagcctctggaacgggactttaaggcatcgaaaaagtcataaatgatctcatttagcggaagcgtatacttcagcagtgcacgggtcccctcgatatactccatcccctcatagatgccgcggcgctcctgacagagctccataatcgcaccgatatactccgtcgtcaccatgacctccgctgcgacaatcggctcttccatatattcgatttccgacggatctggcaggttcgacgggttcgtcagctcgatcagctcgccatttgtcttataaaccttgtagacaacgcctggcgcagtcgtcacgagatccagattgtattcacgctccagacgctcctggatgatctccagatgcaaaaggccaaggaagccgcaccggaaaccaaagccgagtgcgatcgatgtctccggctcgaactgcagtgcagcgtcattgagctgcagcttttccagggcatcccgcagatccggatactttgccccgtccgccggatacagtccgcagtataccatcgggtttaccttcttgtagcccggaagtgcttcggcacacgggcgcgccacttctgtcaccgtatcgccgacacgcgtctcccgcacatttttcaggctcgccgtcagatagcctaccataccggcagatagctcctcgcacggaatgaactgacctgcgccaaaaaagccgacctctacgacatccgcctctgcgccggtcgccatcatccggatccgcgtccccttgcggacgcttccgtccttgatacgcatgaatatgataacacccttataggaatcatacacagagtcaaaaatgagcgcctttaacggagcagccggatcaccggtcggagccgggatcttctttacaacctgctccagcacatcatggacattcagccctgtctttgctgaaatccgcggcgcatcttctgcctcaatgccgatgacatcctcaatctcatgtacgacacggtccggctccgcgctcggcaggtcgattttattgatgaccggcatgacgtccagatcgtggtccagcgccagatagacattggccagtgtctgtgcttcaatgccctgtgccgcatccacgacgagaatcgcaccgtcgcaggccgcaaggctgcgggacacctcgtagttgaaatccacatgtcccggtgtatcgatcaggttgaatgtgtattcttccccgtcatctgccctataaatcgtgcggactgcctgcgatttgatcgtgatgccacgctcccgctccagctccatattgtcaagcacctgctcctgcatctcccggctggtcagaagccctgtcatctcaatgatgcggtctgccagcgttgattttccgtggtcgatgtgtgcaataatgcaaaaatttctgattttactctgatctgctgccacttaagttcctccttgcagtattgatagcgatccgggagcccgcatcgctttttctgtctatattttttctgtctatatccggtacagtttagcacattttttcccgttttgtccatagcaaggacaggctgcggaaaaattttcagttcagcacttcatgcagcagatctgccagcggctgcatcgcatttttttcctcctccacggtgttcagctgtgtcccggcctccacgagcagtgagcgcggacgcagatgcagattgaagcgctcggccttcaggtaaatatttcgcgtatagcccggatatttctcgcgcgctgcgagctccagctgcagagaaaatgcaagattctgctgcgtatacggattcgccagataggcgatgggctcatcctggctgttacgggagattccgttaaagaacataatcatcgatgtcggctttccgtcaatctctgtcacaaatttctgtccgtccaccccatcccggtgcaagtcaatgatgacctcgatcgtcggatattcctgcaggatattctccaccgccacacgcgcatagtcgtaagctgcactccgatccgacacaccgtcgatgagatcataaacacccgtgtcgtgaataacctgatagccgtagccccgtaatgcttctgccagcacctctcccatccccacaatcgatgtctccgtatcgcccggcaccgaatcgacgaattcctcctgcgaatgggtatgataaatcaggatctgcggcacctgcggatttttccggatactcagatcctccgtcagaagcttcgacgcatccagaagctcggcatccgccgtcgtgccggcatctaccgtaaaatactggttcagaagataatcatagtcggaaagctgctgcagcagatcgggtgagaccgcagtgcttacagcttccctggcggacttatcctcctgtatcgttttttgcccttcaccggctgcttcccccggcgccgtctcctgcggaagctccgtctcctctgaatgctccgcctcctctgaatactccggctcctctgaatactccggctcttctgaatgctccgtctcctctgaatgctccggctcctctgatgctgcctgccgctcttccacagacgcatctgtcccggtctctcccttctcctgcatagtctgagacgccacatacccatacaccggcagcgtcggctctagcagccacgccatccagttcaccgtccatccctgcactgctgccgtatagccgggcatcagcgtccgtatcaccatatcctccagcctgcgctttgcctcctgccttgccatcgcctcctgcacggcgggccggtcaagaacaaatccccctccctttccaagaatatatgtgccaagcaacgccataacccaatacagcagacgctgcatccgccgccttttccgcgtaatcccaccccctgtctgcatgtttcttccgggctctttaccaaatcagacaggctctgcaaggccctttggcgccctgcaaagcctgtccgatttatcatagaggtcaaaaggtattagggcccctatgatacacggattgcttcgcatttcatgctctcgcaatcctaaaacacctcaaatccgctcattt

SEQ ID NO: 2369 - DNA, 10653 bp, Unknown
  16S sequences of unknown bacteria
gctcttcccagcaggcgtatccttccgcctggccttcatggaggaatacttgcacacgcatgccgcagcaagcctgataaggcagccagaagtcctgataataggtcaggtcgcggatgcggaaaccgtcgtggccacgcatcatcgtttcatagagggagaggcatgccgctgcatcagcgtctgtccagcttccttcttcgggcgggagcgccgccttgtccaggacgacgcgcttcatgaaatgactcttggcgaagccgaagggcacatacagatcccagtcataggcctgcaggatccagcgcgcatcggcgaattcctgaaagacgtgatcgagcagccgtttcatgtatccgcagcggcggtattcccggcggacggccaccccttccaggaagcggaaggagacggccattcagggagagctgccattgcgggaacatgcacatggcgatgatctgatccccgctgcgcagcacgcggcagtcctgcgggtggtacatgcggctgaagtaaaacgcagcgctctttggcgtctcttctgcgaagctgtcgagccacagcgcgttcagctggtctttctcttctggtttgggcgcggtgatctcccaactgcggaagacagcggtatatttctgtgcgatgcggatcggatgcatgtcgcgcttggccttgatcagcgaaggcaggcccatgtcatcctcgcggttgatcagcgtcactgccggatcggcgatctccagatagtttttcaagatggcgacatacagcccgcggatattgcggtcagccttttccacatggatgtccagcatgtatggggtagtgtgagaaacgatggagaaggccttcatgcggccgtcgatggtgatgaccccgccatccagggaaagctcttcggcatgctccagcaaaaagcggatgccttgttcttcttcctggatgccgaagatgtcatcatgactgtcctgccattcgctcagcagcgagaagatatcgttgaaatcatccctgctcagccggtgaaatgcccatctgccctcatattccttcaaaaaggcattgtaatggttgcggcgcttctgcatcttctttcctttcagcgtctcttgctgggtgcgggaatagatgtagtccttgccatcccacctgatgtcgaatacgacctgatcctggaaatgctcggccagccagtcgcgccattcgcggctcaggcaggacatgcgcgcagggatgccgtgctggcggccatatgccagcatggcgctgacggcttccatgcggtattcctctgcgcagaatggcatgtaccagtaagtctcatcttctgcttcgatgtgaaagcagacgagcgcaaaatgcgcatgcacttcgaaatagaacggataggggtactgccacatcagcatcgtgacgacgttggcgttgcagtcttcatatccggccagcgctatccagggctgcagctcatgcatattgttgatcgtgagttttttcatagttaccttccttgtcgttttccttattatatccgctgctggccggatgacaagcgttctgcccgcgcagtgtcaaatgccggggagatgagcgtgcggacaaaggcggccaagtggtcggcgctgtccggcatgccctcgttcatccatttttccagtatggcgatgcatccggaggagacaaaggtgtagtaataatcgagcatgtgaggatcggcgtgggggaagaggctcagctgcgagttcaggcaggcctgcttgcctagctcgatgagccggtagagcagcttcttgtcgctgtgcgggcccagggtgaccaggcacaggtcggcgtgttcccggatatagctgaagatgcgggtgatcgtctccaccagatcataggggtcctgatcttcgagcagcgggcgcaggatcgccttgaattcatcgaacatgctctgctcgatctgttccatcaggtcatagatatcgtcgtaatgggcgtaaaaggttccgcggttgatggatgctttttcgcacagctcgcggacggtgatgtgctgaagcggcttttcgcgaagcaggttcagcagcgccgtgcggatcatctgacgggtgatgcgcacccgtccgtcttcttttttcatctctgtatcctcctgttgaacaaaatgatcaaatgtgttgatttgcatgacattctcatcagatgtgatgattgaatccctgtctgattcttattataatacagatgggagttaatgaacactgtgtttggtatctgaacgagtgttgaatggagtgagacagatgagtgcatacattgagtttcaggatgtaaaaaaggtgtataagatgggagaagtctccatcgaggcactggcaggcgtgagcttttccatcgatcagggagagttcgtcgtgatcgccggcgccagcggagcggggaaaagcacgattctgaatattctgggcggtatggattccgcgagcagcggcacgatcatcgtggatggcaagcgggtcagtgactacaatgccagacagctgacgacctaccgccgttatgacatcggcttcgtgttccagttctacaatctggtgcagaatctgacggtcagggaaaatgtcgagctggcgacgcagatctgcaaggatcctttggatatcgatgagacgatcgaggcggtcggcctggcggatcgctcccgcaactttccggcgcagctttccggcggtgagcagcagcgtgtggcgatcgcgcgtgcgctggccaagaacccgaagctgctgctgtgcgatgagccgaccggcgcattggattatcagaccggaaagcagatcctcaagctgctgcaggacacatgccgccagcgcggggtgagcgtcatcgtcatcacgcataatctggcgctgacagcgatgggcgacaaggtcatcaaggtgcgcagcggacgcatcgaaagcgtcgagatcaatgaacatccgctgccggtggaaaggatcgaatactgatgcacagcgcgctctggaaggatacgctgcgggagatccgcaagagcttcgggcgctttctctccatcctgctgatcgtcgccctgggcgtggctttcttcgccggcgtgaaagccagcgtcccggacatgaaatatacggctgacgcgtattttgacgaatataatctgcaggatatccagctgttttccacggtcgggttcaccgatgaggatgtagagaagatccgggacatcgagggcgtcctcggtgtgcacgcgacctattcgatggacgcggtgacggtcaaggacacgcggcagatcacgctgaaggtgctgagcatgccgtcggccgatcctgatcgagatgatccggattatatcaaccaggtgcgcctggccagcggaaggatgccgcaaaagagcggcgagtgtctgctggaagaagaaaagatgatggaaagtgatctggaggtcggagataccatcaccttggctactgggacagatgatgatatcgaagactatctgaagacagatacgtttacgatcgtgggcacgatgtatactccggtctatctctcttatgagaaggggagcacgacggtgggcagcggatctatcgacaatttcatcacgatcctcgatgaggatttcaacatggattattatacgcaggtcaatctgacggtggagggggcaaaagcgctcaattcctatgaggatgcgtatttcgatgtgaccgatccggtcaagaaccgcttggaaagcctggggctggaacgggcggacctgcgcctggaggatatccgggaacaagcccagcaggcgtatgatgaaggcgaacaggaatatcaggatgcacaagcgcagttcgatcagcagatcagcgacgctgaggaccagctgaatgatgcggaaaacgagctgatcgtgaatcaggccacgctcaattcctccaggctgtatgccgagcaggagactgccgcggcccagacgcagatcgcttcgctggaaagcatgctgagcagcgcgaagacgcgggtcgatgcgctgaaggatcagctgaagagccagaacagccagatccaggaccagttggatcagctcgaggaaaaccgcgatgagtatgaagccatcgtagcggaaaacgatgcccgcatcgaagagctggaagaggagctggaatatgcgtcggaaagcgaacggccggccatcgaggcagagatcgagatgcgcaaggcggccagcgaaacggcccgccgcatggcgcagcagatgcaaagcagcatcgatgcgctgcaggcacagctgcagacgctcaacgatcagatcgatgaagcggcagcttatatgaatgagctgcaggggatgatcgatgagcagaaggcgcagctagaggctgcgcagcaagccagcgaacaggagctggcgcagggcgagcagcagatcgcggatggctgggcccagctggcgcagggaaagatcgagctggagcggcagcgcgagctgggcgaggaagagctcggcttagcgaaggacaggctggacaaggcaaaggcgcagatcgaagccatcgatgatccgcaatggatcgtgcttgaccgcaattcgcagtattcgtatatggattatggcagcgtcgcagaccgcatggaaggcattgcccgcgtcttcccggtattcttcttcctggtcgccgcgctcgtctgtctgacgacgatgacgcgcatggtcgatgagcagcgcggcaacatcggcacgatgaaggcgctcggctacagcaaaggcgccatcgcgatgaaatatctgatgtatgccttcatcgccggcatattcggctctatcctgggctgttcgctgggcatgtatatcttccccagcgtcatcttcaacgcatggaacctcatgtataatctgcctgaactgaagttcgtgctgcagccagggctcatgctgctggccagcggcctggtcatcggcgtgacgatgctggcggcattcgccgcggtatacaaagagctgatggaagtgccgagccagctgatgcgcccgagggcaccgaagatcggcaagaagatcctgcttgagcgggtcccgctgctatggtcgcatttctcattcagctggaaagtgaccgcacggaatatcttccgatacaagaagcgcttcttcatgaccgtgatcggcatcgcgggctgcagtgccttgctcgtggcaggcttcggcattcaggacagcatctcagatatcgtcaccaagcagtatgaggagatcttcaatttcgacgcggccgtcacgttcgatactgatgcgaccgttgccgagaaggctgacgccctgcagcgtctgcaagacaatgccgaggtcgaagaagccatcggcatcggacaaaacgccgtcacggtcagcgatgatggagaagacagttcggtcacggtcgtcgtgccttctgatcttgatgatttcgcggacttcaccgcacttcgccaccgcggcgatacagaacagctttcgctgagtgacgacggtgcgctcatcacagagaagctggcgatgaaccttggtctttctgccggtgatacgctgaccatcaccgatggtgatggcatagagcgggaagtgaagatcgcggatgtggtggaaaactatgtcggtcattatttgtacatgtctccttcttattaccgaacggtctttgaggaacggcagacagataccgccgcgtatctgaagctgagcgaagcaggtctgcaggatgaatccgccctgggccagcagctgatgcaggacgagttcatctcttctgtctccttctattccggattggccgatacgttccaagatacgatctcatcactgagcttcgtcgtcgtcgtactggtcatcgccgccggcctgctcgccttcgtcgtcttatacaacctgacgaatgtgaacatctctgagcggatccgtgagatcgcgaccatcaaggtgctcggcttctatgatccggaggtcggctcatatgtgttccgcgagacgatctttctgaccatcatcggcgcgctggcgggactggtgctgggcatcggactgcacagtctgatcatgagcctggcagagatggaaagcgtcatgttcggccgaaacatcgactggatctctttcgtgatctccttcctgatcacgaagctcttctcctttgtggtcaacttgttcatgtaccgcaagctgaagaaggtgcagatggtcgagtcgctgaagtcagtggaataatgggatgaaaaaactttcagaaactctggaagttttttcttgttcgccatgcggttttcgcttataatgaaggcatggtgtgaagaaaaaaggggatgaaaccatgaatgaaggaaaattgatcctcccgcatgactatgagaataaactggattatgtctcgacggagatcgccatcaaatatgtgaaggatctgtttgaacgcaggctggcctatcatctgaacctgatgcgtgtatctgcgccgctgttcgtccgcaaggacagcgggctcaacgataacctcaacggcgtggagcgtccggtcactttcgatatccgggatatcgaaggcgatgtggagatcgtgcattcgctggccaaatggaagcgcatggcgctgaagcgctatggctttgaagtgaacaaaggcatctacacggatatgaacgccatccgtcgcgatgagatcgtcgacaacctgcattctgtctatgtcgaccagtgggactgggaaaagatcatcagtgcggaaaaccgcacgctggatcatctgcaggagaccgtgaagaagatcatgaaggcgctgaaggagacggaacagcagctgtgcaaggtgtttgagaatctggagccgttcatcaaggaagagatcacgttcatcacttcccaggaactggaggaccgctatccgcatctgacgccgaaggagcgggaatatgagtttaccaagctgcatggcagcgcctgcatcatgcagatcggcgataagctgaacagcggcatgccgcatgacggacgggcaccggactatgatgactgggcgctcaacggcgatatcttgatctattatccggtgatcgatcaggcggtggagatctccagcatgggcatccgcgtcgattcgatgtcgctgctctcccagctggagaagagcggatgcatggaccgcatcgcgctgcctttccacaaggcgctgcttgccggcgagctgccgctgacgatgggcgggggaatcgggcagtcccgcatctgtctgctgctgctgaacaaggcgcacatcggcgaggtgcaggccggcgcatggccgaccccgatgatcgaaaagtgccgcgcgcacaatatcatcctgctttgacgcttaagccttctttcgcgtgcgcataaacatatgtgcccggaagaaggcatttttgatcgcgtttccccgctgcggctgaacaaaagctccgtctcggccggaaattctaaaaaaacggtggtattcgacagataaatgagctataataaggacactgagtgtgcccgtagctcaattggatagagtaccagattccgattctggcggttgcaggttcgatccctgtcgggtgcgccatttttattttatccggaggacagcatgagaagaaaagaccgggaagtgagcgatctgcatcagcagctggagatcgtccggcgctgtgattcctgctgcatcgccatcaacgatccagatcaggatgcgccatatatcgtcgagctcagcttcgggctggagcatctggaagacaaggacatattgtatgtgcacagcgcaaaagaaggacggaagctggagctgcttgcgcaggatccgcatgtgagcttcttcatgagctgcggacatgaattggtgtatgacgcggaacggcagatgtgcaccatgaattatgagagcgtgagcggatatggcatcatgcgtctgctcagcgcgcaggaagccctgcacgggctcgatgtgttgatggaccattattatccgcatgaacgccgcccttatcacaaaaaggcggcggacagcacagcggtatacggtctggagatcctctccatgacggccaagaaaaggaaaaagaaatgatgaacgggtatttatttgatctggacggcacgctgatccagtccatgcatgtatgggaggatgcagtgatgcgtctgtttgacagactgaacctgaagatggacatcgacgaagcgagggacgcgttttcagctatgaaattcaccgaggtgctggaagcgctgatccagcattttcagctgcctatgagcgtaaaggaactgtatggcatggtgatcgatgatgtgcgtgagcaatatacctataccgtgcaggccgtggagggcgcggtagactatgtgaaaaaatgcgccgcggcaggcaagcggatgtgcgtggtgaccgccaatgacgtcccgttgaccgaagcggtcctgcgccgtctggggatcttgcaggatatggcgttcatcttgtcttctgaagaaagcggtctgacgaagcggacgccgcagatggcggaagaagcgatgcgccgcctgcagctgaagccgcaggaatgcgtcatgctggaggattcgttatactccatgaaatcggcaaaagcggcaggatgctatgtgatcgccatcgcctcgccagaggcgaaggactatgcccagatctatgagaccgccgatgaggtgcatgcggatctgcgcgatgtccctgtccgctgaaaacacggaagaacggttgacaaacgtcaagaaagccgttaaaattgcatcgtaatcagaggctgagaagggtgcagtagcgcatgcagaagcgcaaagagagtttccggaagctgagaaggagaccgcggagcatgaaggcgaacaaagagcccggagccgaaacgtgaagctcgcggcatatgagcggctgtctagcggcagtcactgagatgaaacggagcgatccgtctcatgaagtagggtggtaccacgatgatgctctctcgtccctatgcggatgagagtttttttatggaagaaaggaagaggaacatggcagaaaaactgactgaacaggaaaagatccgccgacagaagatggaagaactgcgtgaaaagggcatcgatccatttggacacgcctatgcgcgcacccatcgctccggagacatcagaagcgaatatggcgaatgcacgaaggaagagctggatgaacagaatgtcacggtccgcgtcgcaggccgcatcatgaccaagcgccgtcagggcaaggcaggcttcatgcacatccaggatgtggatggccgcatccagatctatgtgcgtaaggatgacatcggggaagacgcttatgagctcttcaagaagagcgacatcggagacatcgtcggcatcgagggcacgctcatgcgcacgaacaccggtgagctgtctgtacatgcgaaggtatatactcatctgaccaaggcgcttcgcccgctgccggagaaattccatggcctgcaggataaggaagagcgtttccgtcgccgctatgtcgatctgatcatgaatgaggaaagcaagcatattgccttgacccgtcctcggatcatccgtgccatccagcgttatctggacggcaagggactggtggaagtggagacgccggtgctgcagccgatcctgggcggagcggccgcacgcccgttcatcacgcatcacaatacgctgaacatgccattctatctgcgcatcgcgaccgaactgccgttgaagcggctgatcgtcggcggtctggaaggtgtgtacgagatcggccgtctgttccgtaatgaaggaatggacgctacacataatccggaattcaccaccgtggaagcatatgtcgcctactctgacctgcatggcatgatggatctgatcgagggactgcttgagtatgtggccatggaagtatgcggcaccacagaaatcgagtatcagggaaagcagatctcactgaaggcgccttaccgccgtctgcatatggtagacgccatcaaggaagcctgtggagttgatttctggaaagagatgagctacgaagaggcatgcgccatcgcgaaggaacacggcatcgaagtggaaaagaagcacaacagcgtcggccacatcatcaacctgttctttgagaaatatgtggaagagaccttgatccagccgacgtatctgtatggccatccggtatcgatctctccgctggccaagaagaacgccgatgacccgcgcttcgcagaccgctatgagctgttcatcaacggaaaggaatatgccaatgccttctctgagctgaatgatccgatcgatcagcgcgaacgcttcgaaaatcagctgaagctgcgtgatctgggagatgacgaagccaatgagatggatgtcgactatgtcgaggcgctggaatatggcctgccgccgaccggtggcgtcggcatgggcatcgaccgtctggtgatgctgctgaccaaccaggacaccatccgggaagtgctgttgttcccgacaatgaagaccctgaatgatgtaaataagaaaaatgatgtaaaatctaaggctactgaagaagtgaaagcagagcctgaaaagattgatttttctaaggtaaagattgagcctttgtttgaggaaatggt

SEQ ID NO: 2370 - DNA, 2936 bp, Unknown
  16S sequences of unknown bacteria
gtcctttgccgaaaacgccgcctacgacccgtccctaaacaaagagaagcttgatcattatgcgcagctctacgccagcgacctgcgcgatccgctggtctcccccctctttggggacctggcaggcctgccggagagcctgctctttgtcggcggcgatgaaattttgcgggacgacgctatccggcttcacgccgcgctggagcgcgccgggtgccgtagcacactgacgatcgccccggggatgtggcacgcgtatctgctctatcagctccaggaggcccagccggacctggacgccgccgccgcgtttatccggcgcatcgcgcaatgagccgcagcttcctgcggctggataacgccgccctgatcttccccgccatcaggcggcgggactggatcaatgtctttcgtcagtccgtcaccctgcaggaacccgtcgacccagaaattctacagcaggcggtggatgatctggccccccggttccgctccatgtatgtgcgcctgtgcaccggggtattctggtactatctcgagcaggccaagcagccgccccgggtgcagccggactacgcctatcccctgacgcatatgcccgccagcgccctgcgccgctgctgcttccgggtgctgtaccatcacaaccgcatcgccgtggaatttttccacgccctgaccgacggcaccggcgcgatggtctatctcaagacgctgaccgcccgctatatcacattgaaataccatgtcgccatcccgccagaggacggtgtcctggactggcggcagcccgcgcccccggaggagctggaggacagcttccagcgccataccggcgctaagcccctgagccgcaccgagcccaacgcctaccgcctccggggcaccccggagcccgacggcttcctgcacctgatctgcggcgtcgtctcgacccaggacctgctggacgccgcccaccgctatgacgtgacagtcacggcgttcctcgccgccgtcatggcccaggtcatcatcgatctgcagcaggccgagcggcggcggcccaagccggtgaagatcacgatccccgtcaacctccgcaagctcttcggcagccgcaccctgcggaacttcgccctgacgctgaaccctggcgtcgatccccgtctggggtccttcacgctagaggagctctgccgccaattctccctgcagattgcccaggaaacgaccccgcagctcatggctgcccgcatctgcgccaatgtaaagccccagcggtccatggtcctgcgctgtatgcctgtgcccatcaaaaacctggccatgcgcctggtctacgcccgggtcggtgagcgcaagggctgcctgaatatctcgaacctgggccgcatcaccctccccgccgcactgcagccctatatccagcggatggaatttatcatcggcgtccaggcgacgtaccccaacaactgctccgtcgccagctgcggcgatgtgacatgcatcaacatgatccggaatatccaggagccggagctggaacggcgctttttctcccgcctggtagagctggggatcccggtcaagattgagatcaaccaaatttaagattgtcaaaaactcgtttttgacaatctttcaaatgcgacccgctgcgctgggctcgcatttgaggggattgcaccctgctgcgcgcataatttctgtgccgaaggcacagaaattccacagcgctgcatgggttcgacttagccaaacgtgccgcgctacgcttgcgcgtttggagtctcacccaacttgcagggcgtaaagtgtttttcccgacgtatgcgctgcatgggttcgacttaaccaatcgcgctgcgttatgcttgcgcgcttggagtctcacccacttgccgccggaaaaaacggatttaaaatttatttgcgccgtgcgcggcgcaaactctgcgaggctttttttacaaggcttttttctaacccagcgggtggccgctggggattgaggtgatttatttatgtattgtgtcaaatgcggcgtccggttggatgacagtctggaccgctgccccctgtgcggtacgccggtctggcggcctgatgcgcagacgccggactcccccgccagctactcccggctctacccggtccgcaatcacgccgcccggatcgccgacgctgcggtgctgaccgtcctgctcgccatcgccgccctgatcagcctgatctactgtctgcgcaattacggcgcggcggcctggtccggctatgtgatgctgggcatcgccacggcttatgtcatcttcgtgctgcccctctggctgcggcacccgaatcccgtcgtcctcatccccatcgcccacgcggccatcgggggctatctgctctatatcagctgtcggacgggcggcggctggtttttatccttcgccttccctcttgtctgcctgtccgccctgctgctgacgggctgcaccgcgctgtttcgctatgtccgggggcggcggctgtatatcaccggcggcgcgctactggccatcggcggctttagtatgctgatggagtttttcgcccatctgaccttcggcacgccgatgttccactggtctctgtatgtcgtcagcggctgtggcctggcgggaatcttcttcgtcctgagcggctttatccgcccgctgcacgcctggatggagcgaaaattctttgtctgattttagtctgattcttgatctgtaggattttcacaaaaacccccaaaaaatgcgcaaaaccgcttgacaagcaccctagaatgcgctactatatagccaacctatcgagtaggtatctcaccaaaaaggagcgcaccgccatgacgaaccgtttcgcagcctgcatgagcgcccgcatgtgcatgcccatgggcatgggcacggcttgcgctgccctgcgtatgatgcagcggtgtt

SEQ ID NO: 2371 - DNA, 8058 bp, Unknown
  16S sequences of unknown bacteria
cctcgcgcctccagccgcttcgcggccttcgactgcgcacttcgtgtgctcgccacttcagcccttcgggcctccgatgttcgcaagctcactcgcggctctcctctgtgcccacaattcgcaatagtcgccttgccacgctaccgcttgcaagtctcccgcctctcagttcagcatggtcgtcccacaccttcgcaccgccctgcgctaacgcttgcgcggtgttccgcccctgcggacttcgcttcgctccgtgtcctcggggctccagccgcttcgcggcctccaacgctcgcaagctcgcttgcggaactccctgcttcattggggtcttcgtaccggcctgcgcttcgctggcccggtatttcggggcttcgaagggcttacttcgcgctgcttcgcgcacagcgcgcgcgcttcgtgcgcccccttgattccaaggggagccttttggttagtggcacaatcgtaagaagttgcccggccaaaagcctcctttttcccgaaggaaaaaggggcgcacgaaggccgccgccagtggcggaaacaggccgtagtcgtcgaagccccgaaggggtggaggggcgaggacagcgcgaagcgctccgcagccccggaataccgggccagcgaagcgcaggccggtacgaagaccccagtaaggcaaggaaagccgcgagtgagcttgcgaacgacgcggattgactatgccgcactgtggaacggtgtcacggcgcagccgtgacggagggattggaactttatagcacaatacgattggatggtttagaaaaagcaaatctgcaattttgagcggaacattggttttatgaacgcccggcggcgaagatgccgctgggcgttcgtgatctttttttgcccaatagggcacaggagccggtgctttgcgcaaaatcaggcgttttctccttccggacgcgtctcccgtagaatggctccatattcccgcacgggcggttcgccccacagcgcgcggtaatcctgtcccagatagcagccaaagctggtgatggaggcaaagcccagcgcgcggtacgcccgcgcgtcctcgcgcaggatggcctcgtccagcgccaggtggcggggcggctttttccagccggaaaagcgggaattgtccatccaatattccagcacctgcgaatcttcccggccaaacaggcgcaaaagcgcgcgcaaagagcgcacttcccgcacgttttccgggcaggtttcgtccagcagtggccggtgggaatcgcggtggaaaggcgcgtattccaagaatacgcctggcaggggatcgatgcgttccggcgcgtccatcgcgtcgatatacgccagatagcatagcttggccgcgcggttatagcggcgcaggccgcgcaacagggcgtttacggtgaggagttgttggtcgctggcggagagcgcggcgcacttttcgcagtggcatttgccgccggaaacatcatccagccagagaaaatagcggtcggaacccgtatccagcatgcgggccaggaattccgcgcgccgcgcgacgaaatccagtgcttccggctgcgaagggcaaaggttgtagtccgccacgcgttcgcccgcctcgttcatgcggaaccagtgcggcgcgctggcaaacagcgcgcgcggcaacagccaggacatggcgtgcgcctcgtattccacttcgatgcccatgcggttgagctgcgaaaacagccgccgcgtttcgggcaacagccggtggtacagcgcgcgttccaagctggcgcaggcctcctgcccgcccacagggtgcaggcccagcacgttgagcccagcggcttttaggcggtcgggccaggtcacgtccaattcttcgggatggatgatgatgccacggcgctcgcgcatgggcaagccctccttttccactatccgcgcgcggtcaggcgctgccgcacggcttcgtaaaacagcacggtggccgcgcaacccacgttgaaggacgtggcggcggaatccgcgctcatgggaatcgtcgccatctggtcgcaaccttctttgaaggcgcggcacagcccgtccgtttcgttgccgatgagaaacagcgtggggcgcgtgagatccaaatcgaaaatcgcgctttgcgcgtgcgccgaagtgccgatggtctgaaagagcggatgttcccggcgcatgcgcgcgataaaatcaaacacgctttggttttccggcacgcggatggtgggtacgcaaaagaacgatcccatggaggccacgatgacctccggatcgtacaaatccacgccgtgccccgtgagaattaggccgtccacgcccaaagcgtcgcacgagcgcaaaatcgtgcccaggttgccgcggttgctgggccggtcgaacagggccaggagcggggtgggggagaggcgcaactcctcgaagctgtccttgcgcattttgccgatggccaatagctcgctggtgtcctccttgccgctcagctcccgcatcagggaaagcggcagctcgtagttcacccgcgtgcggacgctctgcagcgtctcctccgcccaatgggaaagcggcttttcccgggaaaacagcagcgaggaaaattcccagccgtttttgcgcgcctcgttgatgttgcgcacgccctcaatccaaaattcgccgtaggcatagcgcttgttgcggttggtttttagcacttcaaagcgctgatacgtcgcgtttttggaatatacgcgttcggttttcatgccttgccgcccgcggacagcgcggcggcgatttcttccgccatcgcggcgagctgctccttttgcgcctctttcagcgcggatttgatggtcacgccgtttgccaggaactgggtgttggcgattttctgcacattttcgcgcagcaacttgccagcgaccggcgcccagctaccgttctcgatgatgccgaaggtgcggttttgcaggttgtgcgccacgatttcttgtgccagcgcttccatcacggggaacaggccattgttataggtggtggcggccagcacgatgtggctcacgcggaacgcctccgagaggatataggaggggtgcagcgaggccgcgtccatcaccgtggtgggaatgccgcgctcgagcagttgtgccgccaggatctgcacggcggcttccgtgtgcccatagaccgaggcataggcgatcagcacgccattttcttccggggcgtagcggctccaggcgtcgtattttgccacaaactgggcaatgctgtccccgcgcaaaacgacgccatgcagggggcaaacctgcgcgattgtgagcgtggcggcctttttgagcagcgcttgcacctgcgggccatatttgcccacgatgttggtgtaatagcggcgcgcttccgcccaataatggccccaatccgccacttcttcgctcagaagccgcccgtcgagcgcgccaaagctgccgaacgcgtccgcggagaagagcgtctggctggccgcgtcatacgttacgatcacttccggccagtgcaccatctgcgcggtgaaaaactgcagcgtgtgccggccggtggagaggctgtcgccatccttcaccagcttggcgcggccggcaaggtccgtggggaagaactgcttcatcatgttcagcgccatagcgctgaggacaaaggtcgcgcccggatagcggttggccacttcgaagagcagcgcggcgtggtctggctccatgtggctcaccaccacatagtccagcgcgcgccccgccagggcttggtcgaggttttcaaagaaaatttccgctacggcgctgtccgccgtgtcaaacagcacggccttttcgtccagcagcacataggaattgtacgacatgccttccggcacgggataatggttttcaaagcgggcggcgcggtgttcgctcgcgccgatccaaatgagatcatccgacaatttgcgaatgcaatgcatttgtggcacctcctgcggtagctatggccttattatagaatacccagaagagcctgtcaacagagctttggcgtattcgctggaaggaaataatttttttggagaaatttgggggaactgggaaccaaactccgctggcatgcgtccaaagaatacagcgataagaaggcggggcgatagaatgaaaaaaatacttgctttgatacttattgtattgcttgctgcggggagcgtgagcgcttccgcggaggagaatgtcccggtttttgatgatattctttttgaaaatggcaaggacgcgctgtggctgattgcgagcggggattatgaattggcgctttccctgctgaattttgccgaaggcgtgccttcggcggaggattttgaactgttcatcaccgccaatttcccctcgattgccgatgggatggtgcaatatgaggtggcggtggcgtattacgatccgcaaagcgcgctttggacgctggccatccctgtggaagagccggaaaacgaagaggtggagaccttcgtgctcttttcgcaggatggaacctgctttgtcggctgcggctatatgccatggggcgatgtggaggcgcagtacgagaacttgtacgatgtgatttggaacgtggaataccagccggaggatatgctggtgctggtcgatgacgcgaatttgtgatatacaaactcttaacaataaaaatttcccaaacctattgacttatgcgtgcccatgtgatattataatgcacgtcgcttgcgaggtgcaaagcaaaaacgcatcgtcggggtgtagcgcagcccggtagcgcgcatgctttgggagcatggggtcgcaggttcaaatcctgtcaccccgaccagtttccacgcgaccccttggtcaagaggcctaagacaccgccctttcacggcggtaacaggggttcgaatcccctaggggtcgccaatttttctcaaaagggattgcatgcgggcctttagctcagttggtcagagcggtcggctcataaccgattggtccggggttcaagtccctgaaggcccaccaaatcctgaagggttcttgggcacagattgtggtccggtagttcagttggttagaatgccagcctgtcacgctggaggtcgagggttcgagccccttccggatcgccacttactccttgagcgtgctggcgtagctcaattggcagagcagctgatttgtaatcagcaggttgcgggttcaagtcccatcgccagctccattttcggatgagacttgagcaaattcatggatgggttcccgagtggccaaagggagcagactgtaaatctgccgtcacagacttcggtggttcgaatccacccccatccaccaatatgcgggaatggcggaattggcagacgcgctagattcaggttctagtgagcaatacgctcatgcaggttcaagtcctgtttcccgcaccaacggattgcacaaagtgcaatccgttttttcgtatgcactgcaccaaaaaacggccgcttttgggtaatgtttaagttaattccgcatcttatgttaagaccccaaatcccattaagcaggggtgcttaacaattcctttcgatttacgtccaaactcttgtctacaccgctactgcgcagccagaaaactggagaccttttcaatggcatccggtatccggctttcttcctgtttggcgtaaattttcagcgtcatttccggcgtcgcatgtcccatcagcgcttgcgctgtcttgatgtctacgcccgaggcgaccatcatcgtacagaatgtcgttcggaaattgatcgccgtcatcccgtacaattctatatgggatgatagggatttccatagctttctgtacccatccgcggtgatcggtctgccttctccttttgaaatcacgtagccgtcattctttctgcaattccacagaatgtcgaacagctcctgccccatcggaaatgcgcgtctgctgaagtcattcttggtgcctttgctgacggttgcgcccaccgggtagacaatcgcctgggtgatttcgatgacacgctggtcgaattttacgttctcccaggtcaggccaaggacttcctcgcgtctcatgctcgtgtaagcaagaagcgctatcaggcaacgctccgtagggtcttgcagattcgggatttctttctgaatggcaatgacctgttcgcgcgtaagcgccggcgtaccatctcctgctttagcaggattcttgacgcggctgtccttcgccggattcattttgatgatgtgatccgacaccgctgagtccaagacctctttaagtacggcccagtcagccttaacggttgcctttttgtatgtcttggctctttctgtcagaaattcctgaaccgcagcgggggtgatgtcctcaatgttcatctcgccaaaccaccggttgaggacactctgcttggcgttcataaagacttccgtcgtcttttcgagtccttgcttatatgtctttcgccaatggtctatgtagtcagcaaagcgcgttttctttgacggcggaggaagtggctgtgcaaggagcgcggcaatgttcgggccaacttcaatgtcccggcctaaaaactccttgattcgtcccgaccttacaacagcctctacgatcttatccgccagggataactcgtcataagcgctcacacgtttgatgatagaagcgccgttttcgtcatgaccgaccagcaccctcagcctgtgttctcttgccataatctcgttactcccttccgagatcatcgcatcagactcactttgaactctctttgctatgcagttttcaaggtgcgcaccagagcctgtatctgcctgtaattctatcatatcatctttacttttgcaaatcatcgtcaggttatgaactgcctggtgtacggcttcaatcgccgccatactcttgcatctgccgctgccggaggaaatgccgcaggccgagagctttttgcccctactgccgccgggactgcgcgcctttgctctgtatgtgcaggcccactatctctatctgaaaaaggagtacgcccacagcgccggaattgtggaggccacccttgccatgggcgcggccagctacccaatccccgccatctatttgcacctgatcgcggtcatggattccatgagcatgaaacagacaggccgggcggaggcccatcttctggcggcgtgggagaccgcccggcctgacgacctcatcgagggctttggggagcatcacggacttttgggggccatgctggaagcggttatcaaacctaaatggccggaagatttcaaaagaatcatcggcatcacctatcgtttctcttccggatggcgaagagttcataaccccatgacaggccatgatgtggcggacgatttgaccacgacagagtttgccatcgccatgctcgcagcccgcgactggacgacccaggagatcgcagaacacctgaatatatcggcaaacacggtcaaaacccatatcaatgaagccatgcggaagttgaacgtggagaaccggaaaggcctgaaacgatacatgtttttataggcgaaagccccttcaaaaacccgcgcgggtcgcccattttggaggcccaaatgggtgattgtagcgcggctttttttctgtataattaaaaagggaatataaccactgttgggaagttagcggaatttagcgcagaaaatcaggaagatcgggatgggaatttatagaacctgtcttgacaagtgaggggggaatttggtctgtgcctttttgtatggatttcagaaaagcaggcatgagggaacgacgggttcagagcagccctgagcaaggattaaggaggaacgccacatgaagaaaatgaaacgctgggcgagcgtctgatcgttgacaaacctctggtttgccaacgaatttgcccgaccgcttgcaaatctgacgatttgcggccagcggtcggggcgggaatgcatttttacgtttcgcaccgccctacgcttcgcttgcgcggtgttccgtgcctgcgcacttcgtgtgctcgccacttcagcccttcgggccttcacctttttgcaagc

SEQ ID NO: 2372 - DNA, 23970 bp, Unknown
  16S sequences of unknown bacteria
gaagtgttagaggactatctaggtgtaatgtagccggcgccgactttggatgtttctcgtcgccttcggctcctccaaacatccaaagtcttactcaatgtagttttcatcatatttttttgagaaaagtgtaacctatcattgacgactgtacaaatacttaaaaaatccgtttgaaaaatatcttgaaattttttccgctttgtgttatactgcctttaaggtttaagggagtagctgacggtctgggctttcgaccgctgcaaaatgcgtcaatacacggctttttgcccgcgtttgcattaaacagcaagacttttaccgtacatacactgtgcggtaagggtctttttttagacctgtttttaaaaacattattttattaaaaggtgtggatgagaaaaaatgtcattaagcgattttagttttttggtgcagaattttgccgagctgctcgactggcggtatgttgtgatgtgggctatcggcggaatactcatattcctcgcgataaagtacgaaatggagcctacgctgcttttgccactcggcttcggaacaatacttgtaaacattccgttttcgggtgcggtggataggattttcggtggaaagctgcaggaaggcgcgctttcaacgctttataaggcgggtatagaaaacgagcttttcccgcttatactttttatcggtatcggcgcaatgatagacttcggtcctctgctttccaaccccaagctgatgatattcggcgcggcggcgcagttcggaatattcttcaccttctgtgcggcatcgatgttcttcgatttaaatgatgcggcatcaataggcattataggcgcggcggacggccctaccgcgattgtagtatctcaaaagctcaattcggcttatcagggagctataatggtggcagcgtattcgtatatggcgcttgtgcccataattcagccgcccgtaataaagctgcttaccaccaaaaaggagcggcttataagaatgccgtaccacgataaaaaggtatcaaagcttacaaaaatacttttccccatcgttataaccgttgtggcaggcatagttgctcccgaatcggtttcgcttatcggcttccttatgttcggaaacctgctgcgtgagtgcggggtgttaaactccctttcggaaacggcgcagaatgtgcttgcaaacctgattaccattttcttggggattacaatagcaacccagatgcaggcggaaaaattcctcgatccgaaaacgcttttaatactgggactcgggctttttgcctttgtgtttgatactgccggcggcgtgcttttcgccaaattcctcaacctgtttttaaagaacaaggtcaaccccatgataggtgcggcgggtatttccgctttcccgatgtcgggacgcgttgtgcacaaaatggggcttaaggaggatccgcagaacttcctgcttatgcactccgtaggcgttaatgtatcgggtcagatagcctctgtaatagcaggcggactgatactcaatttcttcttataaggaggacttaagtaatgactttcaatcctatgaatttcgtaaccaaccttcgctacctcgccgtgggaatggtaagcattttcgcggttatcggggtaattgtgcttattaccgttattctcaataagatatttactcaaaaagactgattttgaaagcgcggtgagaagttatggagcttgaccccaaaaccacaaaaaaaatactgtttttcatcgccttcggggcagtgtgctttgcagccgttgcaaatttcgaaaggcttttatctgtgctgggcggagtgatttcggtattccgcccggttatcaccgcgctttgcatcgcctttgttctcaatgtgcttttgtcggctcttgaaaacaaggcgtttgcttttatggataaaagcaaacgaaggcttgtaaaaaaggcgaaaagaccgctttgcctgacacttacatatcttatagcattagggcttatagtgctgcttattgcggttataattcccgatgttataaacacctgcgtaagtcttgcggaaaagctgccattgcttatgaacgatgtgcggacatttaccgaggatacacttgaaaaattcaatctgtcgcagaattttgtgccgaatatagagatcgactggacaaaggctgccgatacgataaaggattatctcgtaaattattccgaccgcattttcggcagcgcgttcagcattacaacctcggtcttctcgggcgtctacaacacggtgttcagcgttatgatctcggtttacattcttgcctgcaaggagaagatagggcggtttacggtgaaatgcattgacgcattcgcaccgaaaagggctgccgccgcgatttatcatgtttcctcccttacatacggctgcttttcaaaatttataggcgggcagcttaccgaatcggtcattctgggattgctttgctttatcggaatgacggtattccgtttcccgaacgcaacagtaatttcggtatttatctgcgcgacctcacttataccaatagtcggcgcgacgctcggcgttattgttggcttcctgctcattttcatttcaagccccgtaaaggcgctgcttttcattgtcttttttgtggtgctgcagcagcttgagggctcgctcatttatccgcgcgttgtgggtaaatcggtaggtctgcccggcgtaatagtagtttgcgcagtgctggtcggcggaaatatcgggggaattttcggtgcgcttgtaagcgtgcctgtgtccgcagtgctttatattcttttaaaagaggcggtagagcgccgagcgccgaaggaaaataccgaaaaagaatagtttataaaaactttttattgacagatgtatagaatttgaggtataatcttaaattgataggttatggcttttaatttttcttcgccctttagggcgcgcctgaccgccaactgtgttaattaaggagggtttatagatgaaaagaacttatcagccgaaaaagctgcaccgcaagaaggagcatggcttcttaaagcgcatggcaacatccaacggccgcaaggtgctcgctcgccgcagagcaaagggcagaaagcagttgacatactaaagccgatcgggagtgcaggcgcgtccgcactctccggcggaaattccgcttctgaaaatcggggattttcggctgtgctttccttttgccgatattacccctgcgcccctgaaaatcagctttaaggctgattttcgcttataaggcgttttttcggcgcatattgtgcctggaattttgcggagtagagttttagttgtctgcagtttgagccacttctatgtggcttttcattttattgagactatgaaaagtatttcaaagctaaaagagaattacgagtttcgccgtgcatataaaaagggaaaatcctttgtgtcgccgtgttttgtcatttatgcggcaaagaaccgctgcggcgggacgcgtctcggtataacggccgggaaaaaaataggcggagcggttcagcgcaaccgcgcaaagagagtaataaccgccgccttcagagagtgtcttcccggaataaagccgggatacgattttgttattgtggcgagaacccgcatacttgaaattaagagcaccgccgccgcgcaaaccatgaagaagcagctgtcagcggtgggtatttacgattatgataggcaaaatattgataaagctgattgagctttaccgtaaaaatatttctccgcgtaaaattccttgctgtcggtttacgccgacctgctcggcatatgccattgaggcaatacaaaaacgcggagcgtttgtcggaacacttttaagtatttggagaattttaaggtgcaatccgctctgcaagggcgggtatgatcccgtgcccgaaaaaaagggcaaaaaaagcgattaaaactaaccacagccgccaggcggcttgaacggacggtgcgttaatgcaatcaatttttaatattataaacattcccttcggttgggtgcttgaatttctttcgggcattttcggcggaaattttgccgccgctgtttttgcgtttacacttataatcaaccttattcttattccgctgagcataaaaagccagaaatcctcggttcagcaaatgcgcattaagccgaagctggacgagcttaaaaagaaatacggcgacgataagcaaaagtatagcgaggctatgcaaaagctgtatcaggaagagaacgtgtctatgtcgggcggctgcctgccgatgattctccgcttggtgcttatgatgagcatttactatctcattatgtcaccgctcacctatatgtcccatgcggataaaacgcaggttacaaatgttactacctcaataagcgatggtcttaccaacctgcagaaaagcaacgaagaggaatacaaaaaaatcgttaatgagttttcctggaaaaagggaggcaacaatgagctgagcgtagttaaaattatacgcgaaaagcccgatgttataaaggaactgctttcagatgaggaatacgcgaaaatagaggatgaccttaaatcgattaccgcagcggacgaaaaggcgaatatcgattattcattattcggaatagatttaacccagacgcctaaattttcatttgatatattccataatgcccagcttatctgggtaatgccgattatggcgtttttggcgcaaatgctcacaagcgcgctgtcgcttatgatgcagaaaaagctcaatcccgattctccgaatatggcgggaatgatgctcacaatgccgcttctctcactgtttatcggcttcacattgcccggtggcgttgcgttttattgggtctgctcatcccttataggcgggtttatacagatgggcgttcagcagttttacggcccgcagcgcatgcttgcccgcgagcgtgtaaaggagcttacaaaggaatgcgattttgaggcgctccaaatgaaaaaagccgaacaggctgttttaaacggagaaaaaacggaataaagctataagggcgtatagagcgccgcacataaaggaggatttcacttgataaaggaagcaagaggatacggcaatactatagacgaggcaagagaaaatgccgttgcaatgttaaacgcgtcggaaaatgacgatattcagtttgaggttatagctaccccaaagaagaaaacgctcggaattttcggcggcagaaaggcagaggttcgtgtttttgtggagctgcccgatgaaaagcccgcaaagcagaagcgcccgcagcccaaaaaagaaaataagcctgcaaagcaggctgaaaaacccgtaagggaagaaaaaccgcaggagcctaaggctgagaaaaaaactgcccctgccgcaaaacccgaaaaggcgcagaagcccgatccgacagagggcttcggtgagcttaaagaaatagctgagctgcccgcagattcaagagctgcgcgcgcagcaaattatttaagaggaatactcgataatatcggctgctccgatataacaatgaaggccgcagccaaggaaaatgcagtgcttataagccttgagggtgaaaccgtcggaattataatcggtcacaggggcgaaactctcgattcgattcagtatttaaccagccttgccgcaagcaacaacggcggaggatactttaaggtcaccataaacataggaaactaccgcgaaaagcgtgaggaagcacttgttaatcttgcaaagcgcgtttctgagcaggttataagaaccggtcgctgccgcagtcttgagcctatgaatccttatgagcgcagaataattcacactgccgtgcaggaaatcaacggcgtggtttccaattccttcggcgagggaaccgcaaggcgggttgtaatcggcattgagggcggagaaatgcgtcctccgagaaaaaacggcagagattttaaggacggcggacgccgcagagcgccttcaaagactgcccctgcatcggcatcaaacagagagccgaaaaaggataatgacgctcctctttacggtaagattaattaattttaaaatttaaaaattcttaacggattgatttagattatcaggcaacaatagtattaagtctgattagttgttgtgctgaatttttgtacggggagtgcgttttttggaaaagtttgtaataaacggcggacgcccgctgcacggcgaggttcgcataagcggcgcaaagaatgctgctgttgccattcttccggcggttttgctttccgacggcccttgcgttatagaaaatcttcctgatatatccgatgtttccacgattttaagaaccatgcagtccttgggtgcacagataaggatgataaatagatccacggtggaaatagatccgcgccatgttaattcctttgtcgtttccaaaaaaatggcggagggcatgcgggcttcaagctattttctcggtgcgcttttgggaagaatgctgcgtgcgcgcgtagcgccgcccggaggctgtgatttcggcgttcggccgattgatcagcatataaagggctttgaggcactgggtgccaaaatgaccatagaaaacggaatggttgacgcaaaggcaatgtcgcttaccggatgcctcatttatcttgatgttgtgtcggtgggagccaccataaatataatgctggctgcagctaaagcggacggtcttacaataatagaaaacgccgcgcgcgagccgcatatagtggatcttgcaaatttcctcaattccatgggtgccaacataatgggcgcaggcacgggtgttatcaaaatacgcggcgtaaagcatttaagcggcgctggttacagcattatccccgaccagatcgaggcgggaacttatatggcggcggcggttgccacacgcggcgatatattggttacaaatgtgactccgaagcacctggaatccattatagcaaagcttcgtgaaacaggcgcggaaatcaccgaatttgatgaatcggtgcgcgttaaaatgacgcaccgcccgcgcaagtgcaatgttaaaacaatgcctcaccccggtttcccgaccgatatgcagccgcagatagcagcggttttaagcatagcagacggtacaagcataataaccgagggcgtgtgggacagccgtttcagatatgtcgagcagctcacctttatgggcgcggatattcaggtggacggcaaaatggcggttataaccggcgttgaatgtcttaagccctcgcctgttcgtgcagttgatctgcgcgcgggcgccgcaatgataattgcggggctttcggctgacggaataaccgagatcgaggagatcgaccatatcgaccgcggctatgaaaatgttgttgaaaaattctccgctttgggcgcggatataaagcgagttaagagctttgataatatcaaggcattaaaacaggcataatttataattcgtaatgcggaattcgtaatgcggaattattattacagtgtaaaatagctcccgcatataacgggggctatttttaatttttaaattcgggagtaaagaaatgtcgaaaatatgtccgctgttcagcgggtctaccggcaacagtacatatatagagggggcgaccggcgctgttcttgcggatgtcggcatgtcctgcaaggcggttaccgatgcgcttcaatatgtaggcggtgatattgaaaaaatatccgccgtggttataacccatgagcacatagatcacataaagggcttaaagccgttccttaacacggcaaggcaagcgatgcttatctcaactgccggaacccttgaggcacttgaagccgcggggaaaataccgccgcacacgaagaccattgctatcggagaagaaacgcttgaggcggggggaatcggaatatcccgctttgaaacaagccatgacgcggcgtctccctgcggctactgcttttttatgccggacgggcggaagatttcggtctgcaccgacctcggcgttatgaccgatactgtgcgcggtgccgtttcgggcagcgatgcggtgcttatagaatcgaattacgatatcgatatgctcaaaaaagggccttatccggcagagcttaaaatgcggataatgtcagagtgcgggcatttatcgaacaatgcctgtgccgccgagctgccggagctcttgaaaagcggtacgacccgtttcattttgggacatttaagcaggaacaacaacaatccgcttttggcgctttcagccgctaaaaatacattgacagaggcgggcgctgcggtcggatccgactgcattttagaagtggcagcccctaaaaataacggggtgacggttttatgatgaaggtaactcttatagccccagaggggcttaaggaaaaatatctgcgggacgcggcagacgaatatataaagcggctgcgcggcttttgcgatttaaaaatcgcggagttttcgccctttaagctgcctgaaaaaccgagcgccgcgcaaatagccgccgcgcttgaccgcgagacggagcagattttaaagcgaatccccgcaggcagccgcacggccgccctctgcattgagggcaaaatgctttcaagcgaggaattagcaggggaaattcacgcggcggataattccggtacgccctttacctttataatcggcagctcgcacgggcttgcggagcaggtgaaaagagctgctgatattcggctttcgttttcaaaaatgacctttccgcatcagcttttcagagtgctgctgcttgagcagctttaccgtgcttataaaataaattcgggcggagcgtaccataaatagcggtaaaacaagccgaacggtttactcggatgcgtcctgctttgacgattcctccgttttgccgaaataatcgtcaattccctgaaaatcggcgagggtatcgtaaacataatgtgtcgggtagttaattgcaaaataatcgtaatcatgaatatattcgtgcgcggtgaagagatcgtccaaattatgctccctcacgccgcgctcccaaatttcaagcgcttttttcagatcattgccgctttccttatcgtttatcttataaatgatatacgaaagcgccgatttcacccgcttgttaacgtcaaattccttcttttcgttcgttatcgggtctaaaaagccctcgttgctttcaaggcagtcccagtaagcgctgtcctttgattttaaaagcgatacattattcagtaaaaattcctcaacggcataatgcgcgtcgcgtatttccctttctacacgctttttttcgttcttattcaagccctcggttatgcgttcctccgctgcggtgcatatctcctcgctcgggacgggcagtgaagaattatgcagataatatctcttatttgtaaagcacaaaagctcggaatacacattatccgaaattcggaaaatatgcttttctctgtccttttgtattatcacataagcgtctgagaagattgtacggcacatatcaagctttgataagcatttgccgtcggaagagtaaaactcaaagctccaataggaattaagctccgaatcccgcggatcgacatcaggcttataccaagcggtatcggtcattatttttataaagctttttattttttcgggatcgtctattgtgtattcggcgtcgtttttatcggtacggtcggccgcaacgattttttctatctctgcggggaggagagaggatatgctttccgcctgcgtaccctcgaaaagctcgcgcgcgttaacaaacatccgctttatttctcttataagcggctctcttacctccctgatgccgcatgccgcagcagtgagcgacagcactgccgcaagcgctatgcaggcggcgcgcttgcctgcggtgtttataagcctgcagaccccgctctgcatacggataagcctttccatccgcatatcaaattcgcgggagaattcatgtgtgccgtttgcggggaaatcaagctgtgattcgataaacgcttttttcagaacggaattattcattttcctgcccccttaatgcctgcagcagcagctttttgccgcgcacaagctgcatttttacggttgatacctttctttcgagcagcgccgctgtttttttaacaggcagctcgtttacataatgcagaaataaaacctcattatacggcgtcggcacgcttttgattgcggcaatcaggtcttcgtactccgttttttcggcaagctcctcaataagcgcgtcatctgctgcgagttcacaggtatcgatcggcgtttcgttaagccttttaaggcggcgcagacggtcataggcggtgtttttggttattaccgtaagatacgccgccgtgcgccttgagcttatatcgtctatctgcttaatgcttttcgctgtctttataaacgcgtcatgcagaacatcctccgcgtctgtgctgtttttaactatcctcagcgcgcacgcatagagcatatcacggtatttataatatattttctcaaatttgcttttttcatcctctgtatcaaacgccgaaataaacaccgaaatcgccccctcttcttttaaaacgtttcaaacatataaaacggttacaaatataataatgctttttataaatgtgctcaaggataaattgtgcaaggaagttaaaaatattttcggaggacattaaaatggaaggaaaaatttatgatatagttataatcggcggcggctgtgcggggcttacggcggcaatttacgcacggcgcgccgaaaaatcggttttggtgctcgaaaaaaatgccttcggcggtcagattgtctattcaccggaggttgaaaattttccgggttttataaaaatcagcggtcttgaattttccgacaggctttattcccaagcaaagggtctcggcacggagtttgaaatcgataacgccgtgaaaattttaacggacggagaatacaaaacggtaataaccgattacggcaaatacaagtgccgtgcggttataattgcggcgggacttacacacagaaggcttggacttgaaaatgaggaaaggcttgcgggtcacggcatatcatattgcgcggtgtgcgacggggccttttttaagggaaaggatgttgcggtttgcggcgggggaaataccgcggtgaccgacgcgctttttctttcggatatttgcagaagcgtgacggtaatacaccgccgctccgaattccgcgcagacccggttttatcggaaaagctgcgcaaaaaaaacaacatccgctatgaatttgattcggaaataaccgcgcttgcaggggagcagggtctgcaaaaaataaccgtccttaataaacggacgggtgaaagccgcgatatttcggttgatgctctgtttgttgcgataggctttctgccgcagaatgatatctgcaaaaatacggcggagcttgatgacggcggctttataaaagcgggcgaggattgtgtgacctcatgctccggtatcttcgctgccggtgactgccgaacgaaggcgcttcgccaattgaccacagctgctgccgacggtgcagccgccgcatatgccgcctgtaaatttataggttgattaaaattgcccgaacagaaacatgccccctttgaggctttggtatcctgaagggggctattttgcgcccttattaaagtgttaatgacaaagtagcttcaggtcagcttttaatcggctcggtgtaaagcccctgtacttcttaaacattttattaaagtgaacagtattattaaagccgcaggttggtgcaatttctagtatggtcagcttgttgcttccggaggtaaaaatttttgtcgccttttcgattcgcttggcgtttatataatcgcaaacggtaatcccgtttatttttttaaagaggtgagaaaagcaattaggtgtcagcgccattattcccgcaagctcctcaagcttgagttcctcgcagatatgccgctctatataatcatatatccgcagcatattaacggcgtgctctttggtatcataagtcgggatattgaagaaaagatcatttcaccctttacatgccttgctctttctgctgttatgcaaatatggcatgcaagccgatttttgcctttcgcgcaattcataactttgcttttttataccgtactttggactctacacgtaatttgaagaatagctcaaaaatttgaaattttattgttaaaacactgcaaaaatctttttgaaaaaccctagaaaaacttgacacgaaccaccgaattttaaatacttgacggaaaggcgaaaaatggtgtataatatactttgagttattataaggagagatacggctaatggcgaaaaccaccgcggaatacggcaacgacagtataaaaaagcttgagggtcccgatagggtgcgaaagcgtccgggcgttattttcggttcggacgggcttgacggctgcgagcattcggtttttgaaataatatcaaattcaatagacgaggcgcgcgagggttatgggcagaagataattgtcacaaagtatgccgacggctctattgaggtgcaggatttcggtcgcggagctccggtcgattttaataataaagagcagtgctttaactgggagcttttatactgtgagctttatgccggcggcaaatacaacacgaacgacggcgcaaactatgagtattcggtaggcttaaacggcttaggtctttgttctacgcagtattcctcggaatatatggatgttgaaataaagcgcgacggatttaaatataacctgcactttgaaaagggatacaatgtgggcgggctcaaaaaagagccttacgacggcaaggacacaggcactaagactcgctggaagcccgatattgaggttttcaccgacgttaatattcccaccgagtattttcttgatacccttaaaaggcaggcaattgtaaacgacgggctgctgtttatttttaaagagcagcagggcgcgcgctttgtgcagcaggaaattgtttataaaaacggtattaaggactatgtaaatgagacggtaggggaggaaaagctttcctccgttcagttctggcagaccgaaagaaagggcagagaccgcgaggacaagcctgaatacaaggttaaaataaatgcggcgctttgtttttcaaaccgccatacattaaaggaatattaccacaattcaagctggctcgaatacggcggcgtgcccgaaaaagcgacccgcaacgcctttgtttcacagatagacgcatatataaagcaaagcggcaaatataaatcgaacgaaagcaaaatcaccttttcggatattgaagaatgcctagtgctggttatttcctcgttttcaaccgtaacctcatatgaaaaccagaccaagaaggctattaccaataaatttatatacgaggctatgaccgattttctcagacatcagcttgaagtgtattttattgaaaataaagccgaggcggataaaatagccgatcaggtgcttgtaaataagcgcagccgcgagcgcagcgaaagggagcgcataaaccttaaaaagacactgcaatcctcaaactctatgcttgacagggtggataaatttgtagactgccgctcaaaggatgttgagcagcgcgaggtattcatagttgagggcgattcggctttaggctcctgcaaattggcgcgaaacgccgaattccaggcaataatacccgtaaggggcaaaattttaaactgccttaaggccgactacgaaaaggtgtttaaaagcgaaattataaccaatctcattaaagtgctcggttgcggggttgaggtaaagtctaaggcgaacaagggccttgcaacctttgacctttcggcgctgcggtggaacaaggtcataatctgtaccgacgcggacgtggacggcttccagatacgcacccttattcttacaatgatatacaggcttatgcctactcttataaacgagggaaaaatttacatcgccgaaaccccgctttacgaaataggcacaaaggatatgacctactttgcctatgacgaaaaggaaaagatagatattcttgataaaataggggacggcaagtacaccattcagcgctcaaagggacttggcgaaaaccagcccgatatgatgaaccttaccacaatgaaccccgaaacgcgccgtcttataaaggttatgccgcaggatgccgagcggacctcgcagatgtttgatttgctgctcggagacgatttgcagggcagaaaggattttattgccgaaaacggctatatgtatcttgacgaggcagacttatcgtaattcgtaattcggaattaggaatgcggaattaaggggacaaaatggagaacgtaatcgttacaaaaagtaaggattttgccgtaaggattattcgggcatacaaataccttactgccgagaaaagtgaatatattatgtcaaagcagcttttaaggagcggcacaagtataggcgcaaatgtaaaagaggcaataaggggtcagacaaagcccgatttttacgcaaaacttaatatagcgcttaaagaagccagcgaagccgaatattggcttgaaattctttatgaaacagattatatagataagaaattatacgaaagcataaattcggattgtgaagaaattataaagctcttagtttcgataactaaaactcagcaaaaataatttcgcattacgcattccgaattccgaattaaaatgaggaagtgaagtttgtggcgactaaaaagaaaaaagagccgaagtcggtaaagcctaaaataaacgcttacattgccggcgcggggcttacggtagagcaaccgataaccgacacgctcgaaaccaactatatgccttatgccatgagcgttatagtatcccgtgcgataccggaaatagacggctttaagccctctcacagaaagctgctttataccatgtataatatggggcttttaaagggcggcacaataaaatcggcgaatatagtggggcgcacaatgcagctgaacccccatggtgatgcggctatttatgagaccatggtgcgtttgtccgaggggtatcaggcgctgctgcacccgtatgttgcctctaagggctcattcggtaaagcctactcgcgcgatatggcttatgccgcctcgcgttataccgaggcaaagctatccccaattgcggcggagctttttgccgatattgataaagacacggtagattttgtggataactacgacgctaccatgaaagagcctatgctgttccccgtcactttcccatcggtgcttgtaaacgctaacacgggtattgccgtaggcatggcaagctcaatttgcccgtttaacctgcgcgaggtctgtgagacaacgataagctatataagggataacgatataaatgtggcggacacccttttagcccccgattttcccataggcggcaggcttttatacgaccgcgtggatatggaaaaaatttacgaaacgggccgcggcagctttaaggtacggggcgtatacgcttacgataaatcgcagaactgcatagacattaccgaaataccgcccactaccacgagtgaggcgattatagaaaaggtaatagagcttgcaaagctcaaaaaaataaccgaaattaacgatattcgtgatgaaacagacttaaacggtcttaaaataacaattgacctaaagcgtggggcagacccggaaaagcttatgaaaaaggttatgaaaatgaccccgcttgaagacagcttttcctgcaacttcaatattttaattgcaggctcgccgcgcgttatgggcgttaaggagattatttccgagtgggtggcgttcagggaagaatgtgtgcgccgccgcgtttacttcaagctttcaaaggcaaaggacaggctgcaccttttaaaaggtcttgaaaaaatactgcttgatattgataaggcgataaaaatcgtgcgcgagaccgatgaggaagcgcaggttgtgccgaacctgatgataggcttcggaatagacgaaattcaggcggaatacgttgcggaaataaagctgcgccacttaaaccgcgaatatattttaaagcgcacggcggatattgaagacctgatgaaggaaatcgccgagatggaaggggttttaaactcccgctcaaagcttttgaatataataattaaggaattaaaggaagtcgccgaaaaatacgggcaggacagaaaaaccgaaattataagcgcggcggaggaaggcggcgaggacgagcctatagagcttgatacctcacccgtgacccttttctttaccaaggatggatatttcaagaaaataaccccgcagtcactcagaatgagcggcgagcaaaagctgaaagagggggacgaaataacgcagacggtagagtccaccaatgcagaggagcttttgttcttcagtaataaatcacaggtttataaatcccgcacgtcggaatttgccgacggcaaggcaagcgtgctaggcgattatgtaccctcaaagcttgaatttgaagaggcggaaaacgccgtttatatggttgcaaccgccgattataagggttatatgctctttgtgtttgataacggcagaatagcaaaggttccgctttcctcttaccaaacaaagaccaaccgcaaaaagcttataaaggcatattgcgataaattcaccctgcacagcattttctttataaaagaggataccgagctgctcttaaaatccacaaacgggcgtatgcttatagtaaacaccgcgtctgttcccgcaaagaccacaaaggataacggcggtatagccgtaatgacccaaaagcgcgggcaaaggctgtccgaggtcggcatttacgaaaaggacggtttggagggcgactaccgctaccgcacgcgtaatttaccggcggcgggcagtaaaaagcctgtcggcactgccgagcaggagcagatgatactgtaaaataaaaaagagcgtcggttattaccggcgcccgatgtcggcgccggtgcaaacgctttatccgtcgctgacaagtataatataccctttaatttttttaatatacatttttttacggacggagagaaatcttaatggcacgagaactatcaaaacagtacgacccgaaagaggttgaagaaagaatttataaaatgtggcttaacggcaggtacttccatgcaaagtgcgaggaaaataagcctacctacacaatagttattccgcccccgaatattacgggtcagctccatatgggacatgcgctcgataacacgcttcaggatatacttatccgctttaagcgtatgcaggggtacgataccttatgggtgcccggcacagaccatgcctctattgcgaccgaggcgaaaattgttgaaaaaatgcggcaggaggggcttaccaaggaggacgtcggcagagacggctttttggagcgcgcctgggaatggaaaaatcagtacggcggcagaattatagagcagcttaaaaaaatgggctcctcatgcgactgggaaagagagcgctttactcttgacgaggggtgcagcaaggcggtcaaggaggttttcgtacgcctttacgaaaagggacttatttacaggggtgaaagaattattaactggtgcccccattgcaaaacctctatttcggacgccgaggttgaatatgaggagcaggcagggcatttttggcatttgcgctacccgtttaaggacggcagcggctatttggagcttgcaaccacccgccccgagaccctgctcggcgatacagccgttgcggtaaacccgaacgatgaaagatataaggacttggttggcaaaatccttattttgccgcttgttcaccgcgaaatacccgttattgccgatgattatgtcgagatggacttcggaacgggtgttgttaaaattactcccgcgcacgacccgaacgattttgaagtaggtcttcgccataacttagaggttataaacgttttaaccgacgacgcaaagattgtagccgattacccgaaatacgccggaaaggaccgctacgaggcacgcaaggctattgttgccgaccttgaagcggagggcgcgcttgtaaagattgaagagcatgttcacaatgtcggcacctgctaccgctgcggcacaacggttgagccgcgcgtttcaaagcagtggtttgttaaaatgaagccccttgccgagcctgctattgaggcggttaaaaagggtgagacaaagtttgttccccagcgctttgaaaaaatttatttccactggcttgaaaatatacgcgattggtgcatatcccgtcagctttggtggggtcaccgcatacctgcctggtactgcgcggattgcggcgaaataaccgtttcaaaggaagacgcgcactgctgcgcacactgcggcagcgagaatatcacgcaggaccccgacacgcttgatacctggttctcttctgccttatggccgttttcaacactcggctggcctgaagaaaccgccgatttcaagcactattaccccacaaacacccttgttacgggctatgatataattccattctgggtaatgcgtatgatgttctcgggaattgagcaaacaggcgaggttccgtttgatacggtgcttattcacggacttgtacgcgattcacagggcagaaaaatgtcgaaatcgctcggaaacggcgtagacccgcttgaggtaattgataaattcggcgcggacgcgctgcgtttctcgcttgcaaccggcaacagccccggaaacgatatgcgttacattgaggaacgcgttgagtcaagccgcaactttgcaaacaagctttggaacgccgcaagatttattcttatgaatttaaaatcggacgaggttctgccgcttgaacccgataattttgcgcttgaggataagtggatattgtcaaaatacaacacccttgtaagggatgtcaccgagaatcttgaaaaatacgagctcggaatggcggttcaaaagctttatgacttcatttgggatgttttctgcgattggtacattgaaatttgcaaatcccgcttaaacggcgaggacgaaaaagccgctgacaccgcaagagccgtgcttatatatgtgtttacgggtactctggcacttttacacccatttatgccctttataaccgaggaaatatggcagtcgctgccgcataacggtgaggcgcttatggtggctgattggccgcggtttgacacttcacttgaatttgccgccgaggaagaggactttgaaaagattatggcggtaataaaggcggtaagaaaccgacgcgccgaaatgaatgttccgccctcaaagaaggcaaaggtttgcattgcaaccaaatttaaggacaccttctcgcgcggaacggcgtatatctgccgtttagcttatgcttcggatgtggaaataggcgacagctttgatagcgagggatcggtgcgcgttattaccgacgccgctactgtgtttatgcccatgcgcgagcttgtggacttcaccgccgagcttgaaaggcttaaaaaggagcttaaaaaggcgaatgacgataaggagttctttgagaaaaagctcaacaatcagggctttgttgccaaagcgcccgcggcagttgttgagcagcagcgcgagagccttaaaaaggtgcttgaaaaaatcgcaatgcttgaaggcagtatagccgaaatagaaaaaaccgtttagatatcggatttcggacggtgaatatttgatttatgcttcatcggctccctttgggcaagggggccgatggtttgcgtagaagctatgattttgtatatataatgtctactgtctaacatctaatatccaaatagacggcgcacctctgtcatttagtaacatttcctcacaccgtgaggagtcatcctaaacaccggaagccaatgttttgtgcgaaatttgcggcgtttttaatacggcaaaatgaaaatgcagtatacggaatgtagtgcttacatccgtatactgcattttttattcttccgcgaatgccgcggtattccataacgcggcattcgcttcgggtatgaattattcgccgtaaagctttaagagcttttcaaggtgcgctctgcgtgccttcgcggtctcggcagccttatcaaacagaacctctgcgcgctcggggaatgagcgtgtgagtgaggagtaacgagcctcgcccataatgaagtccttatagtcggcggtagccggcttgctgtcgatagtgaaggggttcttgccttctgccttaagcgcggggttgtaacggaacatatcccagtagccgcagtcaacagccttcttcatttccttctggcagttaaccattccgcccttaattgagtgcatttcgcacggagcgtaaccgataatgagcgacggaccgttgtaagcctcagcctctttaagagccttgagggtctggttcatatcggcgcccatagctatctgcgctacataaatgtagccgtaggacatagcgatttcggcaaggctcttcttggcgattgccttaccggcggctgcgaactgcgcaacctgaccgatgttggaagcctttgaagcctgaccgcctgtatttgagtaaacctcggtatcgaataccataatgtttacgttgttgccctgtgccaaaacatggtcaacaccgccgaagccgatatcataagcccaaccgtcgccgccgaatatccaaacggacttcttggagaggtattccttatgattcagaacgtccttgcagagtgcgcaatcggcattttccttttcaagaacagcggcaagagcctttgaagcgtcggcattcttagcgccgtcatcaagagtggcaaggtactcttccgcggcggctttaagctctgcgcttgctttatccgattcggtcatctgcttaacttcatcgataagacggtcgcgtatagctttctgaccgaggtacataccgtagccgtgctctgcgttatcctcaaacagagagttagcccatgcaggaccgtgaccctcagcgtttgtggtgtacggagatgtagcggcaggaccgccccaaatggacgagcagccggtagcgttggaaatatacattctgtcgccgaaaagctgggttacgagacgtgcataagaggtctcggcgcagccggcacacgagcctgagaattcaagcagcggctttttgaactgagaggtgataacgtttgcgtcggtcgcaacgtccttcttctcggttacctttgctacgcagtaatcgaaagacttctgctcttcaagctgcgattcctgcggaaccattttaagggagttggtcggacatacacctatacaaactccgcagcccatacaatcgagcggagaaacggttaaagcgtacttgtaatccgtcttaaggaacggcttgggagcaacctttaaggtagcgggtgcagcagccacttcttcatcggtcagaacgaacggacggattgtagcgtgcgggcaaacaaacgcgcacttattgcacttagcgcaggtatcgggattccactcgggaaccataaccgcaacgccgcgtttctcataagcggacgcaccctgctcaaatgtaccgtcggcatagtctacaaatgtagaaacaggcagtgaatcgccgttcataaggcctacgggcttcattatatcgtcaaccattttaacgagctttgcaggaccctcttccttaacgggatcagtgttatccgcagcattagcccagtcagccggaacgtcaatcttaacgtaagcggtagcgcccgcgtcgatagccttttcgttcatttcaactatctctttgcccttcttcataaacttctgggctttttccttcatgtagccgatagcctcagcctcgggaagaacctttgaaagtgagaagaaagcagactgcaaaacggtgttggtacgcttgccgagaccgatttcagccgcaatgtcgatagcgttaacggtgtaaagctgaatgttattcttggcgatatagcgcttagcttcagccggcatatggtggttaagctcatccatattccactggcagttaataaggaatacgccgccgggcttaacgtcattaaccatcttgtagccctttgttacataagacgggttgtggcaggcaacaaagtcagccttgtttatgtaataggggctcttaatcggcttatcgccgaagcgcaggtgagaaatggtaatgccgccggtcttcttcgagtcatactggaagtaagcctgaacgtatttatcggtatggtcaccgataatcttaatagagtctttgttagcaccaacggtaccgtcaccgccgagaccccagaacttacattcaatagtgccctctgccgcggtgttcggagcttcctcctcggggagagaaaggttggtaacatcatcgttaataccgatggtgaagttgtgcttaggctctgccttatcaagctccttgtaaattgcgaaaatgcttgaaggcggtgtgtccttagagccgagaccgtatctgccgccgacaacagcgtcaatatgtctgccttcttctgcaagagcggcaacaacgtcaagataaagcggctcgcccaaagcgccgggctctttagttctgtcaagcacggcgattttcttaacggtggacggaatagccgcaaccagcttgtccgctttgaaaggacggtagagacgtacctttacaagacctaccttttcgccctttgcggttaagtaatcaataacctcttccgcaacgtcgcagatagagcccatagccacaataaccttttcggcatcgggtgcgccgtagtagttaaagagcttgtagtcggtgccgattttctcgttgatcttgtccatatacttctcaacgataccgggtatagcgtcataatacttattgcatgcctcgcggtgctggaagaaaatatctccgttttcgtgagagccgcgcattacggggtgctcggggtttaaagcgcgctttctgaacgcctcaaccgcgtccatatcgcacatttctttaagatcatcataatcccagatctgaatcttttgaatttcgtgtgaggttctgaagccgtcaaagaagttgataaacggaactctgccctcaatagaagctaagtgagcaacgggacctaagtccataacctcctgcgggttggtttcggcaagcattgcaaagccggtctgacggcaagcataaacgtccgaatgatcgccgaaaatgttaagcgcatggcttgcaacgcagcgagccgatacgtggaaaacgcaggggagcaattcgcccgcgattttgtacatattcgggatcataagtaaaagtccctgcgaagcggtgaacgtggtggttaaagcaccggctgccaaagagccgtgtaccgtaccggcggcgcctgcctccgactgcatttcggcaacattaacggtagtgccgaatatgtttttaagtccctgtgcagaccactgatcaacatagtccgccatagggctggacggggttatcgggtagataccggctacctcggtaaacgcataggcaacatgagccgcggcgttattgccgtccatggtcttgaattttctggccattgaaaattcctcctgtaataatttttaatgagaaacacttctgtcccatacgatatatataataacactttttttgtcccgtgtaaacaggaaaataatttatttcggtattttttgtgtacagtcgtcaatgataggttacacttttctcaaaaaaatatgatgaaaactacattgagtaagactttggatgtttggaggagccgaaggcgacgagaaacatccaaagtcggcgccggctacattacacctagatagtcctctaacacttc

SEQ ID NO: 2373 - DNA, 3378 bp, Unknown
  16S sequences of unknown bacteria
cgcgaagcgactgcgttcatgagcaagtagcgaagctaggccctgtcagcagagctgcagggatggattgcgaatgtccgctttacaaatatttgctgtaaaagaaacaatccgacatgtaaaactataattagaacgaaaaaactacggtggaatcggtgcaaactacggtgtgaaacgggaaaaaagagttgacacagccgttttagcgtggtagaatacataaggttgtaattgacaggaaagcagagtatccactctcaccctggcacaaagagttggtgcccagtggtttatatcgaacagacagcagcacggatgggatcgaagtgataccagatgatgtgcatggcagatggtgagtatctgctgcatgtatggattgatttttagtggataactgtgttatccactttcttttttatatcaatgtgtggaggtgcagaaccattagcgaattaatgattaacgaacaaatcagagaccgtgagatccgcctgattggcgagaacggagagcagcttggaattatgtcggccaaggatgcaatgaagcttgcccgagaagcagagctcgatctcgtgaaaattgccccgactgcgaagccgccggtatgcaaaatcattgactatggtaaatatcgttatgagctggcaagaaaagagaaagaggccagaaagaagcagaaaacgatagagatcaaggaagttcgtctttcaccgaacattgatgtaaatgacctgaatacaaaggtagcaagcgcgagaaaatttctcaccaaaggaaataaggtaaaggtaagccttcgtttccgcggccgtgagatggcgcatatgcaggcaagccgttatattctggaggactttgcaaagtcgctggaggatgtggctgcgattgataagccaatcaagcaggaaggcagaagcctcaccctgtttttgatggaaaagcgttcttaacgtgatttcagatattctaaatataaggaggaactaacaatgccgaaaatgaaaaccagcagagcagctgcaaaacgtttcaaaaagacaggaacaggattattaaagagaaataaagcttataagagccatatcttaacaaagaagtccaccaagagaaagagaaatctgagacaggctacgattacagacagcacaaatgctcagaacatgaagaagatcctgccgtacctgtaagactaggcagcagatgatatccgaacacagaaatcgaaggaggaaataagaaatggcaagaattaaaggcggtttaaacgctaagaaaaagcataacagagtattaaagctggcaaagggttacagaggagccagatctaaacagtacagagtagcaaagcagtccgtaatgcgtgcactgaccagcgcatatgcaggaagaaagcagaagaagcgtcagtacagacagctttggatcgctcgtatcaatgcaggcgctcgtctgaacggtctttcctacagcaaatttatgtatggcctgaagctggctggcgtagagctgaacagaaaggttctggctgacatggctgtcaatgatgctcagggctttgcgtccttagtagagcttgcaaagagcaaacttgcttaattatatagcgcagtatgaaatcggaacagtctggatagaaatagccaggctgttttttataatgagtcaagcaaggtacttgcttggctcattttatgagcaagtagcgaagcggattgtgaatatctgtttggcatagataaaaagtggacgggaagatttgttcgtctgaattagaaaaggaggacatcatgaaatatttcagcaatctggattctattcgcagtcatccgctgcctaaatggtacgatgactgcaagcttggcatttttattcactggggactgtattccgtcccggcgtttgcgccgaagagcggacagctcggtacgatcgagcttgacgagcggtggttcgcgaacaatccatatgcagagtggtattacaattcagtaaaaatcggacacgggccgagctatgactatcatgtaaatacttatggaaaagattttgcctatgaaggctttgccgatatgtggaaagcagagcattttgatccgcaaagctgggcaaagctgtttaagaaagcgggtgcagggtatgtggtgctgacgacgaagcatcacgacggcttctgcctgtggccgtcggaatatacggattacaatgcggcaaagcacgggccgggccgggatctgtttggcgaactgacggcagctgtacgcggggaaggactgcatatgggcgcttattattccggtatcatcgactggcgctatacaaagcgtccggtaacctgcggctatgaatgcgattacccggacaatgtcagctacgcctacagtgattatgcttacaatcaggtgatggagctgattgaccgttacgagccgtctgtgctctggaatgatatcggttggccggtcaaaggctatacagaccttccgtatctgatttcctactattataatcgggtgccggaaggcgtcatcggcgatcgctggatggtgaataaagatgacttctggtatgacttttccacaaaggaataccaggtaggggcagcacatatggataaaaagtgggaaatgacacgaggacttggattatcctttggatataaccagacagagggggaagcggactgcatcggaaaggatgaactgatctgcctgctcattgatacggtcgcccacaacggaaacctcttgctgaatatcggaccgaaggcggatggaacgatcccatctgtacaggaagagcgtctgctttatctcggtgcgtggctggagcaaaatggagagggcatctacggaaccagaccgtatcgtacgccggagctgaaggaaaagaatggggaccagctgtactttacgcagaagggggatacggtatatctctttgtggcagcacctcaggatggggaaaacgtgatctgtatggaaaatatatttggtacgacagtgaagctgactgatctgcagggcaatgcaatcccgtatgagatagaagatgggctgctgcgttttactgtgaatgcaaaaggaacagcgccggtggcggtgcgtgtgcagatttaggaaaaagaatcacgatcgaggtatgagagaaggagccgaagccaggcgatgagcatccttgactggcagatatttgcaatcaatacctgctgcttgactgcccaatattcgcatatcgtgaacgcagataagcattcccccgcttcaagtgcgcagagtgctaagcggcgggtgaggaggatgcttatgccagtgggagttgaaagctcccactgacagatcgcgaagcgactgcgttcatgagcaagtagcg

SEQ ID NO: 2374 - DNA, 21898 bp, Unknown
  16S sequences of unknown bacteria
atacttaaatgatttttttcagaagtgattttatgagctcatcgagagcatttccgacctttgcaacttaaattttagtatatataattatataatggtggtagcaaattgtcaaacaaagacagcgcttcctttagtaaagaaagaagatgaaatatgataaagaatagaattttccagaaatgacagatgatttaggaaggcgcctttataccttggctttaagctgtatagaggtacgcttcatataaagcagtcctgcaatatcggcgagagcccagccgatcggtatagaaagccaaatacctgttgtaccgatagacggaatgggcgcgagagcataggcgagaacgactctggtaccgagtgaaagcactgtgagcacgagcgacataaatgggcggttgatgccgcggtaatagccgtaaagcaggaaaagaataccgattcctatatatgccgccccttctatgcgcaggtactgcacaccgatagctatgatttcatattcatcgggtttgaggaagattagcatcaagagccttgctgcggcaaatactaagacggagacgaaagcacagaaaagcaccgatatttgcagagcctttttagtaccctgatgcacacgttcagatttgccggcgccgtagttctgcgatatgaaaagcgagtaggcgttgccgaattcctgagctggcatatatgcgaacgaatctatctttacaaccgcagcaaatgccgccattacggcagagccaaagctgttgacgagcccttgtatcataagtataccaaaattcattatagattgctgaagtgaagaaatgctcgaaaatctgagaatttcaccggctgtctgccaaaatgtatttgattctgcgtctttttgtcttagaaacatacggcggatatcaggaacgcgaaaatacgagtatactgcaatacctatgccagagagcgcctgcgagatgacggttgcgacggcggcacctgctatcttcatatcaaaatatattatgaaaagaaggtcgagagcgacatttaaaaaaactgtaacgccgagaaaatagagcggtataactgaatttccgattgagcgcagcagaaatgcgaagaaattatataaaaatataaatataattccgaaaaagattataaaaatatagtctttcataagcggacgtatctctaagggcacgcttagccatatgagcagtttgtctataagtatgaacgatatgatattgaatagcagagaaattacgcctatgagcacaaacgagacgcgcacgcagcttccgagcttttcgctcatctgcctgccgcggtaaaaggaaaaaagcgcgccgcttcccatgcaaagcccgataagagctgaggtgataaaagtcataagagaatatgaggagccgactgcggctaaagcgtccgcacttacgaatttgccgacgataaggctgtctactatattgtagaactgctgaagcatatttcctgcgatcataggtgcggcaaaggccagcattgtcgttgtaatatttccgcttgttaagtcattctgcatgtaatacatcctccgaaacattgagcttttcagtatgcagtatgtgttatatgcaggcgcagagcggcctgcgaaagtcttcgcctgagacgagtataagtataacataggaggagagaggctgacaagagcaaaacacaatggattttgcgggtgtatattaaaaatctacagatttcattgttacaaagcagctaagcattgagatttatggtataatagttgcagacgaggtgatttgtatgaaagaaacgcatataattgcgggaaaaaccgttaatatttttgtaccgagcagcagtaaaggaaacatcagccgggcgatatacctgaacggcggttatgaggatgctgataaaatttgggaggcgttttcatatgaagagatgaaaagcgcacttattgcgatagatgtgacagatgaatggaacgctgcgcttacaccgtatccggcgccgaggctgtttaaagggggagaggattttgccggaagggccgattcgtacagcaattcgcttatgcggataatgttgacagcggaagagcggatttcagaaatgaccggcgtcaaggtgaaagcacgcgctattgccggatattctcttgcgggtctctttgcggtgtacagcttttacaaaactgatgcgtttgaccgtctcgcttcgatgtcgggctcactctggtttgatggatttattgagtttatgagagaaaataaactgaaaaaagtgccggaaaaggcgtatttttcacttggagacagagaaaaaaaggcgagaaataagcgcatggcatcggtagaggactgtacggtgcaggcggtggaaatatttaaggaagcgggagcggagacgctgtttgaacttaacgcgggcggtcattttgacggtgaaattgaaagaattgttaaaggcctgagatttatagcagactgacaattgtaaaatgcgaaagtgcgggcaattggaaacattcgcgcagtgcggcggagagccgcaaatgtatttgcagaattgtgtacaagtcataaatagataggaaaaaagcgtggccggacaggagaaagataaaatgggaattaaaatagtgcagggagatattacaaaaatagagtgcgatgcgattgtgaacgcggccaacaactcgcttctcggcggaggcggtgttgacggtgcgatccatcgtgcggcgggcccgaagctgcttgaagagtgcagagcgcttggcggctgcagaacgggcgacgccaaaattacaaaagcctatgatcttccggcgagatatgttatacatacggtggggccggtatggcacggaggcggaggcggtgaacgcgaactccttatatcgtgctacaggtgttctatggagcttgccgctgagcataactgtaaatctatcgcctttccgctgatatcggcgggtgtatacggatatccaaaggaggaagcgtttaaaatagcgtatgcgacgatagaagagtgtctaagtgagcagaaaaacgcggcatatggtgccggaaaatacactgtagatgcgggcagcacgggcgagggtgcagaaagagatgaaaatagtgacgcgggggaaatgacggtgtacattgccgcgtttgacagagaaatcatcgcgatagcagagagatatcttagccgcttgagatgaaaaattagaggcggaagcgttaccgttactgccgccgaaaataatttaaaaaataatatagataaattattaaatataatataaggaggaagatatgctttttatacagtatccaaaatgtaagacttgccaaaaggcaaagaaatggctcgatgagaataacatcgaatataccgaccgccatatcaaagaagaaaatccgagctacgaggagcttaaaagctggtatgaaaaaagcgggctgccgctcaagaaatttttcaatacgagcggcgttctctataaatctatgcagcttaaggataagctgcctgatatgagtgatgaagaacagctgaggcttcttgcatcggacggaatgcttgtaaaacgcccgcttgtcgtaaaatgcgataccgtgctcataggtttcaaggaagcggaatgggaggtgcttaaatgagagaagcagctccggctgaagcagtgctgcgcgaaaaattgttttcacttcaggacttgaaatacagagagtttcagtcaaagctgatgccgacgatagattctgatactgtaataggcgtgcgcacgccagatttgcgcaagctctcaaaggaatttgcaaagaccgagtatgcggagcaattcataaaatgcctgccgcatgaatactacgaagaaaacaacgtacatggctttataatagaggcagaaaaggattacggcgcggtgatagagaaaatcgaggattttttgccgtacatagacaactgggcgacatgcgacctcatatcaccgaaagtttttaaaaagcatctgccggagctttttgaaaagataaaagaatggacaaagtcagaacatacatatactgtgagatttggcattgggatgctcatgagatattatctggataaagaatttaaggccgagtatcttgaaattcccgcacaaataagttctgatgaatattatataaatatgatgattgcctggtattttgccacggcgcttgccaaacagtatgatgcggcgctgccgtatatagaaaacaggcggctcgatagatggacgcacaacaaagctattcaaaaagcaatagagagctatcgtgtgagtgccgaacaaaaggcgtatctgcgtacgctgaggataaaataaatagaaaagagaagaggacaatagagaaatggacagcatagaaaaaagaacggctatttttgagacgatgccgtaccgcagagcagtatgcaagcagataattcccgcgattacaagccagatgatagctcttgtctataatcttgccgatacgtattttgtaggaatgctcggagacccgaaccagacggctgcggtaactgttgctgctccgtcatttgttatgcttacggcaatttcaaaccttttcggtattggcggcgcgagcataatagcagcatcgctcggaaaaagagatatggaaagagcaagacagacttccgcagtgtcgttttgggccggactgggctctgcgtgtctgttttcactgattttttttatgctggcgtctccgatactgcgtctttcgggagcaacggacgagacttatgcaatcacatatgaatatgcaaaatgggttgttgtattaggcggctcggcggcaatattgaatacgctgctcgccaatctcgtgagggcggaaggcagcgcggcagcagcgtcgtttggtgtttctatgggcgggcttataaatattatgctcgatgtttttcttgtgctgcctcattttgcgggacttggtgctgcaggagcggggattgcaacggcggtgtcaaacttttgtgcagccatatattttatgctgtatatactcataaaaagaaaatcaacggtaatttccataaacccgcggcttttaaaatatgcgtcgcttcatataaaggagattttgaaaatcggttttccatcggcggtgcagtatgcgctgacggtggttgcggttgcagcgcagtcaaaatttgtctccaggtatgtcactgaggccgtggcaggactcggaatcgtaaagaagctcgatcagctgccgctgtacttttctataggcgtagccaacggacttttaccgctgctcgcatataacaatgcggccggcaatcacgagcgcagaaaaaatgcgtttcgcttcggctgcattgtatcgtttggctttgcatttctgtgccttatagtctatgaaatatttgcggagccactggccggtatttttatagatgataggctgactgcggagtatgcggcgtctttccttcgcattatggtaacggcgatgccgctgatggctgtttgctatcctatgatagtgcagtttcaggcaattggcagattaaaagagtcgcttgtgtgctctgttgcgagaaagggtgtactcgatattccgctgcttttcatactcgatagattatggtcgctctatggatgtatggctgtgcagccggtggtagatgcgatatcgctggtaattgcactggtattttatttcaggataaacgctgaaaatagagctgtatgatatttgcggcggtgaaaaataaatcggaaattttccgagcaaaaatttaaaaaacaaaggctgaaaaaagaaaaccacgcgtttgacgcgtggctgtgtttttgttttttatttctgcggcagcgagcgggctttggaattgtccatatgcacttccatcgcgcgcgctccggcttcggcgtcgcgcgcttttatggcgttgaatatcgcgcggtgttcgtcaaagacgatgcgcagatactcgtcgtcgtttttaggtgtcgtccggatgtgttttatgtatatctgataagaagcgagcatatggcttagcattctgttgtgcgatgcggagtatatgagctggtgaaaatgggtgttgatgttgagcattttttctttatcgcacttcatagtataaaattccataaattcaaatgtctcttcgagctggtcgagctcttcatcggtaatgcgttcaacagcccagcggacagcctgtatttcgtaaatcttgcgcagctggtacatatcctctatgtcttgctgagaaagcccgattacatacgcgcctctgttggggatgctttcgacaagtccgtcagtttcaagctgacgcagcgcttctcttaccggagtacggctgacgctgtactgctcacatattttttgttcggtgagcttctcgcccgagcgtatttttcccgtcaaaatgtcagtttgaagtctcgaaaaaagattactcgaaagaggctggttcgtgcctgcctgctcgggtgaaaatttataaattgccatttgaaaggcctcctttaagcttgtagtagtttgttctgtaaaaaattaaaggtgtttcataacaatagcggaaaaatcggcggcgctgtttccgtctgccgtaccggacatattgagagattccgaggcgaggtttacggcgctgtcgagcttagcggccttttccgccattccgatgtgacgaaggagcataacagcggccttcataatgcttgccgggttagctttgtctgcgataccgtccctgaccatacgcggtgcgctgccgtgaatagcttcaaacatcgcgtatttggcgccgacattggcgcttcctgcagtacctacgccgccctgtatctgagcggcttcgtccgtgatgatatcgccgtagagattaggaagcacgaatacctgaaaatcggcgcggatatcgggatttacgaggttggcagccattatatcgacataccagtcgtctgtcttgatatcgggatagtctttggccacgcgatagcagagatcgagaaattttccatctgtttttttcattatattcgctttagtaacgatagatacgcggcttttgccgttggctttggcaaactcaaaggcggcgcgcgcaatgcgctcggtgcctgctgtcgtcgtcactttaaaatctactgataaatcgtcggaaatgacaatacccttgcttccgagagaatattcaccttcggtgttttcacggtaaaacgtccagtcaattccaagttcaggaatggaaacgggccttacattggcgaagaggtcgagctcttttctgagcgtgacattggcgctttcgagattcggaagtccgctgtttttgtcgggagttgttgttgggcctttgaggagcacatcgcattccttgatggcggcgagcacggcttttggcacggtttcaccggctgcaactctgttttcaagcgtaaggcctgcgatcgggcgaagttcaatttttccgcttttgatttcctctgcaaggagcttttcgagtacattgacggtttctgtcattataacggggccgatgccatcaccagggatgatgcccacggtaattttatcagcttgggcataatccgtaaaggaagagccttcttttaggagttcagcgcgtgcaagctgctcgcatatgagctgctgaaatatttcaagatattcttcatttatattcgtatttttgtcattcattttaattctcctgttttagatagttgattttaccgcctgcaaggatcatagctgcttcgagctccgaaaaatcagcgtgagtcttgtatgttctgcctgtagtttcgttttttacttctatgtgctccgaacttgcctgagagactgcgttttcgatgacaagcttgtttccgagcgcgatgtcgtcataatctttaggatcgtcgaacacgagcggcataatgccgctgtttatgagattggagcggtgtatgcgtgcaaacgatttggcgattacaaattttacgccgagatagagaggcgcgagcgccgcatgttcgcggcttgagccttgtccatagttgtctccgccgacgatagcgcaggagcctttggctttacatctttcagcaaagccggcgtcaattttctcaaagcagtagtttgccaggtgcggaacattggagcggaaaggaagcagtctcgagtccgaaggcataatatcgtccgttgtgatgttattgcctgcaacgagtgtcacttccgcgcttactgtatcggaaagcgctgtatttcgtgggaaaggcttgatgttcggacccatttcaacaggaatgcatgatttgcaggcaccgcatggatttattgtaaaactgtcaattttttcagtctcgcaaagctttatttcaggaagagcaagtcccgtagtgctgccgtcggtgagcacgccttttatagcggaaatggccgctgtttccgggctcacaaggtacacggaagcgtcgtttgtgccggagcgtcctttgaagtttctattgaatgtacgaagagaaacagcgcctgacttcggagattgacccattccgatgcaggggccgcaggcattttcgatgatgcgcgcgcctgatgctatcatatccgcgagagcgccgttcttcgccagctgcgcgagtatacggctcgagccaggactgattacgagcgaaacatcgggatgcactttgttcccttttaatattgacgctactttcataaggtctgtgtaggaggagtttgtacagctgccgatagcgacctgatctatttttatctcgccgatttctttgacgcttgctacattgtcagggctgtggggcattgcagcaagaggggcgagagtgctgagatcgacttcgaggattttgtcgtatacggcgtcttcatctgctgcgagcggcacaaagtcgcctgcgcgcccctgaagacgcaggtactcttttgtattttcgtcgcttgggaatactgatgtagttgcaccgagctcggcacccatattggtaatggtagctctgtcggtaactgagagcgtctttacaccctcgccgaaatattcaacaatgtagcctacgccgcctttaacggtgagttcctttaaaacatggagaatgacatccttagctgacgaccacataggcagcttgcctgtgagcttaattccaattactttcggtacgctaaggctgtaggtgcctttggccatagcgacagcaacatcgagaccgcccgcacctatggcaatcattccaagaccgcctcctgttggagtatggctgtctgagccgagaagtgttttgccaggcacgccgtagttttcgagatgaagctggtggcagataccgtttcccggtttgctgaatatgacgccgtgacgctgcgctacgctcttgatgaaagcgtggtcatcggcattttcaaagccggtttgaagcgtgttgtggtctatgtatgctacggaaagttcagttttgattttttccgtgtccatagcttcaagctggaggtataccattgtgcccgttgaatcctgcgtgagtgtttgatctatttttacggtaatttcgcttccgggagtaagctcgccggaaataaggtgattttcaagtattttgtacgctaatgttttacccattgttttctcctttttacttataattgtgcgtctgggatggcagagcacgaaaattgaatacttgtatacaattataaggctatacgcttttaaagtcaagcatggttataaaaatatagacatattaagagcataaaattttaaaatttacataaagtattaaaaaatattgcggggtgagcattttgaaatcaaaaatagaatggaagctttttataatatgcctggcggtgcctttggctgtaggcgggttgtccgcatttttgacaaacagcagtatgaaacagttcgcggagctcaggcagccgcctctttctccgccggcctggctttttcctgtggtatggactttactttttgcaatgatgggcattgcttcctatatcataataatgagcggcggccgcggtggttttccggagcggaacgctgaagttcgttctgcgataattttgtatggactacagctggctgtaaatttttgctggccgctgctgtttttcaatatgaaaatgtatctcgtagcatttatgtggctgctgcttttgtgggtaatgatagttacgatgttttttttgttttatcgcctttcaaaaactgcggggtatcttgtcgtgccgtatgttctttgggtgacttttgcgggatatcttaatctgggaatatattttttgaattaaaatatcggcagtatgcggtgaggccgcatctttcacaggcgggattgcgcgcagagcagcagtaacggccatgaaatatgaggctgtgatgagtatgcgaccagcgattttcaggcagcgcttccatgagagccttttctgttgtcagaacatctttttcattggtaagacctatgcggtttgcaactctgaacacatgtgtgtctacagctatgcgctgatgaccgaagccttcggcaagcacaacatttgcagttttgcggcccacacctgggagctcgatgagcttatcgtagtcttccgggacttcaccgccgtatttttcagagagtaccgatgcgagccggaggaggtttgcggattttgtgcggtacataccgatgctgtgtatcatttcggcaatgctgtctgtgccgagtgcaaagatttcgtcatcactaagttcagcggcggatacgttaagtccgcgcgcttcggcttcgatataacctgctcgtgccatcgttttggcatcggggtatttggcaaagagcgcgggtgttactttgtttacgcttttgtctgttgtctgtgcggaaagcacgacggcaacgatgagctgaaaattgttttcaaaattcagctcgcagcccgcatcaggatacattttttcgagctcgttcagtatattttctatatccttttcgctgaaatattttgtggatgttggtgtagcttctgccatatgtatattcctcaatgtaaaattattaaaaaatcctatttttgatatcaaaattatacatcttggagccttaaattgcaatataacgaaattaactgacactcgatatttaccgagaaaattaagcgcagaatctttaacaaaaaatttaccgaccgatgggtcggttttttgttgacatagtgatataaaatagtatattatactattattgacccacgggtcggaaattttttatcgggaggaacaggctttgaatcagaaaagcgaaaacacagtaaaaaagaaaagcattgcagagaggataaaggaacataaagtaattgcagcgttggtgtttatacttgcggctatagttattgtaagacttatagcgtttgcggtaggaagcataaacccgactgtagcggaaagtgaggctatcggcgtaaaggttatgactgctgaatatacggatatttcctcgaccgttccgctttcgggacgtatagcgccggcggaagaaacggccatcgtaccgatggcgtcagggcaggtaacggcggtgcatgtaaaagtcggagattatgtaaaagccggcacacttttgtttgaaatagacaaagggcaggtggctactacatacaatcaggctaaggcggcgtacgatcttgctgcaaacagctacaataatatgaaaacactctatctcgaaggggccataagcaaatctgactttgatgcggctgaggtacagtacatttcggcgcgtgaatcgtacaacgcggcggcagaagcatacagctattataatgttacatcgcctatagacggttatgttacatcgctttctgtagccgtcggcgatatagcaggtcagcagatggcagcgtctgttgccaatactgatgagcttaaaatagaaacgacagtttctgaatatatcgcaggttacataaaaatcggcgacgaggtagatgtatatgtatcaacgctcggagacacgccttataagggaacggtaacggctttttcaccggctcctgcacttggcacgctcacatatccgataacgataacactcgacaacgaaagcggtgatctcatgtcgggaatgtttgcggaagtaaaattcacagctgaagaagcagacgatactatctgtattccgtcggacgcggtaataatgaaaaacgggaaatcggtagcggtaattattgatgaggacctcattccttcgttccgtgaggtggagacgggcatagacaacggagaatttgttgaaatactttcaggtattaaagaaggagaaactgtcgttatttcagggcagaacttcgttgaagaaggaatagctgtgagaatcattgaagaagatgacagccagacggacgaaagcaaaaatgaagaaaacagcgctgatgtaagcgctgaggatgacgaataatcagaaggggtcttaacatatgaatttatcaaatttatcaattaaaagaccggtagcaaccataatgctgctgctaatagtagtagtgctcggcgttttctcggtaatgagcattccgctcgatctgatgccgtcgatagaacttccggttgctatggttatgactacatattctaattcatcgcctgaggaagtagagagtatggtcacagaacctctcgaatcggcgcttgcagcagtcgagggtcttgagactctcatatcgtacagtatggagggaacatctattgtagctgtgcagttcgatatggatactgatatggactttgcgacgctcgatatgcgtgaaaaaatagcgttagtagccgattatcttcctgatgcggcgtctgagcctatggtaatgaagatggatatgaacagcatgcctgtcgtgcagctttacatatcatctgaagaaatgacgcttgccgaacttaacgaaaaggtggaaaacaacatcgtgccttattttgaaagagcttcgggcgttgcttcggtaagcgtatccggaggagtggaagaagaagttgcgattaaattttcacaggaagaattaaatctttacggactcacgctctcgaccgtagctcaaatgcttgcggcagaaaatataaatctgccttccggaagcatagacagaggtgcgtcagaagtagttgtaagaacgatcggcgaatttgacaatgcagatgatattgcaaatctgccgattacgatcgcggacaggagcattgtaaggcttggggatattgcgactgttactcaggggtatcaggagcaggaaagtataacgagaatagacggcaaaactgcaataggcgttatgatatcaaagcagtcagacgccaatacggtagatgtctgcgataatgtggaagaggttatggcaagtcttgaagcgagcaacccggatatgacgtttacgataggatccaatcaggcggattacataaaggcctcggtttcctcggtagtacagtcggcgctcgagggcggactgcttgctattatagtggtattcctcttcctcagaaatatgcgtacgacgatgattatcgcggtttcgataccgacgtcacttttggcagcgttttcagtgatgaagctgctcgacatcacactcaatctggtaacgctgtgcgcgataacgattgtggtcggaatgcttgtggacaactcaatagtagtgctcgaaaacatatttagaagaagacaggagatgggcgatgcgatggaggcggcgagagtcggctcaacagaaatttttacagcaatcgtaatgtctacgctcacgacaattatggtattcatacctattgcaatgagcgacggtatagcgtcgatgatgttcaaagaattctgctggacgatagtaattgcactcgtagcttcactcattgtgtctgttacagtaattccaatgctttgctcgcgtataatgaggggtactgtatcgactgaatatattcgcataggggataggcgctacaagtataagtttataaataaattcggtgattttatagaaaatgtaaaatttaagtatgaaaaaggtatcagatgggcgcttggaaaacgcaaaaaggtgatcataagctgcatgctcatatttttcatatcgcttggattcattatgacggtaggatttgagctgcttccggaatcggatgaaggcagcatcagtatatcggcggagttcccgtacggtacgccgctggaaaagaaggatgtagtgatgagccaaattgaagattatgtgctcacggtgccggaagtagagcatatctcgatgtcgacagattccataagcagtatgtctacatcgaacagcgcgacggtgacgataactctcgttgacagaagcgacagaaagagatcctccgaggaagtagccagcgaactcagggaggcttttgcggatataaccgatgccgatattgaagcggaggcgtcatcatctgtaatgggtatgttcggttcgagcgatgtaagtcttatgataaagggccaggatcgcgagacgctcgaaagcataggctacgatcttgtagatacggtaaaggcacttgactgcgtagaatctgcttcacttgatataactgagggtaacccggaaataaaagtaaaaatagacagaacaacggcttcatactacggtattacggcgtatcagctggctggcagcctttcgagtgcgataagcggcactacggcaacgacattgactgtagatggaactgatatagatgtaaacctttcgcttaacgaggaagcggcatcatccgtagagagtatgaagcagataatgataaccgggtcatatggtacgtcggtacctgtcggacagattgcaacatttgaatacgacaacgcgccgagcctgatacagcgtgacaatcagacaaattatataacgctcaatgtagatgtagcgggaaacagcgccacgaatggatcaagcgaagtaataagagcagtaaattcatatatgttccctgacggatattatatagaagaaagcggcgtatatgatcagatgatggaagctttcggcagtctgtttaaagcgctcataatagcaatagcgctcgtattcctgctcctcgcggcgcagttcgaatcggtgacgcttgcatttgtggtaataatggcggtgccgtttgcgatgtcgggagcgttcctcatgatgttccttacgggaacgtcgctttcgatgacctcgttcttgggactcataatcctcgtaggtatcgttgtaaataactcgatacttctcgtagaatttataaagcagaatgaagaaacactcggtattaaagaagcccttgtacaggctggaatgatgagacttcgtcctattctcatgagctgtattacaacggtagtaggtatgataccgctttcgctcggactcggagaaggcggagaaatgcttgcgccgatggcgatttcgatcataggcggacttatagcgtctacgcttgtaacgctgttcctcattccgattttatatgacatcataaatgacaggaaaaataagaaaaagcttaagcaagaagaaaaagcggcacacacagcagagctcgaagctatgtgggcaaaggaggatgctttagttgagtagcgaaagtgtaaagaaggaaaagaagaaagaagaaattgccaatgcagcgtttcgcctttttatgaaaaacgggtattccaatacaaaaatagcggatatcgccgacgagacaaatataggaaaaggcacggtgtatgagtattttaagagcaaggacgatatcttgctttacgtgatactgaataatataacaagagagtttagcgatttgccggagcttatcgcgcagcatgattcgttttatgataagctgaaggtgtacatagattttgaagttgctttcagtaataagttcggcaggtatgctactgaagtcaaacagcttgtagtagaacctatggatgtaaagctgtcaaaagaaatacgaaacgctatctgtgatcttattcagctcgaatacaagattgtctttgatatcattgaatacggcattggtggtaataggattagaaatatgaataaaatgctggcaacgcattttatagtaggcctttcatccatatacgcggcgctcaaatgcggtgtggcgaccgatcttggcataccgattccggaagagttttggaatgaaattgagaactatactgtggatgatattattgacctgataaagaacggtatcggcatttagaattttatatttatccttagcaatctccgctgacgtctaaattgttggatggcggcggagatttattttgcaaaaatatcataaacggttgcaataaaagaaaaacggggctatactctatacagtcttaatttaatttgcggcatattttacagtataggaggtcacaagaggcgtaaaatgagtaaagataaaagggtacagacaaatctgatgacggagggcagcgtgtggaagagtatacttttcttttctgtgccgcttatactcggtaatctgctgcagcagatgtataacaccgtggattcgattatagttggtaactgtgttggcgacagcgcgctggcggcggtgggctcaagctcatcgcttatttatcttctgatagcattcagtcagggggcgtctgtgggagcgggaattgtcgtatcgcagtttctgggagcagaggaaagagaaaatgtgcaggatgcggtgcatacggcgctggcggtatcggtactgcttggtattgtgcttacagctgcggggattctctttacgccgcagctgcttgcttggatgaaaacaccgagcgatgtaatggaagagtctgtgctatatctcaaaatatattccggcggacttatttttaatataatttacaatatggcggcgggaattttaaacgcggtggggaattcaaagcgttcgcttctttatctggcggccgcgtctgtcgttaatattggacttgatttactcttaatatcggggcttaaaatgggcgtttccggtgcggcgctggctacggatatcagccaggcagtgtcatgcgtgctttcgcttgtatttctgatgcgagttcagtccgattatcgcgtgagcctaaggcggatacgctttaaaaaagcgatggtagtaaaaattgtacgaattggactgccggcgggaatacagaatatggttatctcgctttccaatgtcattatgcagtcgggaatcaatagttttggcaagaaggcaatggcgggctttggtgcgtatatgaaaatagacggctttaatatcctgccggtgcttagcttcagtatggcagtgacaacctttgtggggcaaaatttcggtgccggcaataaagagcgcatgaaaaagggaatgtgggtgacattagttatggggctcatttatacgattgtaacaggagtgctgctgcttgtttttgcatctcagatagtgggtctatttaataaagatgcacaggtaataagatacggagtgcttgcaacgcggtatttctgcccattttattttatcctgagtattctgcacggactggcgggaacggtgcgcggaacgggaaggacgattccgccgatggttattttgcttgcgtcgctgtgtatttttagaattgcagctatgaagattatagtgcctcattttgatacgatagacagcatttacatattatatccgatttcatggcttataggcgcagtcctcatggtattatatgtatggaaaggtaaatggcaagagaatttataaagatgatttgggcctgatctaagttaagcggcaggcgcaaagaggaatgagttttgaaaatatttcaggagtttgctaaatggaacagagaactttttttgaaagggaaatgagccagccgctggcggcgaggctgagaccgcagacaatagaagagtatgtggggcagaagcatctgcttggtgaaggtaaggtgctgcgtcgccttatcgagagcgataatatctcgtcgatgattttttgggggccgcccggagttggcaagactacgctggcgcgcataatagcaagcagaacaaaggccgcttttatcgatttttcagcggtcacgagcggtattaaggagataaaaacggtgatgcagcaggctgagagtaacaggctttacggtgaacgcacgatagtatttgtggacgagattcacaggtttaacaaggcgcagcaggatgcttttctgccgtttgtggaaaaaggcagcatcgtgctcataggtgcgactacggaaaatccgtcatttgagataaacagcgcgctgctttcacgctgcaaggtgttcgtaatgcaagcgttgtcggaagcggatttgcttgagcttcttaaacgcgcgctcagtgatgagcgcggcttcggcaggcaaaaggtgaagattgcggatgaagcgcttgcgatgatagccgtgtttgcaaacggtgatgcgcgcacggcgctttcgacgctggaaatggtggtattaaacggagaaacggacggtgacagtgtcaatgtgacggaagagaccgtcgagcagtgcatttccaaaaaatcgcttatatatgataaaaaaggtgaggagcattataacataatctcggcgcttcacaaatctatgagaaattcagatcctgacgcggcagtttactggctggcgcgtatgcttgaggcgggtgaggatccgctttatgtagcgcggcgtatcatacgttttgcgagcgaggatatagggcttgccgatccgcgggcgcttgagatcgctgtagcagcatatcaggcgtgtcatttcataggaatgccggaatgcacggtaaatctgacggaggctgtcgtgtatatgtcgatggtgccgaaatcaaatgctttgtatgtggcctatgaaagtgccaagaatgatgcgctgtcgcagcttgcggagcctgtgccgcttgtgataagaaatgcgccgacgaaattgatgaaagagcttgattacggcaagggctatcagtatgcgcacgatacggaagaaaagctgacctcgatgcagtgcctgcccgactcgcttcttgggcgtgaatattacaagccgacttcacagggcactgaagccaagtttaaagagcggcttgagcagataaaagagtggaagaaacagcataaataattaaaggaaagggaaaattgctatggatatagaagctgtgatttttgatatggacggtactctttgggacagcgccaagtcggtggcggcagcatggagtcgtgttgtttccgggattgaagatttgaatattactgtcactgagagtaaggtgaggggcgtgatggggctgcctatggacgagattgcagctaagctctttgcgacaggagatgaggcgctcgacaatgagattatgaacaggtgcggcgattatgaaaatgtctatctgcgcaggcacggcggtgtgctgtacgatggccttgaggaaacacttgcagcgcttgcgaagaaatacaaactattcatagtcagcaattgtcagtcgggatatatcgaggcatttctcgattactacggttttgcaaggtattttacggattttacctgttggggtgacaataaagtaagcaaagataacaacataaaactgatatgtgaaagaaacggtgtggcggcaaaggcagccgtctatgtcggcgacacgcagggcgactgcgtgagcgcgtaccgtgccggtacgcgctttgcctttgccgcttatggctttggagaagccgaccgttatgatataattttaaacagcattacagatcttataaatgtattgtgatatttaaagcggcagctcaaagaaactgcttttcattcgtaaagaaaataagaggatagaaaaattttatttatttgcgccgcagcatttcttgtacttcttgccgctgccgcaggggcacggatcgtttctgccgggttctttttctttaacgactgtgcgtgaacgtctccattcgtcggcgagtgcttttctttcgtccaaagtcaggataccgtcccactcttcaagcccgaacaggtagtcagcctgtgcgttgatcatattatagaaaagcctgtcccaaataatatcgagtttgatttcactgtcttccgtaatttcttcgaggtcgaaaggtttttttaggctcgtctgaataccgtcgagaaaccccataaatataacaggatcggcttcatatttctcagccatttctttgaaaactcccgaaacttcagcctgcttgtcctttagtatgccctgatatatgcgctgctctgtcgaactgtatttttcccaaaattcatcaaaagttttatcggtctgaccttcgattaaatctgtccaatctttgtaaagtgacatttacattcctcctcaatctgtagtttatttaaagcttttggcgatttcgattacatcgcccacaactgcacttcccgttggcattgcgcctgcaccgcggccatagaacatcagctcgccgactgcatttcctgtaataaatactgcgttaaattcattgcttactccagcaagcgggtggtcgtttggaagcagcatcggctttacgctgtattcgagcttgccgttttctgcacagtctgaacagctcgtgccgttcattttagcatgtgcaatcagctttatcttgcagccctttaatgccgcagcctcaatgtctgctgctgtgattttgctgatgcctgtagttgggatattttccggctttatatactggccgaaggcgagcgccattaatatggtgagtttatttgccacatctatgccctcaacatcggctgtcgggtctgcttcggcgaagccgagctcctgagcatttttaagggctacatcgtaaggcagtttttcctctgccatttttgtgagaatataatttgttgtaccgttgacaatacccattatttcggtgaattcgttgccgcgcagtactgtttctatagcatttagtataggaatacctccgccgacagacgcttcaaatttaaactgcactccgttttcagccgccgcttcagtgagtttgtcgtagttggccgctatcgccgctttatttgccgtaactacatgctttccgtttttcatagcgctgagcataaaagttgtagccggttcgatgccgccaagagcctcaacgacaatgtcgatttccggatttttaattatttcgtccggatcatccgtaataatttccggatttatatctatatcgcgctttttgtttttgctgcgtgcgagcactccggaaacggtgatttcgcatccggaagccttagcgatactggctgagttaagcgaaaaaatttggaacgctccgcttccgacgttgcctattccgaggagtccgattttaactgttttcatatagtcttctcctttatacttataaactaatacaatgatagaattatataacattttttaaaatttgtctttatattttcggaaaaacattaaaatcataaaaaatcacataatttcagtataatgcgctgattatgagcacttggaaaaatgttgcgtacagtaaaatgctggcgcgatattcattagaacatatggaagtaacaaacatagaatagaccttttaaccaatagcttaaagaaaagcaaagatgaaaagattgtaccgctctttaccaaaaggtgtaggttttagaaagcatttcctaatcatttcttttgtcgcgcaatagcgaatttttttgctcatcgggtatggcaatatctgcaaatctatgttattatgatattggttagcctgataagtcaatttaccaaaacctacaccttttggtaaagagcgg

SEQ ID NO: 2375 - DNA, 9634 bp, Unknown
  16S sequences of unknown bacteria
ggggattctatgttgtctatgcttttttaaactcagcttgccgtcacgttgttatacattttataggcgcgggtattggcgtcgttgtcaaaatactgcatgacgacgcagcgtttcagagtttcttcgtcggggtattgcgcgaaaagctggcgggtgagctgttctttatccgcagtgagtttatagccgtcgccgaagaaatagctcaaatcatattccgcggtgtccgcagcgtccttttctgcgccgtaggtatcttgtacgtagtcaaagacttcctcgcccgcgatacagctcgtataaccgatataatacatattccgaatgacgttttcgggcatagaaagaaaattgacgaacattgtcgccgcttctacttcttccgcatctttcatcaatacccagccgtcaaaccaaagattggaggcggaatcgggaatacagtagtcgtagcggtagcggtcatcgatcggtttttcttcatcctccgcttcgtccataattgtcaccgcatcgccgctccattgataagaaatatcgatatttcccgcggcgacttcttcttttgccgtatccgtttcaaaaccccagaaattcctgttggcttttttattcatattcttttttaaaagattttcgacggcgttcatggtttcgacggaggtatcgttcatcatttccgcaagctcctgtttataggcttcttccgtgatggttcccatttcgaaaagctgctttaaagccaggagttcggcttcgtaatacagacccagtccttcaaaataggcgtcgcgcacattatctttggcggaaatagaaaagccgcctttattggtatacgcagtccaggattttacgacttcggaatctactttatcataattaaacgtgaagcccgtcgtaccccacatatatcccgccgcataattccaccaggaagcattatccgaagttttcccttctttaaaaattttctctatatacggggaaacgttattgacgtaataattcgtttccaaagcggtgtcgtaaaagctttcgggaaacttttgcagtaatccttccgccgccattttcatgatcatgtattcggaagggcagagcaggtcgtatttatcgcctctacccacgctggaatacatcaattcattggtgtcgatagggatgtactccacttttatttttttgcccgtctgctcgtgataccaatcctcaaaatcctcgtaaagagatttgttggaagaatcgatgctgtttttgcctccttcgtcgatgtaatccgcccagcttcctacgcgcagaacgggcgttttgctgcacgcggtcaaggcggcgaaagacgcgctgatcatggatgccgcaagaacggcggaaacgatttttttcattgttgtttactccttgtttttttgtatgaaatgatattcgtcgtgatgagaacaatcacgatgattgcgaaaataacggcggtaaacgcccaataggaagccttgatctccgccacgtttttgcctttcgtcagtccgtagatatgcgtgctgatggtctgaaatgtcccgggcttggtataagcggcgatgacataatcgtcgagcgaaagggtaacggcgagaagaaatcccgaaacgatgccgggcagtatctgcggcacgatcaccgtaaacagtgcccgcgtaggcgttgcgccgagatcgagcgccgcctcgtaaagattgttgtccatctgtctgagtttaggtatgacggaaaggacgacgaacggcgtacagagcaccatctgtcccaatacgaggggaatgaaggtggatttgtctatttccaaaaaagcgacgagcagggcgaacgaaatagccgtaacgacctccgcattgatgacggggatctgattgatgcctttcagcgccgaagaagcgcgtttgttggaatagaagataccgatggcgcccacggtgccgagaagggtggacaatgttgccacgattgccgcgagaagcagggtttccaagacgatgggcagaggctcgttgtcgaaactgaaaaaatatttgtagtgttccaaactgaatcccgtccaggtcttgatggtgttgctttggttgaaactattgatcgtaagcaacaggataggcgcataaatgaagaagagaatgagtcctacaaacagccatttgaggcaggttcttatttttaccataacgaagtacctctcgtttccgtctgttcatccgaacgaaaaccgcccgtcagccatgtgaagagaaacatcagaaggagcagaagcaaagcggtgacggagccgttgccccataaggaagaattaaacgctctttcgataaaagaaccgataatggtgacgctgttgttcgtcagccaattggaaacgacgtaatttgtcatggacggaaggaataccatggaaacgccgcttgcgattcccgcttttgacaaaggcagcgtaattttaagaaaggctttccccgacgaggcgccgaggtcccgcgcggcttccagatagctcttgtcgatcttgataatggtcgtgtaaatgggcaggatcataaagggcaggaaatcgtagaccataccgacgatggtattgaaaatatcccattccgccttgttatagatgccgatccagatgaaaagttctttaagcgcattgatgcgaagaacgaaatttacccacatgggaacgacaaacaaaagaagcagtacggacttgtttttcagattgcagttggcaatgatataggcgacgggataggcgataaaaagacagacgagggtgctgacggtagagatgagcagactgcgtccgatggtcttggcggtgctggaacggaaaaatcccgcaatgccgtttccgtcgccgctgaaaaattcgcggaagttctctaacgtaaactctccctttccgttcgtgaacgcataatagatgataatcaggaggggaacgactacgaacagcgcgagaaaaagtccgtagggaatcgcgagcagttttcgggaaaaatgcggtttcgtattcgtcattttttgccctcctccggatttttcagcgtgagcttaattttatccttgggaatgatcaggctgacgaagtcgttttcgttccacaggtcttcgcaggcgagcacgtaatcttcctcgttctccgtcctgacgatatagcggtaatactcgctcttgtagatgagggagatgatgtgcccctgcgcgccgccttcgtcgggattgtcgctcatggtgatgtcgtgaagtcccacttcgacgttgacttccgcgtccgtcaggtcgattttttctcccttggcggtgatgagatagccttcctcgtccaaatgacttcccggatacagctgtgtgacgtcgcattcaaattcgccgtcgccgaattccacgttgtttttcttattgataattcccgcgaatttattgacgcggaagagttttttcatgacatggatgccgtcgggatcgattgcaagaccgatcgtttcgcccgttttcggggcggaagtgctctgaatttctatctcgtttctgccgcattggacgagtatttgatagtggatgcccttgaagatgacggaggtgacttttccctttaaaacgccctgttccacggggacgatcctcacgtcctcgggacgcacgacgacgtcgacgggctcgtctttttcaaaaccgccgtcctcgcagacgaaagattttccgcagaagcggacgagataatcttttggcatcgttcccgaaaagatattgctttctccgatgaaatcggcgacaaaagtatttttcggttcgttgtaaatcatctcgggcgtgccgatctgctgaatgtatccgtccgccatgaccacgatggtatccgacatggtgagggcttcttcctgatcgtgggtgacgtagataaacgtgatgcccaggcgctgatgcatggctttgagttccagctgcatctcttttctcattttgagatcgagcgcgccgagcggctcgtcgaggaggagaatctccggctcgttgacaatggcgcgggcgatggcgatacgctgctgctgccctcccgaaagggtggaaatgctccgcttttcaaagccttccaaatcgaccacttccagcgcgtttttcactttttcctgaatttccgccttggagagcttggtgcgctttattttctgcctgccctttttatccacatagggagtttctatctctttgagtttcagtccgaaggccacgttgtcaaatacgttgagatggggaaacagggcgtatttttgaaagaccgtattgacggggcggcggttgggggggagattgctgatatccttgccgttgaggagtatttttccctccgtcggcatctcgaaccccgcgatcatgcgcagcgtggtggttttgccgcagcccgaaggccctaaaaaagtgacgaattcgcctttgcgtacgtaaaggttcatattgtcgatgacactgacgccgtcgaattctttggaaacgtttacgagttcgatgatgtttgccgcatttttttccatagtggttctcccgaaacggcgctcgccgcgctcgtttccttcttgataatatctgaattttacgcctctgtgatctcggcggcgcaaaattattttttattttttttgtgcgccgtgatgatcgtatagctgtaagcgttgatggtgatgacgcagccgtccgcttcgacgtaccaatttttgcccgttctcgacacggatgcctcggacgaatttattttgtctttgcaccaatcgacggccttgtccgtagtcaaagacagatttttctgaatccgcctatttcccaattccgtcgtatgcaatttttccaggttttcgatcaaaggattttgcatggcttttcccgttatgtcgctcgcaaaggggcgggtacaaaaatcaaaagttcggaggcgtggagatccagaggaatctcgcgcggctcttgcttttattgagaatgctgtgcggcttgctcgcggaataatagaacgcctcgccttttttacatatataatgtttgctgccgagaacgacggcgatcctgccttccaggacatagccgaattcctcgccttcgtgggggatgtcttccgacgcggaagcgccttccgcaagctctacgaggacaggttccagcatatttttttgagcgttgggaatcagccatttccagagcacgccctccgaatctttctcgaaaaattcgtctttcgtaaacaccactttttcgtccgcctcttcgcggaaaaattccgaaagattgcttcccagagcggaaagaatgtcggtgagggtcgcaatagagggactgtttaagttattttcgagctgagagatatatccctttgtcagctcgcagcggtcggctagttcttcctgcgtcaatcccttttggttgcgcatctgtttgatttttttacccaggtccataggagcgcctcctcgcgtgttttcggcagtcgggttttgtaaaagtaaacttttttctttgttaaaacaagccttttttcgtgtttgttaataataaacgaaaagtttagttaaaataaactcacgtaccgcggataattatattgtatagagagagatttgtcaatcgtttggaagccgtttttacaatattttcataaaaatttttcggcggctcgaaaaggcgacgtcaaagcaaaaaattcgtcccttgcgggattgataaatcgtcgtaggaggactcgtcggcgagggcaaagaaacacaccgcaagcgccggatagcggggaaagggcgcgaggggtataaaaaagcttcccgttatatcgggaagcaaaagagcataagacttcggaacaaggatttaaaaattcttgccgcgctaaaaacctctgagaagaggcgacggaaagggagagaggaggaaaaagaggaaaacgatattacgacgcgcagcatccggggggcaataaaaattttcggcgtataggaaccatagaaatgataattctctgcggaaggcgggagccgttgacggataagcgccctccgcgaaacgtccgatcgcgatgtgaaaatttaatgggggaaaagattgcgtgtgcggagtaaaaggataaaaattcctttgggcgcaagcggttttaataaaataaaagtttgccggcatccgggaataaaaaatctccctttcgcataaacgctttcccgatcggcataaaatttttatgcaagagaggacaaaaaaacatctctttcaaaaaagggggaaagaaacgtgaaaaaaggtctacccgaaggcagaccctcatattcatataaataagtatcgaaaggaagtaagctaaggctatccgtcgattacgcgttcatcgcgtcgagctttttggcgagcttggattttctgttgttcgcgttgttcttgtggatgacgcccttggacgccgccgcgtcgatggcggaaacggtttcgggatagagtttcgtcgcttcttccttgttgcctgcttcgacagccgtaaggaatttcttgacctgcgttttaagcgcggactttactgctttgttctgctgggttttcttctcgataaccaatactcttttttttgcggatttaatattaggcatgatgatctccttattctttccttgtttttcttaaaatgaaattttgattgcatagattattttagcataaataatcgggcttgtaaactgtttttaaggtgtttcttccgaaaatcggcaaattttcggaaaattttttgtgcgggagggagattatgaggcttccggaaggaggaatcggatttttcgacagcgggctgggcgggcttaccgttctcgacgcctgcgcgaagcgtttacaggggattcctatttattattacggggacaattcccgcgcgccttacggcaatcttccccccgaaaaaatccgggactacgccgcggatgcgttcgacgttttcgcttcgctgaaagcgagagctgccgtgattgcctgcaatacggtgacggcggtctgcgcggatgcgttcagaaagaaatattcctttcccatcgtcggcgcggaacccgccgtaatgcctgcggcgagaaggggcggggaagtatttgtgctcgccacccgcgccaccgtcgaaagcgaacgctttaaaaggctttgccgccgcgccgagaaagaatatccccgcgtttctctgcgcagctttgcctgcgacagacttgcgggcgcgatagaggagcgcctctttgacgcgggggcaaagcgtcctttcgacttctctcccttctttcctcccggaaatcccgattcggtggtgctcggctgtacgcattatgtctttttaaaaaaacaggcggaaaatttttatcattgtcccgtttacgacggcaacgagggcatagcacgcgaactcactgccgtattgaaagaaaaatcctccccacagggggaactgcgaccactcggctccgcttttttatgcctttcgccactttcgaccaccgatcgcatttttttgcccttcggcggggaaagaacggctgattttcctctccatactcccgacggaaaagaatccgaagccgttttgtattccttcggcgggggagaagagccttttgcggaagatcttgtcgaatcccgaagtaagaacatacgttcgtgttgtttttttgaaaaagggcaaaaatgccccgaaaaacacggtttttttcctgttttttttctcggaagcggaaaaatggtcaataaaatagcctacgaacaaatgttcgctatgtaaatcggggatgattttagcaatacggggttaataatcccaaaaaaatagtactttttcaaaaaattttccaaaaaatacttgacaaagggacaagaatggttatataatgaaaacacgtaatgattagaagggggaggtgaaagatatggctgctttgttccggggcatttacgaacatcagctcgatgataaaaatcggctgcgtatcccggcgaagttcaaaaaagggctgacgggcgagcacggcgaaaagacgtatagtttcacccgcggcatcaacggctgtatctatgtcttccccgacgaagttctcgacgaaacgctggaagagctttccgaggaaaaactcggcgaagcctccaaggcgtccctcttgtttttcagttcgattttttcggcggaagaggacggacaaggaagggtagtgcttccttccaaactccgtcagatggcgggcatccaaaaggacgtcgtcactatcggcagaggcaagcggctggaaatttgggcggcggagaaatacaacgcgtatatcgaaggcgtcgattacgacgaggaattcaaaaaattggggatctgacaaatgttggaattttcgcacaagcccgtaatgctgcaagaatgtatgaacggcctgaacttgaaaaaggacggaatatattttgacggcacggtgggcggcggcggacattcctacgagattctcaaaagaacttctccctttggcagagtgatcgcgaccgacctcgacgacgaagcgatacgggcggcaaccgggcgcctttctccctttgaaggaagatttgccgtttataaatccaattataaggatttcgaacgggtgttcgacgaggcggggatagacaaggtggacggagcgctgctcgatttcggggtttcctctcatcagatagacgacgccgacagaggtttttcctatcggatacccgaagcgccgctcgatatgcggctggatcagacggctcctctgactgcggagatcgtgctcaacacctattccgaggaaaagctcgcctttctactcaaaacttacggagaggaatcgtttgccaaaacgattgcccgcaacatcgtaaaggagcgggaacgcagacctttcaaaacgtgcggggaatttgccgaagtcgtccgaaacagcattcccgcaaaattccgattcggcgccccctgcgagcgaaagagctttcaggcgatccgcatcgaagtgaacggagaattagacggattgtacgagctggtgctctccctgacgcggaggctgaaaaaaggcggcagaatcgccgttctcacttttcagtcgctggaagacagggcggtgaaagaggcgttcaaatatctcgaatgtccctgcacctgtccgaaaaaccttcccgtctgcgtgtgcggaaagaagcaggaaatcaaaatcattacgcataagccgatcacggcgggcacggaagagcttgcggaaaattccagaagcaaatgcgcgaagcttaggatcgccgagagaattctgtaaggggactcctttgcgggaaagaaaaacgaaaaaacaaaagaagaaataaaaacgagataccttaaaaaaacaaaagacaggtcaacgatgaatttgaattagcgaaaggcaagaggattgccgcaaggagagaaaaagatggctacggtattcgaaaacagacccgcacccgcatatacgccgccccaggaggacgcggctttacataacgctcttattaaggagcgctacgaaaaacttaaaaacgccgaggcgacgcagctcgcggaaagcatttccgaagcggagcgcgctccctacgccgcgccccgcgcggc

SEQ ID NO: 2376 - DNA, 4236 bp, Unknown
  16S sequences of unknown bacteria
ccgcccgccagtccgagcgtgtcgagaatgtcgaacttccgcgaattgtacatcgccgcgagcataccgagatcctcgtcgcgtacatactcgtaggttccgtcttccgagacgtctcttatcggagtcaggatatcgtagaaattatcctcgagcttcgcgcggcagttgtacgcgagcgcgtcggcgaccgtctcggcggcggtcatgtcggtggtcgtcatggagatcgagaataaccgcgtgtcgttcggcatcggggtcacatattcgtcctttttgtcgaatttcgggagcgggagaatgccgtatccctcatactcggacgctttgccgaccgtcgagaccgagaagacgcccttcgtgtcctcgctctcgttcttctttccgaagagagcggagatcttgtcggcaacgctcatcatgcgctcggacaaaggcgcgagggtcagcgtgtcctcttccttcaccttaacaagaaggctttcgcccgccgcgtggaagagcggagccgcgccgtcaaggtcgattgtcttgtccgccagcgccttcagcatctcgtcgagcgtccatttgccgctttccgcgagctcatagagactgtcgccgaaggtgtcacggtcaaaatagacgcagggcatattgtcgagcgaatccggcagaatgtccggaagagcgtagtaggtgcgatccttgtacgcgatatcctcggtcgcggacgggttccaccacggcttttccgggtcgatggtcgtcgacttgttcgcgccgaagtcgtagagcattccctgcgcgaggagctgggtcatgtatcccgcctcgaggaacatcatgtcgtagacggggtcagcggcgagaatggcactgcgtatcctgttataggcttcatttccgggcatatccgtttcggtgagacgcacattgaagagatcttcagtgcggatccggctgtcatagagattgtcgctccgcatatcgcccgagcgttcgtcgggcaataccgagttgctgtccggggacgagacaagcatcccgatatccctgccattgaagtccggcgggacggcgtcgctcgtgtaggagtatttgtagggttcgagaggctcgatctctgtctttgcctccgaggcaaccgccgccgcctgctgtgcggcgagcagcatcgcgagtatggctgcgaatgtgttcatgatctgtaccttcctttcgtttcgatcacgtatttttattccggtgaatattccggctttcgctctatcagacgaaagaaaaccagaaaagttccgaccagagcaaaatacgctgaaataaaatatctccgtattgatattttactattaccattctaccacagaatattccatttgtaaatagcggcgacgcaaatttcataaaaatttcttttttactccccacgcgaaaaaagtggcgcggaacgcgagaatgtaacataatattaattgacaaatcgggcggagtgaggtataatattataatgaacgcattttttgtaaagcaggagcggatatatttgatgaaaggttccttccgcgcggtccggagaaaggccgtcacgcttgtgtttctcgcgtttctgttcgtctttctgccgtgtgccggaatgctcccggcggtgacggtcggggcggcggggaacgggctcaccgagctcgaggacaagctcgcaaaggcggcaagacagcgaaaagaagccgagtcagccgtcaacaccgcgaaagccgaacgcgcggacgcgatgacgaaaaaacaggctatagatgcgcagattctcgccctcgataacgagaccgacgcccttgtcactctcatcgagggctatgaggcgcagatagacgagaaaaacaatgaaatatccgaggaaaccgtaaagctcgacgagcagtacaggatactcagacagcggatacgctcgatgcgtgaggacggcggggtcgaccttgtcgtgattctcttcgagtcggacgggctggttgattttctgacgcaggtcgaccggttctcgtgtatgctcgattacaacgggcggctgatggacaattactcgaagggcatcgcgtcgcttaactctatgaaggacgagctgacctcctcgaaagcggtgctcgagaagagaaagtcggagctcgacgagcgccgcgccgaactcgaggtgtcgaaaaaagaggcggaaaaactcgtcgcggacgccgagaaggacgtcgcgaccgccgagagcaccctcgcgagtgtcgaggcgctcgagaagaagtacggcgacgagcgctcaaagaagctcgcggagcttcaaaagacgactaacagtcagtacgtcggcggcatattcaagtggcctctgccgtcgaagtatgagaaggtttcctgcggcttcggctggcgcattcatcctgttaccggcaagccgcagttccacaacggaatcgatattccggcgccttacggcacggcgataaccgcggtcggcgacgggaccgtcgtcgaggtgtcgtacaactacgcggacgggtattacgtgacggtcgatcacggcggcggaatcgcgtcgttctactcgcacgtctcgaagtacgccgtcaaggtcggggacaaggtcaagtgcgggcagactatcgcttacgtcgggatgtccggctacgcgacggggtatcatctgaatctgaatatctacaaggattcggtcgcggtgaacccgctcgattattttaagggttgatttatgaagaagatcatactgattgcggttatgaccgcgcttgtggtgctgttcggctgcgcgtcgggaacagagccggaggagacaaagatagtcgctccgggagaaaacaataccgtgaccgcgcctgacgatacgtccgccgacatgacggatacttcggcggacacatccgatgaaacgaccgccgcggaggaaaagacgcctgaaaggctcgccgccgagaagataatgtcggaaatgacaattgacgagaagatcggtcagctgttcttctcgcggataccgacagattatgatactgccataagcgacatggagaagtaccaaccgggcggttacgtctttttcgcgtctgagttcgagaacaggactccggagacgatgaagacttataccgacgcgctgaagggggcggctaagatagtgccgcttctcgccgtcgacgaggagggcgggacggtcacaaggatatcgcggttcaagcagtaccgcgccgagaagtttttgtctccgcgcgagctgatggcgggtggtaccgagcttgtcgcgtcggatacccgtgagaagtgttcgctgataagttcgctcgggctgaatctgaatctcgcgccggtcgcggatatttctactgacccgaatgattttatttattatcgttcggcgggagaccttgtggcggcgactgattatgtgacggcttatgttacggagagcgtgaaggcgggcgtcgggtcggcgttgaagcatttcccgggatatgggaataatgtggatacgcataccgggatcgcggttgataagcgttccgcggagacgttcagggcttcggattttctgccgttcagggcggggattgacgccgggtgcgggatcgttatggtgtcgcataatattgtggagtgctttgataaggagaatccggcatcattgtcggcggaggtgcatcgggtgctgcgtgaggagctttcgtttgacggtgtgataacgacggatgaccttgctatgcaggcgataactgacagttacgggagcggcgaggcggcggtgcttgcgatagaggcgggcaatgacttgatttgctgttctgatttgtcggtgaagtacgaggctgtgaagtcggcgtatgagtccggtaggatatctctttcccgcatagaggagtcggtgctccgaatcttggagtacaaggtaacaatggggctgctgagctccgactgaaataaaacaaacatgggagctatataccagagtataaaagcttctggaaaagggggtgcaggggggaaaacctcttctcccctgcaaacgagggtataaataaaaatgaacagacaagagaagataagaaatttttcgataatagctcatatagaccatggaaagtcgacgcttgcagaccgtatacttgagtatacgaggactgtggctaagagggacatggaggagcagatacttgataatatggatcttgagcgggagcgggggattacaattaaggctcg

SEQ ID NO: 2377 - DNA, 4864 bp, Unknown
  16S sequences of unknown bacteria
aatcgaaaagacgccagtcttttcttctattccctcacttgaatcttaagtgatacttacagagggtgagtctcttagaatacacttgtagtctaaggaaaagaaaattgcttcgctctttctcgcgttcatctttttgtcaaaaagaaacaaaagaccacgcacgcgcgaaatgttttttattatatcggtttattgaattttttgtaaaaagtctgtataattaaaatagttttttattttgtctgcgttttgatataataaaatatttttttgttttcggagaatttaaaatgaagcttcttgaagatcgcatactaaaggacggtaaaatcggcgcgggaaacgtgctcaaagtggactgtttcctcaaccaccaaatcgacgtgccgtttatatcacagctcggacgcgaattttatgagctttataaagacgcaggcgtaaccaaaatactcacaatcgaagcttcgggaatcggaatagcctgccttacggctacatatttcggcgtacccgtagtatttgcgaaaaagacccccacaaacaacatttccggcgatgtatacacatccgaagtctacagctacacgcatgagtgcacatacactatccgcctgtcgaaggaatttttaaagcctgaggacaaggtgctcatcatagacgacttcctcgcaaagggaagcgcgcttcttgcgttattaaagctggtgaaggacgcgggagcagaggtatgcggcgccggtattgttattgagaaggcatatcagcccggaggagacattgtgcgcggcatgggagtgagggttgaatcccttgcgcgtgttgcgtccatggaagacgggaagataactttctgctgaaagtaaacaaaagccgtcttcctgccttagacaactggagttttttaagagactttgtctctttcggaaagacgaaaaggtagaaaagactaacgtcttttgatttattaaatcgactgcggtcgaaggctgctcctacgcggagggcgcacaaggagactcagacgccgtctccttgtgaatctacgctcgcggtggagttaggttgatatgattcacttttggtgtcgcccccattaacgaccggtcgcgcggttttgcataagccttagtagtggcattagaatgttcgcgcggttgagtgagacgcgggtggacttactaaatcattgcttttactttcgcgcggagggttgaatacctaatcaaagtgaattggattaggctaaccgcggatgggcgttaatctgtgtgttgacgtagagcgaacgtccaatttcgttttgcttccgtagaaagactgacgaacgatttataaatttaagcctaataaacagacgcggtcattctaatgccactactaaggcttatgcttcatcgcgccccaaaactcaccgcgcgcacattttatgctccactactacgctttacgcaaaaccgcgcgactaatcggaaacggtgtgcggagacggaagttaatcatatcagcctaactccaccggaagccggtactcgcagaggggtggcgtttgaacctctctgcgttccccctgaaaagggcgccccacgcggagtggaataattaaatcgaaagacggagtctttcttctatcttctcacttgaagtgaggacaaaacgtaatttgattagcaaaagaaaaaatttagattataaggaaaaaaattgaggttttaagaaaatgcagcgtacagcagtcatcggcatgggacatatcggacatcgccatgcccgtgcatataccgagtgcgataaggcgcagctcgttgcggtttgcgacagagtgccggagcttgcccgtgaagcgggagaaaaattcggcgtgccttacttcacctccgcacaggaaatgctcgataacataaaacccgacatcgtcagcattacaaccggcggctacgaatactcctccgaccactacgaaccgacaatacaggcgctcgaagcgggatgcaacgtcctcggagagaagcctatctccaacgacctccgccatgccgccgagatggtagaacttgccgagaaaaagcacctctgctacggtatcgacatgaaccaccgcttcactccagcggcaaggcaggcgaaaaagtggcaggacgagggcaaaatcggctctctgctcttctgcaacatggcgctgtggattggcaaattcatgccgcttgactcggtttactaccacatcaaggctctcaacccccacagcgtgaacataatgcagtatttctgcggtccgataaaggaggtttcgacctttgcgatgaaggctccgggacgcgacatatactccacgcagtcgacggctatgcgttttgaatgcggcgcggtgggacatctcacctcatcctacgacataaagcgcggtcatccgatggagagatgcgaggttgcgggggtagacggcaggttcacgttcgaggatatgtggcgcgaggctatactttatcccgcggactctccggtgaaggaggtttacacgaatcccgtattcgacggaccgaacagattcgagtgcttctacgacacgttccgcgacaggatacacgcgtttgtgaatcaggtggactccggatgccgtcccgaggacattgacggaagcggaagagaggggcttgaagccagccgggtaattcacgcgatgattcgctccattgagaatggaggaatgcccgttcaggtgaaggatgtagtggagtaaggcttactccgcgactacgccgagaaagagcgaagctaatttctttaccttagactacgaaaagattctaagaaactccacggaaatggggattcacttagactttaagtgagaagaaagtagaaaggacttcgccctttcagattgattgtatcgactgcggtcgagggctgctcctacgcggagggcgcacagagatgctcaaacgccgcacctctgtgagttccggctcgcggtggagtttggtttatatgatttacttttggtgtcgcccccatctacagctcagtcgcgcggcatcgcgtaagccttagtagtggcattagaatgttcgcgcgggagaggtagacgcggtgaatgcttctaaatcattgctttctttgtcgcgcggagggttgaataccaaatcaaagtgaattggagtaggctaaccgcggtgggtcgttaatctgtacgttgaaatgtagataacatccgatttcgttttgcttccgtcagtgattgcaaaaacgtcttatcaaatctaagccaaattaacagacgcggtcattctaactacactactaaggcttatgcgtaatcgcgccccaaaactcaccgcgcgcacattctaatgccactactaaggcttacgcataaccgcgcgactaatcggaaacagtgtgcggagacggaagtttattgctaagccatactccaccgtgagcgtagattcacaaggagacggcgtttgagtctccttgtgcgccctccgcgtaggagcgtcccctcaccgcagtgagatataatgaaatcgaaaagacgtaagtcttttcttctcccttctcacttaggatttaagtgaaacctcccccagtgaagtctcttagaaggctttagtcgtctaaggaaaagaaaattgcttgcgctctttcttcagtctcacgcaagggtgaggttgtccgaggaaaaaattttgataatttaaaagagagtttcccatgccacagaattttaccagcgcgccggagaattacgagatacactcgttcgtcagcgaaggtcctgatatcgtcgttactccggcggaacataaagggcgcggcgtccttcattcccacagcttctacgaaatagtctacgtcgccgagggctttacacttcaccagtcctgcggcagaataaccatgctcatcacgggagatttcttcttcgtgaagccgggagaggtccactcctacatcaacgcgtaccagactaagctgtataacctcctcttcgtacccgccgcactgggtgattctttctccgcgctctccgcactgccgggactggacgagatgttctccccctccggagaaagccttgacccgacgcaccgactgctccacgtttcgataggcgagcggcgcaacattgagtcggctctcgagaagatgataggagagcgcgagaacaaaaacgtaggctgggaagtctcactgggggcgcggctgacctctctgctgataaaatacgcgcggatgtacgacgagcagtacgacgagcattccgcgggcgggaagaagcgtgccgacaacgactactacgggtacatatacaagctgctgtgctatgttgacaagcactatgcggaggatcttactacggcggagctgtcggaggtgacggggttatcccctgactacatgacgcggaaattcaaggcgatacttgggatgactccggtggagtatctacggaaatttcgcatagcgaaggcgatggagcttctctgcacgacggagatgacggtgtcggagatttccgaaaaggcgggattctcggacgtatcgctgttctcgcgggtcttcaagcaaaacgtgggtctgccgccggcgtcgtacaggaaaaacacgggggaatgatccccctcggttagctcccccccccttagacgaagaaagagcgcagctaatttctttaccttagactacgagcggattctaagaaacttcatttgataaagtttcactttagattcaagtgaagaaattagaaaaaagactgcgtcttttgatttgattaaatcacctgcgggtgaaggtcgctcctacgcggagggcgcacagagatgctcaaacgccgcacctctgtgagttc

SEQ ID NO: 2378 - DNA, 4946 bp, Unknown
  16S sequences of unknown bacteria
gtgctcgccacttcagcccttcgggcctccgatgttcgcaagctcactcgcggctctcctctgtgcccacaattcgcaatagtcgccttgccacgctaccgcttgcaagtctcccgcctctcagttcagcatggtcgtcccacaccttcgcaccgccctgcgctaacgcttgcgcggtgttccgcccctgcggacttcgcttcgctccgtgtcctcggggctccagccgcttcgcggcctccgacgctcgcaagctcgcttgcggcactccctgcttcattgggcttacttcggcctgtttccgccacaggcggcggccttcgtgcgcccctcgcccctccaccccttcggggcttcgacgggcttacttcgcgctgcttcgcgcacagcgcgcgcttcgtgcgcccccttgattccaaggggagccttttggctagtggcaccgccgattgccttgcacactacgcgcgcagcgccagtacgtcgcctttttgcaaggtgatctgcgaatcaaaggcgatttcccagccattttgccggaacgcaactggcgcatcgccgagcgcggcctcttgatacgcgcgttcccccgcctgcaatgcccgcaggcgcagttcgccccagagcaccgtaaggcgcgcgccctgcgcgtcctgcgcatagacgccccacgcgccgtccacggcccagaaacagcggaaatcttcctgccgcgtcctgggcgcaaagcccataaaaccgcgcgtgaaatcgaaggaaaagccgctgagcgccagcaaaatggagtaggctgccatggagcgcgcgtaattgctgccgcattccatttcgttccagggattgcgccggtcgccatcgtgccgcgatcggatggaacggatgatttccagcccttcctcgagcatgccgttgagcagcatggaaacggccgcctcgtattcaaagccatacatggtttcctgcgcgtatggcacgggaatcacgggcttttccacgcccttgggccaggcgcacatcaccacgccgcgctcgtcgttgagcgaatacaggcggcaggggttgaagtgatcgcgcatgcagaggaaattgtgctcataaatggcgcgcaacgcgctgcgcgtgcgctccggatccagaatcgcgcccaggccgatcaattgcgcatgccactggccggtaagctggtcgatggagcaaccatgcccaatctggtatttgatctcctgcgcttcttcgttccaataggcagctagcgcgtcctcgccgaattccgccacgcgcgcccggtctttgagatccacctgctgctcgtaatagcttccattgaacagatgctcttccacccaggcgcgcccattttccagcatttgctcgtaccgctgcgccgcatccgcttcccccatggcgcgcgccatctccgccgcggctttgaggcccgcgagataaaagccattgagccacgcgctggggccgaacagttccatatccagcgtgtgatgctggcggccttccaacacgccgtcgccattgggatcccagcgatccgggttattgggattccaggcgtactccaccgcctttttcacccggggccaaaggtttttcagccattgcgtatcgccgcaaagcttccattcgcgataggtcttgagaatatcgccatattgtccgtccacacagggtcggaaagacgaatacttgcgccccaggggaatctgcgtgcggaagcgcaagccacctgcctcattcaaatcgtaggcaaaatggctctcgcgcaggctgcgctccaaacgcgggaacaaaaacggcatggcgtaagcgtaattccacacatgcgtgcagctgccctcgcacgatccttccgtgctatgcagcccttcccaaccatagaacgtaccatcgggcagacggatgcaagtaggtgttttcaatacggacatggtggaggaaatggcatcgatcgcgtagggcgggagcgtcgagccatgcaacgcatcgtggaacgcacgagtatccgcatccaggcgattccaatggcacagcgcgtaaagcgccgcgctgcgcgcataaggaaagcggtgtgcgtaataatttttccaagtgttctttaaggtttccgtctgctcttctttcggcaggggattccagtactgggtgaaattggggaagctccacgccagcacaaaacgcacgcactccgtggccccacttgccacatgcacctgcgcggcgagcgtgcccacgtcctccttcccgctctgcgcgtacgtgcgctcgcgcagcgggccgggcgcacaaaaatcctgccagaatacgcccagagagtcaaaccatgcgccgcgataccagtattcctgcgcctggcaatcttcttggtccgtggccaggcacagcgtgccaaaggcgggctcctcttcgccgagcgatgccgaagaaaggcccaacatggtgtagccatcctgcatccacacaccatttacggaatccatcaaggggttttgcagactgaaggcaatggtatagtccagatcctccgccgtgtcgttcgtcacttccacggtgaaaaacgccgccggaatgccggaatcctcttcatcagagggaataaagggattgaatgcgcataccgccgccttgcctggaaagcgctcatcggccagttctacccgcgcgtaagggtagctgccctcaaacgcgcactgggaaaagtgcggcgcgcctgccaacgtgcagcgctccggcccaaagccataaccagaaaacttccctaggtgcggcgtgccctgatagggcgtggccaaatcgccttgcagcacacgtgcgtcgagcacttccccgtcgcgctccgccttgatggccaggaaagaaaagccattgtgcgaacacttattgggtcgattctggatctcccagtcgatcagcatgccgttgcctgctaagccaatgctgcccgtgccaatgccgcccagcgggaaagaaatggcctgtgtgtttctgccctgataccgcataatgaaccgcctttctgttacaaaatggttgcactcattataccatgaattccctgcgcgcacaatatggacgattgaaaaaaagccttccagcccacaacaggccggaaggcgcatagcgaagctgccagtgcgatgaaacgacccctcagtcggctaacgccgacagctccccttcacaggggagccttttggatagcacactttcatacggcgcggcagcgcccaaaatacttccatttacagtagcttgctcaaaaaatcctgcgtacgccggttctgcgggttgccaaagatctgcgcgggagacccctcttccacgatggacccctcatccatgaacagcacgcgatcccccacctcgcgggcgaagcccatctcgtgcgtgaccacgaccatggtcatgccgtcgcgcgcgagatccttcattacatcaagcacctcgccgaccatttccgggtcgagcgcgctggtcggctcgtcgaacagcatcacatccgggttcatggccagcgcgcgcacgatggcgatgcgctgcttttgcccgccggaaagcgaagccggatacgcgtttgccttttcgggcaggcccacgcgctcaagcaattccatggcgcgctggttcgcctgctccttggtcatcactttcaaatggacgggcgcgagcgtgatgttttccagcacggtcttgtgcgggaacaggttgaattgctgaaacaccatgcccatgcgctggcggatgtggttgatgtccacaccccgctgcatgatgtccgtgccctcaaagatcaccttgccggaagagggcatttccagcaggttgaggcagcgcaaaaacgtggatttgcccgaaccgctggggccgatcaccacgagcttttcccccttggtgatgtgctggttcacgccgcgcaacacgtgattgtcgccaaaaaacttgtgcaaatcctcaacgtaaatcactggcgcgcaccttcctctcaatccggttgaacacataggtcagcaaagaaacgatcagcagataaatggccgccaccaccaacagcggcatatagggcgaaaacgtgacgccgcgcacctggtcgcccgccttggtgaggtcgcgcaggccaatatagcccaccacggccgtttccttcaaaagggtgataaattcgttgagcaggctgggcagcacgattttgaacatctgcggcaacacgatcagcaccatcgtggacgcgctggacaggcccagcgagcgcccggcctccgtttgccctttatcgacggccaagatgccgccgcgcaccatttctgaaacatacgcgccgctgttcagcccaaaggtgaggatggccaccaccgtggccgggccgcggtaggacagcatcacgataaagtacataatcagcaactgcagcacgacgggcgtgccgcggatgatattcacatataaagtggcgatgccccgcaaaatgcctaccttgctcaggcgcatcagcgcgagaaccacgcccaacagcacgcccagcaccgccgcgccggcggccacgatcagcgtgttggttaaaccctccaaatagagttcccagcggtcgtcctgaatgaaattcttataaaactgttcgccgaccgacgcgaaccagccattgatattcgccagcagatctgcccacaaaattgccacgctccttcatcccgcgcatagcccgtgtttggatatcgctgattcaagagcgccgcgcgccgcattgattcagccttcgcatcctgaaaaacagggaaatacgggcggacatttctgcccgcccgcgtcagcgtgtcaaaaaagtctttttgacacgctggtggacgggggagcaagctcccccgccactaccaccccctcaatcagtttccgctaaaatcctacggattttcgggcgcggaaactgcaaggaagcgattttt

SEQ ID NO: 2379 - DNA, 1946 bp, Unknown
  16S sequences of unknown bacteria
cccgtgtgcggcttaggccgcttattagcccgtccaagaactgggatgcagttcacactgttccggcgggcctttgagtgcgaaagctagaggttcacgctcttcgatgccttgcgtgcggacttgatcagaaactcctgattggtctcggtctgcttgagcgactgaatgagcatcttcatcgcgcgctcggtgttgttcatgttggcgagcaggcggcgcagaccccagatgagcggagcttcctgcggatcgaccagcaggtcgtccttgcgcgtcgacgacgcgaccgggtcgattgccgggaagatgcgcttgtcggccaggttgcggtcgagcttgagctccatattgcccgtgcccttgaactcctcgaagatgacctcgtccatcttcgagcccgtgtcgatgagagcggtgccgaggatggtgagagagccgccgaactcgatgtttcgtgcggcgcccaggaagcgcttgggcgggtagagcgccgtggaatcgacgccaccggaaaggatgcggcccgatgccggctggctcaagttgtacgcacgcgcgaggcgcgtgatggagtcgagcaggatgacgacgtcctggccgttttcgaccaggcgcttcgcgcgctcgatcacgagctccgccacggcgatgtggttttcggagggcatgtcgaacgtcgaggagatgacctcgccgtcgatgctgcgctccatgtccgtgacctcttcggggcgctcgtcgaccagcaggcacatgaggtgcacctcggggttgttcgcgctgatggcggcggcgatgtccttcagaacggtcgtcttgcctgccttcgggggcgagacgatcaggccacgctggcccttgccgatggggctcacgaggtcgatggcacgcgcggtaatcgtgtccttcccgtgctccatgatcaggcgctcgtcagggtagatcggcgtcaggttggcgaacttgacacggtgcgtcggcccttcgaacggctcgttgttgagctcgatgatcgtgttgagcgccgggtacttctcgttgtcgcgcggcgggcgcacgcgtccggagatgtagtcgcccttgcgcaggccgttgcggcgcaccgtgctcatgccaacgtacacgtcgtgctcgcccggcaggtagccgtcggtgcggataaatccgtagccgtccggcagcaagtcgaggatgccctcgaccatgacgaagccctctgcctggagcagggcgtcgtacacggcggagaccaggtcgtcgcgctcgccgtattccgtcgggtccacatcgagctcgcacgccttggcgatgagcgcctcgtcttcgagcttggcgagttcgtcgcgcgtggcggacgggacgatctccttgcgctggcggtccttgcggttgcggcggttgcggcggttgcggcggttgttgttgtcgcgcctgtcgcgctcgccgcccttgtcctcggactcgtctttcttctccgaggcgtcagactcgggcttgccctcgtcggaagcgcccttctcgcccgccgctgcagcttctggcgcctgggccgaatccgtgggtgcctcggaagcggcggcctctccatccgacgatgccttcgcctcggatgccttgccctcggcggcctgctcggctgcgggcccccttctcgacggcttttttcgtggtgcgacgacggcgcatgggcttcttctcctccgtgcccagcccgtcggatgccttgccttcagctgcttcggccgcctcggcaggctgctcggcagcgcgatcctccgccgtcgcaggagcttcggcctctgcagccttcttggtggtgcggcgcgtgcgcttcttgggggccggcttttcctccccctcggcgacgagctcgagctgctcggtggcggcctcggcgtctgcggccttcttggtggtgcggcgcgtgcgcttcttgggggccg

SEQ ID NO: 2380 - DNA, 1741 bp, Unknown
  16S sequences of unknown bacteria
cggaaatttacaggcggctgtttacggaatttttctacatgttcaggtattttctcccccagccgccgcattggacctcagaaaggagctttcttatgcaaaattcatttgtactgcacggcgatctctgctacgcggcggcgcgggacaagctgatcacgcagcggggcgggtacctggtctgcgtggatgggctgtcccagggtgtctttgcccagtgcccggaggaattccggcatctgccccagtatgattacgcggaccagctcatcatcccggggctgacggacctgcatatgcacgcgccccagttcagcttccgctccgtcgggctggatatggagctgctggactggctgaacacctataccttccccgaggagagcaaatacgcggacctcacctatgccaagacggcctacggtcacttcgtccacgatattctgcgggggcccaacacccgagcctgtctgttcggcacgctgcacgtcgacgcgacgattgcgctgatggaccagctggagcaggcggggctggtgacgatggtcggcaaggtcaatatggaccgcaacggcgcgcccaccctgcaggaggccagcgccgaggccagcgcccaggcgacgcgccggtggctggaggccatcgacgggcgctatgcccacaccaagcccattctgacgccgcggttcatcccctcctgctcggacaagctcatggggatgctgggggaaattcaaaagcagtaccggctgccggtgcagtcccacctctcagaaaatctcggggagattgcctgggtcaaggagctctgcccggggacgaagcactacggcggagcctacgatcaattcggcctcttcggcggagcgcactgcccgacgatcatggcccactgtgtctggtccagtgacgacgaaatcgcgctgatgcgggagcggggtgtctatatggcccactgcgctgcatccaacagcaacctggcctcgggcatcgcgccggtgcggcggttcctgaatgcgggcgtccccgtcggcctgggcagcgatatcgcaggcggaacgcatacgtccatgctgcgggcaatggtcgattccatccaggcctctaagctctgctggcggctcatcgaccaggatctgcagcccctgagcgtgacagaggcgttctggctcggcagcgtcggcagcgggtcgttcttcggcaaggtcgggtcgtttgtcgaggggtacgagtgtgacgccgtcgtcatctccgacgcgcggtataaccacgcgggacccgagaacctggccacgcggctggagcggacgatctacctctctgaggaccaggacgtgcagcataaattcgtccaggggcggaagctgttttaaagcgtgtcaaaaataaatttttgacacgcttcaaatgcgacccgcttcgctgggctcgcatttgagagggggctttcagcccccttcgccctatgcggacttgtccgcatagggcgttgcaccttgctgcgcgcataattttcacgccgttggcgtgaaaattccacacttgcaaggcgagacgtattttctccgacgtacacgccgccggagaaaataatttaactctatttgcgcctgcgggcgcaaactctgcgaggctttttaggggcggcaacggtaggcaaatgggccttggcagaagggcggattttgtggtataatatacacaccgtgggggacctgcggtgtgtatttttaacttttta

SEQ ID NO: 2381 - DNA, 32759 bp, Unknown
  16S sequences of unknown bacteria
tcccttccatgcttgttactccgcttaatccgctccagccttttagttcggtaatttggtcctttcttcccaatacgctccagcctcttgaaagaccggataaatcctgcactgtattattcaaattccaattgtttatggaaacatttgctttgaaatcggttcggctatcataccatggaacctccaatttctggtctgcatttgttagaacttcatcgactgtgacctcccagttatctgccagcaatgtaaacggaccagcgggatatgtattaccccaaaagacagtagtcagatcaaatgccccgccactattagccactttttcattgcatccgtctaaaatccagccggaaatatctaataattctaaagaggtacattcatcaaaggtaaaataaaagaacatcgttttaaaaccggatttaatattcggtattctaatttctttgacattggtacaacctgaaaaagtaccatataaactattcaatgaatgaatttctgtccaactgcttaaatctatcacttctaattttgtgcagctggaaaacgcttgctgtaaactcaataaagaaggaaccctccagccgtctaaactaaattcctgcaagttttcacagccataaaacaaccatggtaaattgacaattttagtaggattccaacgttctaaatttgcagattgcagctgtgtgcaattgtaaaatacagcagaaccttctgtcacatttggaagcacccaagattcaatgcctgtatcggtcagagatgttaaactttcacaattataaaatgcataactgatatctgcaaaattttttgtattggtttcactccagtttaagcgtacattatttaaactggtacatccctgaaacaatctgctgatatttgtcacattgaaggtatcccatgcgcttaaatcaatattgtcaatcgcagaacagtttgtaaataatctggatatatttgttacattttgcgtattgaattgttccataccaagcactgtagttaaaccggtacaaccataaaacagtgcatccatagtggtagtttcagacgtatcgaaattgcctgcaaaatctatctttataatgtttgcattccaacctgttcctaatgtgctggtatcagaattatattgtgcaaataaagctcgaatgtcagaaggtgcttttactccgccttctgcactgacatacatgtcaaaaccttgtttatcattctccactaaataagcaataacagagcttccttcctctgcaatattacgagcgtagacaatgtcagctctatcttttacagttacttttctggagtcctccgcagatgcgtcatccatataatctaataattcatctcgaaaggtaacagaatgtactttatcgcctacaaactctccatttataagaatatcactaaaatccagcacttgatttaaaccagccgtttccatgatttgattacttttagcaggcgctttttcaacttgtcccacttccaaaaatactcccgtttgtccccaaacaggttttaaagttatattttcatcgggcatagtaatgctttcaccagcagaataacgtgtacctgcatatgtgccctccgtaacaatccagccgccaaaagtgtagccttcttttgaaatatcagatgcgtcagcaagtgttataacagtaccggaagcagcagattgatttggaggtaccgttcctgttacattatcgcccaactcataacgaatggtaaggtcagatttatttaaaactacctcaggaaacgtgatacttccattttgatttgtctcatcaatcagacctgtataataggtagtagtaaacgtctgctcatcaaatacacattccggccccattgtctccggatttaatcttacttttaattttacctgcagtgtatcacctgcattaaaatctcctgtttgaatggtaacaccttttttatcctggttaatcgtagcttccgtgtttccatatacaagcgttactttaattggttctgcacttacttctgtaatttcttctatcattgtttgattttgtgaaagggttaaattcattgttccttcatgatgatcaaataatgctttactaaaagataccaataattcattggaatagaattcttccaatgcttttgcttcatcagcaaactgattcaacacattgcttacggttttactgtattgatatgtaaccaaagcaccgttatctcccaatgcaacgtcaagttctgttaatttatcgctaagctcggcttctttattgacagaagaaccaagtgcccaaaaaataacggttggatgattattcatttcttttacttcttgtattgcttccagcgctttatctaccgcagttaactcgtttgcttctccgccaatttgagttaaagcagagtttgcgtcatattctgcggctgtctctaaccagttcgtttcatttgtttgttcgccgccatatgtaataatctttaccggattggaaccataagcatacaccatgtcactggattttccgctccatcctgcaatgacagctcctgcttcttgtgtcgactgcttacctgtatcggacgcgtctaccaaaaagataacatttaccggctcttttggttcagcatggatgagataagtaatttctgcttctgtacgttcttcgtttaaatattctacagcaacagaacctgtttcttcattccctaaagctttatttgatgctgcgcttactgtatcaatccaattgagaggtaataaggtaagtatcagcagcatgcacaaacatacaaggggaatatgcctggattttttacacatgttcactttgttacacactccttttcatacttcaggcttaaccatgtaacatatatcatcatattaatattgctgcaggtttcatttatatcttcttaaaccgtattctatggattctataccagtattgttccaaatgaaataataagcagacattaagtagactttttattatagatatgataaaatgtcgaaaaggcttaactgcgttaattattttctattttttggtaataatccagtgtgaaaaaatgtctacctttttttccaaataaaaggactttttctgcgcatcattttttgttttcaccacgtaataaatgtagcgcatatgcatcactttgacatataaaatagaacaatttacaaatttatactaatctgttcataattcggtcacaccttatcaagataaaaaaggtatactatagatgtagtcaagaggcaatgtcgcttgctcattgatttcccccacttaatcaatgaaataaatgctaacaaaaaggcaataccgaatcgaaagattcggcctttttgtttttaccaagcataattttactatctaaaaaaacaggcgcttcgttttgaagcgcctgtttttttattttgctacaatattgaccagtttacccggtacataaatttcttttacaatttgtttgcctgaaagttctgccgctacttttaaatctgcctttgcagctgcaattgcactttctgcatcaatatctgccgcaacttctaatctgcaacgaatttttccacatacttgaactgcaatttcaatggttttatctacacatttgctttcatcatattcaggccaatgctgctgacaaaccataccgtcgcccaactttgaatgctcccatacttcttcgcaaatatgaggtgcaaatagatttaacaatatggtaaataatctgaattcgcctttggtgacagaacctatatcataaatatcatttaacaaagccattaatgttgcaattgctgtgttgaattttaaagcttcaatatcttcaccaatctttttgatggctctatggaaggaagcttccaatttaggactgagcgcttcctctgatgtcatgatttcttgcaaattccaaaagcgttccagaaaacgtctgcagcctttgatacttgcagtgctccaaggagctgctttttcaaagtcaccaatgaacatttcatataaacgcatggtatctgcaccgtattcatgtatgatatcatccggattgactacattgccacgagatttactcattttttcgccgttttcacctaaaatcataccatgactggtacgtttggcatacggctctttggttggcgcaattccaatatcatagaggaatttattccagaaacggctgtatagcaggtgcaaagtggtatgttccatgccaccgttgtaccaatcaaccggagcccaatattttaaagcttctgcgcttgccaaggcgttattgttatgcgggtccatataacgaaggaaataccaggaagaaccggcccattgaggcatggtatctgtttcacgctttgcaggaccaccgcattttggacaagtagtattgacccaatccgtcattttggcaagcggagattctccgttgtctgttggttcgtaagaatctacatcaggcaattccaatggtaattgctcctgaggaaccgcaacttgtccgcatttatcgcaatgtacaatcggaattggttcaccccaataacgctgccgtgagaatacccagtcgcgcagtttaaagtttacctttgtacgtccaatgcctttttcttctaagtatgctgtaatctttttctttgcttcctcaacggttaagccgtttaaaatatctgaattcaccatggtaccgttttgattttcagtaaatggttctttttgtacgtcgccgcctgctacaacttcaacaattggaagattgaatttttttgcaaattcccagtcacgcgcgtcatgacccggaacagccataatggcgcctgtaccataagaaactaaaacgtaatcggaaacaaaaatcggaatttctttttgtgtcaagggattgataccttttacaccctttaattccacacccgttttttctttggcaacctctgtacgttcaaaatcagatttttttgcagctgcttcctgataatcacggatttcatccatgttggaaagtttatctttccaagtttcaatcaagggatgctccggagagataaccatatatgtaacgccatacatcgtatccggacgagtggtataaatctctactgtgtcgcctgctgtggtagcaaatttggcttgtacacctgtggaacggccaatccagtttctttgctgtgcttttacacgttccggatagtctaccaaatccaaatcatcaatcaaacgttgtgcatattctgtaattttcagcatccattgagattttgtcttacgcacaacctcacttccgcagcgttcacaaccaccgtttactacctcttcatttgcaagcacacacttgcaagaagtacaccagtttacagccatttcttttttataagcaagaccgtgctgaaataactgaaggaaaatccattgtgtccatttatagtattccgggtccgtggtgttaatttcacgggaccagtcaaaagaaatacccaaagaaatcaattgctgtttaaaacgcgcaatattctgttctgttacaattttgggatgtacatgatttttaattgcaaagttttcagtaggcaaaccgaatgcatcccagccaatcggatacagcacattatacccctgcatgcggcgctttcttgcaataatgtcaattgcagtgtaagaacgcggatgtcctacatgcagcccttgtcctgacggataagggaattcaatcagtgcgtaatatttctctttgtctgattgattggaagcatgaaaaactcctgcttcttcccactttttatgccatttttcttctaatggttgatgttcgtacttcacagaatttccccctaatttaaaaagctcatatcaatagattctccgtcctgccataaacggtcaaggtcataaaattcacgggattcaggtgtaaagatatgaacaattacgctgttataatccattaacacccaagaatttgctctgtaaccttccatatggtcaggcataatgcctacagatttcagaccgacttccaattcatccgccaatgcatttacatgagtattgctggtacctgttgcaaatacaaaataatctgtcagggaagaaatatcctctattttgacaattttaatttcttctgcttttttgttatttaaatattttgccgcttcttttgctaattctaaagatgtcatgcactcccaccatttctccggcaaatatcgctttgtcaacaattttcttttgccggttagaaaattgcgttcataaattagaatttataaatcaaactgtttgattgcccaattatatgccgctacactgtcaggatgtaccgttttatgagctgatgttaaatcctgaatagaaaatattaaaccttccaatactgctttatcaaggctttctcttgctaaatcccgcaatttttctacaccttcgtagtcacggtccattgaaataaagtccgctacaaacaacactttatccaactgggtcatatgagcacgtgcggttgtatggtacagtactgcgttaagcatctcttcatcttcaatatgcagtacttgtttcatatacaaatatccgcattttgcatgccaaagctttggaacgtcgcgctcttcatcagtgagtattataccagagtcctccatcattttcaattgttcttcttttggaagctctttcataatatcatgtaaaattccgactgtttccgcctttttttcatctacgccatatctgcttgccaacgcaatacattcctccgcaacataaacagagtgacgaaaacgtttatcagacaaaaacggacgaataatctctttatattgttttgaattcatagacttactccttatacaagtcatattgtttcatataattcacaacagctgcaggaaccaagtcggaaatatcctctccatttttccatacagttctgaccaatgtagatgatataggtaaaaaatcaatattagccagtatcgtatttgcaccgtgcgttttcagaatttgggcatattgttccattttccccattccctctatgctgcgaggcgcagagcaaatggttgccaattgaaaaatacggtcagggtcgttccatgtcagcaaagataaaaacatatcttcccctgtaataaaataaagcatatcattgggaaatttatgttttaacgcttctaacgtcaaaactgtgtagctgggtgtttctctttgcacttccatatcagagacttcgtaaccgaattcctttgccgccaaccggcacatacggacacgatgtactgcatccgccaaatgttcttctcccttatgggtaggaactttggtgggaatcaaaataacacggtcaaatccaattttttcagaaaaccgtttgattaaatgcaaatgaccattatgaatcggattaaacgtaccgcccaaaattgcaattttctgcatcacagcacatcacgaccaatctatgattttttcttagatttcggcaaaacaattttagggtcttgctgattcttacggtacaaaataaactttgtaccaatcacctgaatcacatcagactttgttttttctgcaatttcttctgctgtatcgcgcggagaatgcggcgctgtctccagcacttttcctttaatcaattctcttgctttcaacgcatcatttgcttgctttacaatgtcgtcgctaatgccgccttttccaaccatcaaaatggtttcgatagaatttgccatagcacgcaaataagcgcgttgtttacttgttagcatggtatgctcctttatcaattattcaaatactcttgtaatttttgagaaaacagcataagcgcttttcctctatgactgatacggtctttttcctcatcggacaactgaccgaaagattgttctcccaccaaaaagattgggtcataaccaaatccgccgtcaccagtcaattcaaatgcgatagttccttcacaagttccttctgcggtaatacaatctccgtttggaaacacacagcaaatggaacacacgaaacgagcagtccgtttttcttttggtacgtcttttaattcgtacaacaatttctccattttctgcaggtctgtcgcatgttcacctgcatatctggcagagtagattccgggggcgccgtttaaagagtctactgccaatcccgaatcatctgcaatgaccggtaatcctgtttctttgcatgcagcatttgcctttagatacgcattttccgcaaaagtggttcctgtttcgtctacttcctgtagctgtgcagtggaaacctcaatcccaataggattcaaaatacgttccatttccgctaatttttttttgttatgggttgctatgataaacttcataaacgttaatccttataaaaatcgtcaaaatcctcgtcttcttcatcctcatctgcttccggctcgtcatcatttcttttttcaaataatgctgcagcaaatgcatgagcatcaaatggctgaagatcttgtattttttcacctacaccaatgaattttacaggcagctgtaattcttctcgaatggcaagcactacgccgccttttgcagtaccgtccaattttgtcagcacaatacctgaaataccggcggcatttttaaactctcttgcctgattgaccgcattttgacctgtagtggcatccagtacaagcaatacttctttgtcacagtccggaagctctctgtcaatgatgcggctgatttttgccaattcgtccattagattcttcttattgtgcagacggcctgctgtatcgcaaataattacatctgctccaactgattttgcttttgcaatggtgtcaaatacaacggaagcggggtcggaaccttcgtcacgttttaccatttccacttgtgcacggtttgcccaaacctccaattgttcaatcgcagcggcacggaacgtatcggcagcacccaaaatgactttttttccttctttttgcaggcgcagcgccattttaccaatggttgtggttttacctacaccgttgacgccgattactaatataatagatggttttgtctgaatatgcaactcctcatcgccgctaatcatttctgcaacaatgtcttgaatcatacccataatcaactgcgggtcggtgacgccttcttctttcacgcgtgctcttaactccgcacaaattttttcagccgtgggcatacccacgtctcccattaccagaagctcctccagctcttcaaacaattcctcatcaatttttgtaaaggaattgagcatagagccaattgagcctgagatgctctctctcgttttctttaatccttgtttgattttattaaaaaatcccataagctcatctactccttaattcaaattagtattataaacctaatttttcttcaatttcgcttacatccagctctaacaatttcgataccccctggtcctgcatggtaacgccatataaaacgtccgcttcttccatggtgccccggcggtgtgtaatggtaacaaactgtgtattatcattcattttgcgtaaataagaagcaaaccgtgatacgtttacatcatccaacgccgcttcaatttcatctaaaatacaaaacggcggaggacttactttcataatggcaaaatacagtgcaatggcgaccaaagccttctcaccaccggacaacaattcaatgttggtcacaattttgcccggaggatgtaccgtaatgccaattccgctttccaatacattgtcagagtccagtaattccaaattggcttttccgccgccaaacaacgtttggaacgtctctttgaaattggtattgatttgttcaaaacgttccagaaacagttctttcatttgatggattaaatcgtggattaactttctcagctcattgcgcgatttctctacatctgcaatttgggaagtcaagaattcataacgttcggatacttcttgatattcctcaatggccgctacatttaccgtgcccaacgcttttatttttgatttgagttcatttaatctgcgctgtgcttttcctgcgtcttccatttgaatgtcaagcgcctgtgcttctcgtctggttaattcatattcttcccataattttgtaatgatactatcatactctttttgcaagttggcttttctttcttccaaacgtgcaagttctttgcctagattttcacgctccacagatttttcacgttcctgcgttctcaactgcgcacaatgctgctctgtttgcagacgttcttctgttaatttagcaatagtttcttttgaggattttgcctgttcacgcaaagaagttacctcttctttgaaagcagcaatctgcttttttaccaattggtttgcgcctgtcactgcacgaatttcactgttcagcacttccgctttatggtcgtaattcaagcgattttgacgtaaatcttccaactctttttcaagagcttctttttctttttcaatagagactcctgcaacacgcagttcttgtaactgttcattcaacaattgactttccttgccgaaagattctttgctgcctgttaattgagttaaccacgtttgcacagctgtaatctcatctgttatcttggacaattgtgccgctgtatcttcttttatttgcatttgctgttccaattgatgagagaactgctcttgttctgactttagttgccgcaaagcttcctcgatggctttgcgctcattgagaacacggttatactccgcttgtatctgtacagtctcttcccgtctttgatacaacatatttttcgcatgttcaatcgcctgttctgctttgattgtacgctgtgcggttgcctgaaatgtctctttggcttttgcggcctgctgttccaaagcggcaattttttctttgccctgtgcgatgtcagcactgcggcttaatagccctgcactgcgtgcttgggaacctccggtcatggaaccgcccgcatttactacttgtccgtctaatgtcacaatacgaaaacgataatgataccgtttggcaatctgagtggcggcatctaaatccctcgctactacgatacgccccagcaaagactgcaatacgctgcgatattgtgcatcacattggcataaatcttccgcaataccaatgaatccttcacaggaatccaatcccgattcagtcaacttatttgcttttatggtagacataggcaaaaatgtcgctcggcctttttctttctgttttaaaaagagaattgcctgtttggcgtcttgttcatttccaactactatatgctgcatcgaagcgcccaacgcggtttctaaagcaacggcatattgtttcggaacttctatcaaacgagacacaggaccgtgtatcccgtttaaatgaccatttgcagcttgattcataaccgccttaacggaatgatgaaaaccttccaaactgctttccaagttctctaaaaatttgatttttctactctgctcattgatgtccagcataatacggtcggcaatttgtttttcctgttccagttgtttgcggcaatcttgataatgctgttggcaggtttcaatctcttgcgccatagattctagctgtgctttcgcatcggctaccatatggtggtaatcatgttcttccgattttaacttctctatttgcgcttgataagcatttgcttgctgtacatacgtattttgtctttcttccgcctgactcatttccgaatctgcaaccatttgctgcaattttatctctgagttttgttccgttaaattatgtaacttttgcgttgcctgtgcaatttcagaatccgattgattcatatcgtttctgattgattccaacttttctatataagattgctgttctctatgattgtttaagcatagttcctcagtttcttttagtctatctttttttataatcaactcttgttctgatgattgatgtgataaagaagccaaatccaactcttttttgatacgctcaatactttgattgttatgaagcatatcattttctaaaacggatatttcgccttctttgcgtgctgcaagtgcttctgcctgtgatgttttggtacgtatttcatccatttgtaccgtataactgttagcacgattaaaactcatctcaatttcgcggctgatttcttccagctgggcagaaacttgttcttcctgatttcgcgcgattgcagttttttcttcctgttcacgcaatacattaccggaacgctccagtgtattgagccaaagaccaatttcaagattgcgtttttcttcataaaattccagatagctcttagctttttccgattgtatgcgcagaggttccaccctgtcttccaattcagaaacaatgtcatgcagacgaaccaagttttcttccgcctgaaataattttctctcggattcctctttgcgataacggtatctggagatacctgccgcctcttcaaaaatttcgcggcgctcctccgaacgggcagatacaatgctgtcgattttgccttgtccgatgacggaataaccgtcacgtccaagaccggtatccataaacagttcgtgaatatcttttagtcggacagtcgcattattgattaaatattcaccatcgccggaacgataataacggcgtgtaatggaaaccaaatctccgtcaaagggaagttcacgattttgattttcaatggtcatggtaacttccgcataaccgtgggctttacggcttgttgttccgctgaacacaatatcttccattttggaacaacgcagatttttggtagattgttcgcccaaaacccaacggattgcgtcactgatattactcttgccgcttccgtttggaccaaccacagcagtaaatccatgatgaaaagttaattttgtgcggtcggggaacgttttaaatccgtgaatttctaatgactttaaccgcaaacttccactcctttctgttccttatctgcatatgctaataaaaaacgatttctctgtatcgtctcttttgtttttatctctatatgataacccatagaagtaaaaaattgcaaattactctttttttgccctactgctttggaataatcctttggatggataaaaagttcaatcttttttcctattacgaaagaatgctccaaatcttgcaaaatagcattgcgatatcttctgctttcacaaagttctctcaatgcaggatgccaaggtcctgccaaacggtctcgctccaattcgggagaactgtgcagtcccaaacgaatgaccctaatttgttcttgttcaaaaaatgcaagcagttcactgcataggtcaattgtttcttctaaagataacgtatcatactttccactctcatacagctgtcccaaataagtatgcctcatgattacagtaggataaatgcgcaccgtatccggtttacacttagcgatttcaatcgctgtttgttttgcaccttgcaccgtatccccatataatcccgtcatcatttgaagaccaagttcaaaaccaaaggttttgataagagcagaagcctctctcacttgccgtgccgtatgtccgcgctgattgacagttaacacggtatccagcatactttgcgctcccaattcaatggctgttaccccgtattgcttcagacactgcaatacagatgcatcaattgcatcaggacgagtagaaatacggattccctttatggttcctcctgttacaaacggctgtgccgcctctaacagtgaaaccatataatcatggtccagcgctgtaaaactaccgccaaaaaacgcaagctccagctgcatggtttcatgacttttatggttaacagctgcttgtattgcatctgtaacatctttaggagcaggttgttcttgtattcccgtaatgctgacttgattacaaaagctgcattgatgaggacatccattgtgcggaacaaagattgcaatattcccgtgtttaatatcccatcagctccaatgcttctctggcagcctgttgttccgcatcttttttgcttcttcctccacccttgccaattacattctggtttaggtggacttcaacagtgaagtgtttattgtggtcagggccactttcacctgttaatacatacgttaagtgctcctcagggttttgctgaataatttcctggagcattgttttataatctttaaatggttttggctttggcgtttgaatggcaggttcaataaaacgcaaaataaaagagcgcgcttgttccataccgccgtccatataaatggccgcaatgattgcttcaaaagcatctgccaaaatagaaggacgggtatctccgcctgtatttttttctccattgctcaataataaatgatttcctacaccaatttgagtagcaaatccgcacagcgctttttcgcagaccagtgatgcgcgtgttttggttaaatcaccttccggcatatttggacagtgcttgaacagataatctgccacaacaacacccaaaacagagtcacccaaaaattccaaacgctcgttgcttgggcctgcttttttgttttcatttgcataagacgagtgtgttaatgcagttttcaaatactttttatctttaaaatgatagccgattttatcctcaagttcttgcagcatgaaaaccttacctttcctattttttaatggtatatcccatcatgtaacatttatgaattttcttttgtttgataatctgaaatgctgtcggcaatcaaaccaaccacattggattccacatattgtttggtcaaacgaattgcacttttaaatgttcttgcgtccgcactgccgtgtgctttaaatacaggttttgccgcacctaaaataggcgcgcctccaacttctgtataatcaaacatctttttcaattctttcatatcttttaacacaacggaggctgccagtttgttttttgtactctttgtgaaaataccttttattttactcatgagcaccatagcaacgccttcatatacttttagaatcatattccctgtaaatccgtctgcaactacaacgtcggcagcatccacaggcaatgctctgccttccacattacccacaaagtttaattttgacgctttcaacatctgataggcgtctacttgtacttgagtgcctttgttttcttcgccgccaatattcgcaagtccaacacgcggattatgtaaatgcattactttttccatataaatgctgcccattacaccaaattgctgcaacatttcgggacggcattcattatttgcacctgcatccaaaagcataaaatgtcctttgcttttaggcataatcggcgcaaacgcaacacgtttaattcctttgattcttttcaccaacaaggtagctcctacaaccaaagcaccgctgttgccggctgaaataaatgcgtctccgtttcccgcaaccaattggcggcatccttctgccatggaagaatcggattttccttttgtaatctccgtaggctcatcttccatggtaatgacaccgggcgcatgaacaatttccatacgatttaatgaaatattattttctttggcaacacgacgaatctcatcctgatctcctgtcaacaaaatatcaatatcaaaatctgttacagcttcggcgcatgcctttaaaatttccaaaggcgcattgtccccgccaaatgcatctacgattattttcatgttttcgcacaccctttactttaattcacacatattgttccaacagattcagtgaacgctgtgctaaggcagcgtaacgctcttttttatctttgatatgctcactcagtgcaggcagcacaccaaaatttgcccccatgggctgaaagtttttggaaacactgttcgccatgtggtcgcttaaagcccccatcatggtttctttcggtaaaatcaacgcagatgccccatgttttcggtttaccgcgttgatgcccgccaaaatgcccgatgaggcggattccatgtatccttctacccctgtaatttgtcctgcaaagaataaattgggattttgtttgaaactgaaatcctgattcaacacttgaggcgcattcaaaaatgtgttgcggtgcatcacaccgtaacgcataaattcggcatgctgcaaacccggaatcatagaaaatacacgcttttgttcgccaaattttaaattggtctgaaaaccaaccaaattataaagcgtaccttctctattttcccttcgcagctgcgctacagcccaaggacgatgacctgttttcggattgattaagccaaccggcttcaaagggccgtagcgcatggtatcttttccgcgctgagccaaaacttcgattggcatacacccttcatatacttttggattggcaacatcaaagtcgtgcacaggagcacgttctgccgataccagtgcatcataaaacgcctcatattcctctttgttcatgggacagttgatataggcatcatctccgcctttatcataacgggacgcagtaaagcaatcttccatagaaagactttccgctgttacaatcggtgcggcggcatcataaaaactaaggctgtctccgcaaagagacacaatttgttctgccaatgtatccgatgtcagcggaccggttgcaatcacagtaatgccttcttttggaatctctgtgacttcttcagataccacctttatcaaaggattgcttttgattttttctgtaaccatctgagaaaaacggtcgcggtctactgccaatgccccaccagcaggtacacggcattgatccgcacattccatcagcagagaatgaaacctacgcatttcttctttcaacaaacccgcagcgctttccacacgatctgctttgaaagaattggaacaaatcaactcagcaaactgttcactggaatgagcaggagaatattttttcggtttcatttcatatagcgtaactgcctctccttttgatgcaatctgccatgcagcttcacatcccgctaatcctgctcctatgactgtaatgctcattcttcctccactttttcgtacccacaatccggtgtaatacagtataattttggttttttaccttttttcttcaacaaggtttttccgcattgcggacatttttccatagaaggttcgtcccaagaaacaaagtcacagtttggatactctttgcatccataaaatacacggccttttttggtctttttcacaatgactcggccgccgcattttgggcattccgcgcctgtttcattgataatctttttgatattcttgcattcgggataaccgggacatgcaatgaatttgccgtaacgacctgtttttaccaccatttgacgaccgcacaattcgcatataatatctgttttatcttcttccaactgaattttcacgccgtccatggcctctttggcttttttcagcgtatcagaaaattcatcatagaaggtatgcagctgctgtgtccactcttccttgccatgctctacttcatccagttcgctttctacttgtgcggtaaatttaatgttcacaattttcggaaaatgttctttcatcagttttgtaatcacttccccaagctccgttggctttagggttttattttctcttgtgacatattctcttgccgtaatggtagaaatagtagttgcataagtggaaggacgtccgattccgttttcttccagagccttaatcaaagaagcttccgtataacgtggaggcggctgtgtaaagtgctggtttccaaccaattctttgcatttcaaaggcataccattttccaagacaggcaatgcgccttttgcctcttcctcttcatctttgccttcttcatacaatacggtataaccgtcaaatgtaactgtataaccggaggctttgaaaatataattttttgcctgaatatctgcctgagttgtactttgcaaacaatttgacatttggcaggcaataaaacgctcccaaatcaatttatatagtttatattggtctgatgttaaactgtcttttacctggtcgggagataagttgggcatcgtcggacgaatggcttcgtgtccgtcttgcgcatttgcttttactttaaatttacgtggggtatcaggcaaatactttttaccccaacgctctaaaatataatcggcagcttctttgactgcatcttcggaaatacgcaaggagtcggttctcatatacgtaatcaaaccgactgcacccatgtcagctacttcaacaccttcatacagttcctgcgctactttcatggttcttctggcctgaaaacccagtttacgagaggcttcctgctgtaatgtagaagtgataaacggaggcgcgggagattttctcctggtaccttttttcacttttaccacttgatattccgcatcttccagctctgccagaattttatctgcttgttccttgttggaaattttgatttttccgtcaacatctccgtaaaaagaagcggggaatgcttttcttgagccttttggaataaattttgcatccaaggtccagtattcttccggcacaaatttgcggatttcgttttcacggtctacaataatgcgaaccgctactgattgtacacgtccaccggaaagtcctcgtctgattttttgagataaaaacggacttaatttataacccaccaaacggtctaaaatacggcgtgcctgctgtgcatttaccaaatccatatcaatggcacgcggatgctcaattccattggtaaccgccgtctttgtaatttcgttaaaggtaacgcggttatgatcttccacatccagtcccaataaataagccaaatgccacgaaatggcttctccttcgcggtccgggtcagttgcaagaaaaatttcatcacttttatcggcagcttctttcaactcttccaccaatttttctttgcctttgatgacttcgtatttgggtttaaaatcttttttaacatctacacttaatcggttttcaggcaaatcgcgcacatgacccattgaggccacgacatcaaagtctgaaccgagatatttcttaattgtttttgcttttgcaggggattccactattactagtttagacattgtctaaccacctttgctcacgtacttttcaatctcaaatttatcgtttgttcgattactgtctgatgaaacatattctcaataaaagcgataaattccagaaaaattaaacttgtccgggcagactataacgtctgccagagtgaaaaaaaattgcatcacataattctaattctgtaacggcgattaaaattctttgcgccgataatcctgttaacacttctaattgttctatatgcacaggttcattggataatttactgagcagcaatgctccgtcttgagaaagctgttcctttaactctctatgcttttctgtcgcttctttttcatcaactgctttgacaggtctaggttcctgataacgcagttgttcttctttcttttgtaactgagattctattttgaattgctcaagttgaagcagatacgtatttgtatattcttctaaaatatcctgtgcttttgtcacaggttttgcacctgctttgattaaattattaacaccttctgaaacaggattataaattccgcaaggaaccgcaaatacatcacgattctgttccaaagcggttctggctgtaatcagagaaccactgcgttctgccgcttccactaccagtacaccaacggataagccggaaataatacgatttcggataggaaaatgatgcttaaatgcaggtttggttataggaaattccgaaataatcgctccatgttcggcaatggaccgtctcatagcttcattttccatcaaatacggatattctattccacatcccaaaacacatacggaactaccattgccttgcaacgcaccttgatgtgctgccgtatcaattcctttggctcctccactaacaatcaccatgccggcttgggccagctgcatgcttaggtcataagtaatttgtttgcccgtagttgttgcatttcgggtaccaaccaccgctaaagcaggctgttcatccaaatttggcaaggtacccttaacatacaacatgcaaggcggattatcaatttggtaaagtctttgaggatacgctttacaagcgggagtaatggtttgaattccttttgactcactggaatcaattagtattttaccatcttccaatgtattttgcgacaattgtttgagttcttttggggtaaataatcccatcgaatgccattgggttggtccggcatcgtaaaatgatggtatatccggaaaataggataatatccgttttggtttaaaactgccttctcctaaggataattgcagccacgcccagtaagctttactatcttctgtcatacggattcctctaactgcatgtcaattcttccgcgcatcatttcccacattaaaattgcggcagaacttgctgcgtttaacgattctgcacgccccatcataggaatggtaacgcaagcgtcacaagcgtcgattgcggtctgactcaagccgtttccttcattaccaatcagcatcactgtgggttttgaaaaatctgtttccaaaacgctttgcgcctgttcagaaggaactgccgcaaacacagcaaatgtttttctttttagctctttaattgcaaaggacgtatctttttctatataaaacggtaagcgaaaaattgcacccatactggagcgcaatgctttggggctgtaaatatcacagcaatctcccaaaaacaacacaccactgactcccagtgcttctgctgtacgcaaaacagagcccaaattcgcaggatcttgtatttgttctaacgcaatgtacgttcccaatgccttcatatccatcatgctgtgatgctgctccggaattctgcatacacagaatacaccttgattgtgctttgtggcagaaagtgcgtcggccacatgttcttctatcaaacgatatgaacggcattcctgtatgatttgagtgatataatcgttgtattttgtttgagcagtcccagtaaagtatgcggagacaatttcaatattgctcagtgcggcatctctgcacagtcttgctccttctaccacaaacatacctttttcacggcgaaacgatgctgaatccactaattttgcagccaatttgatttcttcatttttacgacttttgatgatttccaacataacataaaatctccgtgtaaccaaaatttgcgcccgagggaatcccccgagcgcaactatagcttttttatagggcagattttgctgtttctaccaaagcggcaaaagcagcagggtctgcaaccgcaatctcagcaagcattttgcggtttaggccaacgttagcttttttcaagccattcataaatgtagaatagttcatgccgttcaattgagcagcagcagaaatacgagtaatccatagacgacggaaatctctttttctttgtttacggccaatatatgcataattaccggacttcataacggcttgttttgccattttaaagtgtttgcttttagcgccccaatatccttttgccagttttaatactttttttcttcttttgcgtgttgccaacgcacctttaatacgtgccattatctatatacctccaatattcggtcaattatcgtgtttccatctcttttataaaagaacgcctattatttgtaaggaatcattctctttactgctgctacatttgttttatctgttacagcggtttgtcttagacctcttttacgttttgttgttttcttgttcaaaatgtgagatttgtttgcgtgtgcacggataacctttccgttcttggataatttaaaacgctttttagcgccggaatgtgttttaatcttaggcatgagtttatcctccttaattgtttaacatcactttgtaggtttggttgcaagaaacattagcatattgcggccttccaatttcgccggcttttcaacatttgcatgctcggaaagcgcctctgcaaagcgattcataatgtcatatccgtgttccggatgacccatttctcttccgcggaagcgaatagaaacctttactttatcgccgccttttaaaaagcgcattgcatggcttacttttgtgttaaagtcgtgcgtgtcaatatttaaagaaagtctgatttctttaatgtcaaccacgtgctgattctttcttgcttctttttcgcgcttggtttgttcaaacttatatttgccgtagtcaataattttgcatacaggcggtgtagcctgaggggcaatttttacaagatccaaatctttttctgctgccaaatccaaggcttttgccgcaggcataataccaagctggctgccgtcagaatcaattacacggacttctttgtcacgaatttcttcgttaatctgtagctctttactgctaatggttacacacctccaaaaatacgttgtgattgttatcgtttacaaaataaaaacgcggacagaatcttccgtccgcgcatcaataaacatacttatcccatcgtcaaaatgagagatagtgaatattgacccgtgtcggacgataccccacaggtgagagcacatgtgctccgctttgttttactccagttattttaacaggttacgttctatttgtcaagagaaaattcacgtttccattctcccgttacttcttgattgagatggaacgaatataacatacattcttttacaggctttccgcagcattgctccattgcgtatacgtacagttccaattgcagacggtaacgttcccacagttcttttgcatgtttcacccggtctgttttaaagtccacaatcaccaatgcaccgtcttcttcaaatacgcagtcaaccgcaccctgcaaaacagcagtttctgtttttaagtgttccggcagatgtgtttccacaactgataatggcagttccaccataaagcgtttttctttttccaaagaggtggatgccagcatgcgtttccccaatggactttgaaaaaatgattgtgcttttgataaatcaactgcttgtgcctgctgcgatgttaaatatccttgttttacgattctgtcgcattctgcctgcgcatcatggcttgcagcttcataatccgcaaactgcataaattcgtgcagcgctgttccccgttctgcaggcgttaatccaaaactgctcataaaacgcggccgcgaaagcgtgttcttcactttagaaatcttacctgccaattcggatgctgttacttttgcaggtaattgcgtcagcatctttcgttgatactgaaactctattttttcttgtaaagattgaagcaggttcctatttacgggagcttcctgtttttcttccgtttcttctatgacaggttcctgtttcggaggcagtaccacatgcatgctccaaggctgtgaagaattgcgcaaaatgatgctgtcgtctgccatagcacgttcccgtaactgatgaccgtccgtatggctcaacgcacaggataaaatccaatctgaaaaactggaagctcgattcaccacaaatggctcttgctttctctctccacttagctgggcggctaattttgtaagagtgcggtctaaattttttacggtagacagcataatcaatttttcttttgccctggtcattgccacatataaaacacgcatctcttcagacagcttttccctgttcatttctaacgctatggcttctctgggcaacgtggtatatctgcaattggtttccaaatcgcgtagttttacgcccagacccaaacggggatgcagcaaagcatccttttgctccctgttaaacggattggagcagcgggctaaaatgcaaataggaaattccaaacctttggagcgatgaatgctcatgatttttaccgcgtcagctccttcggacataacagaagccgcaggtaaatcggcatcctgtttctgcaaacggtcaatgtaacggataaacccggataacccgtgataacctgcctgttcaaactgtttggcatattccattaacatctgtaaattggccaatctgctttccccatgggtcatggtttgtaccatattcagatatccgcttttttggtaaatatagtttaacaaacggtcggcaggcatggttgccgccatggtacggtactgctccaaatcctctaaaaatgcagccgcctgccggttttggttaccaaaagatttacacgccaaatataacggctgttttctttcattcccacgcatttgcgccatatcgtccaccgtaaatccgtaaataggactcatcaaaacagaggcaaacgaaatgtcctgcaaaggattatcaatcactcgcagcagcgacagcatgaccgctacttccacggtacgaaaaaaaccattgtgggtatctgcccacgcaggaacaccgtatttttccaactcttttgcataatcgggggcatgtttgtttgcactgcgcagaagaatacaaaaatctccatactttacaggcctttgtttcccgttttctgttacaagaaaggattccttcaccattttttgtatggtatttgcaatatgacggctttccagcacggtcgttgtttcatcttccgtttcgtcctgaaccgccgctaaatcgataatatccaattgggtctgacacttatcatattccggatactgcgcccctggtaccaacaattcttttccttcgtacgcaacgtcgcctgcctggggcgacataatttgcgaaaatataaaattaatggtatccgttactgtttcacgggaacggaagtttttatccaaaatcaaatacgcgggatattgattcagctccctttgatattcgggaaagctgtgtctgcgttctaaaaagatacttggcatggcttgacgaaaactatagatgctctgctttacatcgcccaccataaataaatttttctcatcctgagaaattgcccgaaacagcatgtcctgcgcttcgttggtatcctggtattcgtccaccatcacttcatcaaaccgttgagataacttctccgcttcttccgtgcggacaaaaccattttctgtctctttgatgagcaattccaacgcccagtgttccaaatcactaaagtccgccgctttgcgttctgtctttaaacgccgcaattcttctgaaaattccttggtaatcgcaaagagtttttgtaccataggtgacaagcgagacaagtcgtcctttgtctcctgttctgtggcacagaataattttgctatctttttatcaacggtttctttgacctgcttgcggcagtcactgatgcgtattttcagttcatcttcactgtatccccgcagtgacggcaatcgtacaaaggtcacattctctgccgcttttgccgcttcgtcccacgctccatgttccagcacatctttcagatggttcaattccgccaaatcgctttgatacgtattttcatacgtttctaatagtttggcgtcctgtttcatcaactccagcgcatgttttgtaagggtaatacagtaatgtaccgcttcctgtgcatagaaaagcaaagtttgtccccaaggagtatcagcaacctgttcgatatgttgatacatagccgctttttcatccaaccatttttgagggaaaggatgggaacgggtaaactcatataaggcttccaccgtttgtatgattcggctgtcatcacggtcggaactgaacgcttctaccaagtcggcaaacgcttggtcctgctgttcataattccgttccagcacatttgtaatggcggtttgctttaataatgtaagctcactgctgtctacaatgcgcaattccggagacagattgagtttataaaagttttctttgattaattcattacaaaaactatgtatggtactgatttgggcacgtcccagtaacaattgctgccgctgtaaattacgatttgtagggtcttgcgccaacaattccgaaattcttgcagcaatacggtccttcatctctgctgctgctgcttttgtaaacgttactacaagcagcctgtccgcgtcactgggatgaacagggtcagtcaaccgttctatcacacgctgaaccaataccgccgttttacctgaccctgccgccgcagataccagcaaagtaccgtcgcgggcatcaattgcatttttttgttcctgtgtccatgctcggttcacccgttttctcctcctttctgtttcaattgctccaatacctcttcttttttatgacaaaattgcggattaccgccatcctctttttcatgttggcaaactgcaaagtaaggacagtataaacagccgtcataagctccctgcaaaggattcgcctgcacatttccctgctgtaaattttgagccatattgccaataagcgattcaatgtgatttagcacgcgctgcatttcatcagcattaagtaaggattcctgcgatttcggcacaccgtccttcaatgcaacagggatataaatgccctgtgcatgttcttccataccgcaaattacagaagtatcattgactacaacgccgttcatgcgaagctgtttattgatttccttttccactgcgtcaggttttgctgaccgcgagatagaaataatcggtcgtgaagcaggcatatacagtacacctgccggctgatattgtccgttttgaatcaaggcggcaagataaataagcatttgcatgttaataccatgcagaatatctcctattttaaattctttttttcctgttttatagtccacaacacgcacatattgcacgccgtcttgctccatgacgtccgtacggtcaattttaccctccacttgaaccactgtgccatcctccaaagagatggtcaaaggagagaaatcgcctccgttttcctttaaagataactcatgaccaatgggctgaaacttgctctgggaaagttcttttgcaatatggtgaatgacaacatgggcagaatctgcaatgcgccgaaatacaaactgaaaccgctgggttttatcctcacttccgcctaatttcatattgacatatacagcaatatattcttgaattgcctgaatcaatgtttctttcgacatcgcagcaatttcttctgcgcaatacgcttgaaatatctgctgtaaaagataatggattaaactgccatattccagctgatccatttctgcaggtctgcgttcttttagattcagcccataacgacaaaaatattggaacggacacaaatgatattgttcaatttgtgtagcggaaacagacatttgattttgaaacaactgttttgcgtactcaggctgcataaaacgatgcacatttttcgtatatgcacggtccaaagcctccatgcgctcggcatatccgtctttgtcctcaaatactgcttttaaagtggatttcagctgcgtttgattgcgatattcttttgcggccatagtaaacgctgactctttggaacatgcaaaataggctttttctatttgttgttccgtttgcatctctaatagcggaaacacgccttttacttcacttacaatggcagaaggagcctttgcttctcccgtaagtcctgcacgatgccaagtgacatataatctatgagaagcactggtaagtgccgcatacgctaaatgctgttcttctatggcggcctcttgagcagtatcgctcaaaggcaatcccaattgaatcaaagattgccgttccaaatcactgaatacgcctctgctgctcggtacagcaggaaattcaccttgtactgtaccaatgacaaatacaacttttggttgtgcagggcgcatacggtctgcggtacctacagtcacatggtcaagactttgcggaatacctacaacatcataagataaaatcatcaggcgcagcaattcagcaaaccgctgtaccgttaatgcttcatgttccaatcccgacgcgcattgatccagaatatccattaaaatattccataactgggtttgttgttccgctgtatccagtcgtcccatttgttccagttgattggataaattttgcaaagaagacggaacatccagctcttctaaaaattggtacagtgcttttgcatatatcaacccgtccccatctttcaaccgtttttgcagacgcaccaacggttttactgctctctcacgcaattgattcagttcttccaaccgtttttcctgctgttctgtctgtcgttctacaaagccgtctacattggcagtccattccttcagccatttttttcctgaaagattccataaaaacgtatagttttccaacaaagaaatttcatacggagtaagcccggccaatcctgtttttaaatatacaaacatatcgtccgaagaaaaattgctttttaatatttgcagtgcatacagcaccaaacacatcaaaggttccgcataaacagaacgtggcgtatccataaaatacggcacctcatattgttccaacgcaacatccagtacgccgcggtaatggtctaaacttctggcaatgatagcaaaatcttgatattgatatccctcattcatcatcaaatgtcgaatggttgcaccgatatacgcagcttcatgatatacggtttctccgctgtataacgtaatcacatccggtacattggaaagcggttctttctccacacgaaagatttgatgttccaaatgctttaaatcttccgttgcaaagcgaattcctggttccagcacaataggtgcagatacttgtacgtgatgttgtcttgccattcgcatcagcacatttgctgtatggcgtacacgagcaaacacctccgctcccatttgattatctaaagtgtcacacgaaagagatactgttacctcacatgcttgagacaacatgagttcgattaagtcaaattcctgctgcgtaaacccctcaaaagagtcaatataaatatggtaaccctcaaaaaaacgatgttccgtaaacgtatgtttcaaacgttgaaggtcgtctaatgggtctaaatagctttgcgctaccaaagcatcatatgcggataaaatcagaccaacttccttcaatttttgtttcagctttttatcttctgtttgctgtgccatttccagcaatacagcaggcgctattgcacacatttttaattcggcagacacagagagcatcaggggaatcaattcttccacgcgtgttacataaaactccagctcggcttttacttcttccaaagccagactcatgaaaatatttcgtcctccgtcatccaattttgcaattccgctgcccccataagcgcgaaacgccatatctgtaagacgagtaaaactcattacctgtaccttgtttacttgttttggaccaagcagcttgagcattgctttttctgattcaaaggaatattgttccggaaccaacagcataaccttttctgtattttgttctgcaagatgttttacttgctctcgaatcctgtaagtttttccacttcctgcacgacctaatatcagttgtaacatgaactctctcctgtttgcgtgaaatacattattttatcttttagtatatcacaattgtgcatcaaaaaaaagaagacaccttttccctttcgcgagaaaatgtatgccgtatagttgtcattgactatataaaaatgctatactaaaattgtaaattatttaaaacgatgtaattacaaatacgatagaatatcagcaaacaagaaaaaggagacaaacatgatactggatttttctaaaatagaagaaactgtgaagacacagttttatggtggagaaaaagaattaagagcacatatgaacattgataaaaacaataaaattttgttgggaacattggaacccggagcttccatcggtttgcatacccatgaaaccaacagcgaaatcatttatatcttaagcggaaaaggcaaagttctgtttgagggagagtacgaattggtttctgccggattatgtcattattgtccacagggatgttcccatagtttaatcaatgacagtaatgataacctgaccttttttgcagtcgttcctgaacatacaaaatgagattaaaaagcctgtatgacatgtcatacaggctttttatttgaagttaccatccaaaccagctttttatactttcataaatttctaccgttttaaattttacctcatattgatttccttctaccgcgctcatctgctcatcggttaaaacatcatccaattccggcatgccttctcgcttttcggctgccggaagacacattgcagggaacaatacacaccaccaattttgtcccgcaccctctccaattaacacgcgcaaggcatcataatttccggcaggcatcgtaatatcatcgtactgtctgttattgaaaaatatattttctacttctaccgttacgccataagtatatccttgtttgtaaatttcatcctgcgctacttgttccaaatacgcaatattcgcttttgctgcgctcattgcttcttctttggtcgtacattcgctgaacaatgttcccgtttcgtccaaaagcctgtctcttacttttaattttagtgcttggtcttcttctgaatcggaatttgccaatacatgtaaacgaaatacttcatttggaatttgctcacattgtgcggcaaatgccgtaaagctggtgaaagaaaataaaattgcaattacgaatccaatcaacaatgccttttctatgtatttcaactttgtcatgaataaaacctctttctgtttgaaatgttactaacagaatggacagattttattttatttatacatgtttctgaaaaattttttgaaagaaaaacagaacatccaaaactattatggtcggatgttctgttttccttaaataaagattaaatttaacagcagcatagtggtaacgccgggaatacctcctacggctgaaactccgatactgagtggattgagaggcaagcgcacacccgtaaaatatccggatagatttacggccagcaaagcgcaaagccctacacaaatactgataactgttttccgaaccggtttttttgacttggcaattacttgtactaaaacaagcgctgcaaaaatacccagcgcgattaaaatgccaataaaaatccgcacattttatcccctcgcttatattaaaaatacgtttcgaaaggaggaacagcgattccctgctgttttgcgacatccagcaaatgacggtaacgcgcctgaagtgccctatcttcataaatacacgcctcaatcatatcctggttgctttccaactcaaaccattggcgattgcaggcgagcaaacgacttacttctttgatttcgtctaacaaatgttcatgttgtttttcttcgcttaattttaaaacgtgtttatttgcatctgtatgttccatcatatcagcttccgcccttccaatgatacttatgcaggtagaatggacaaatatgccccaaatataccttttttagaaaattataaaaaattaccagtaaatccattattcctttacgtgtgcaaccaaatataacataaattgtttgctttggttggtggatattccctattccgtacaatataatactgccatgaaggtgtgaaaatatgataaatcttaaaaataatatttcctcaaatttatttacactaagaaaatatcataaaaacggtcacaagaagagatagcggacaaaataggtgtaagcagacaagcaattgcaaaatgggaactagcgttttccaaactaaaggatataaaaaactttccatacaatctgcttataaaatataccttattaagtaggatagaaattcttttaatatttagcatcagcactttttctgtatccaaaccgaacgctacttctccatatactgctatatgtttttatgataaatattggacatactgcataaaacatgtaataatcgattcatttatacataattagataatatagtagacattctaaccaaacataaattaaactaatattcatgacaaattatgcttagaaattttcgagctttgattaaattttatcgaaaaattgtcgggaaagaatatctaacatgattgtccgttcaaacagtcatattttattcgtttttgggaggaagtgatattaaggtatatagataatagtcatcggattttaaagttaataaaaatcaaggagtaaaacatgaagatgaaattacaaaatcaaaagatgctttcactttttttggtagcattaatcgtctttgttggcgttggacagtcattattagcagtacatgcagagtctaataagaccgaaaacataacagtaacgttggaagcgggagaaggaacattcaaggatgataattcaaagaccaaaataattataattccgaaagggcaaagcattactggtgcaggaaaacgagttccagaagtaaatccacctgaaaataagatatttgaaggttggtattggcgtgaaactgatgttccagacataagtggaattcctatggattctaacgataacataatagctaaatacagaactgttagtgatttagaaacagtccctcctgctgaaatagaagagataagtaaagcaaaagaaaacttgaaaaattctgtagaggcactcaagaagttgagcgaaagagaaatcgacatcc

SEQ ID NO: 2382 - DNA, 32759 bp, Unknown
  16S sequences of unknown bacteria
gcggttttttgtagaaccctgcgctctgctcagggttctacatgcttaagcatagtaaaaaagccgccgcatgggaatgcattcccatgcggcggctttggcgcgggcggaatcagtcttccgcctgctgcttggcgtttttctgcgccttaatgaccttaagccgggaaaaatcctcccgttccttctcttccagggaatcggtgatgaacttcacggtgctggtcaggcgggggatgatgatgttcttcagggcgttggcccgtttctgggtcttgttgacggcggtggccaggcggtacacgctgttttccacctccgccagttcggcggtcagcttcttcacacggtcgaacttgatgtacgcctcgtccaccagggagctggtggacatgaaaccatagcgaagggaaaccggctcggcgtccagcttgaccatggggatttccacccccatgacgctgcgcaccgtcagctcaaggccgttttccaccggcaccgacgcggcgatgtcgtcgcagacgccgtgggccacgttggcccgctgcagcgcctgatacgcctccgcgtagcaggagtcgatctgggactggatcaccgcggcccggtcaatgagctgcatcatttcccggacaatgatgttccgcttgcgatccagcagttcaaagcccaccttggctaaatccaaggattttttggtgttgatgaggttgcccttggtcggaaaaacttgatcagccaagtgaaatcaccgctttcatacaggagtgaggacggccgacgggcggcgccgcgtcaatgcaccttcaagggctgggccgtcacggcggcttcgggatggtagtgggcatccaaggtcttgtcgtccacccgatccagctcttccctgggcagggtggagagcagccgccatcccagatccagggtctggtcaatggagcggttttcatcaaagccctggttgatgtactgctgatcgaacatccggccgaactccagcagcttcttgtcgcccggcgacagctcctcctcgccgatgaccgaggccagagagcgggcttcctgcacccgggcataacaggcgaacagttgattggacaccgccgcgtgatcctcccgggtgaacccctcgccgatgccgtccttcatcagacgggacagggagggcagcaccgacaccggcgggtaaatcccgctgttgtccaggctgcgatccagcacgatctggccttcggtgatataaccggtcaaatcgggaaccggatgggtgatgtcgtcgttgggcatggtgagaatcgggatttgcgtcaccgaccccttgcttcccttgatcatgccggcccgctcgtacaacgacgcgaggtcggaatacaggtaaccggggaagcccttccgcccggggatttcacccttggaggccgagaattcccgcagcgcctcggcgtaggaggtcatgtcggtcatgatgaccagaatgtgcatccccaaatcgaaggccaggtattccgcggcggtcagcgcgcagcggggggtgaggatccgttcgatgatggggtcgttggacaagtttaagaacatggcaacccgtccgagcacaccgctttcttcgaaggaacgcttgaagtattcggccacgtcgttcttgacgcccatggccgcgaaaacgatggcgaaatcggaacccgattcgtcggcgattttcgcctgccggacgatttgggccgccaactcgttatgccgcatgccggagccggagaaaataggcagcttctggccccggatcagggtcatcatgcagtcgatggaggagatgccggtctcgatgaagttccggggatacacccgggacacggggttgatggcggtgccgttgatgtcccgttgctccaccggaaaaatatcgcccaggccgtcgatggggcgaccggagccgtcgaagatacggcccagaagctcgggcgacaggggcatttccaccgggtggcccagcagacgggtgcgggtgttgtccagggcgatgccattggtgccttcgaacacctggataaccacccgttccccctccatctggacgatacgcccggcccgttcggtgccgttgtccaggcggatggaaaccgtttcctcgaaggtggcgtccttgacgccgtctagggcgatgagggaaccgttgatttccttgacgccgatgtattcgatgatcatatggtcagtccccctcctatcgtttgagcgcggccagcgtgtcgtcgatttccttgtaatagccgtccagcagctccaaatggtcgttggggacgtcgtatttgatgcggctgaccttgtcgaataagccgagcgcgagtatctgcgacaggggcaccgatgccgccacgatggcctgcgccgccttgtgcaggtacaggatgacccgcatcattttcagctgcttttccagcgggacataggtgtcgtcctgatgatacgcgttctgctgcaggaagccgacccggatgacccgggcggtctcgatgaccagcttttgatcgtcgggcagcacgtcggagccgatgagcttgacgatttccatcagctggttttcttcctgaagcagctgggcgatctgggtgcggcaggcgaggaaatcctcccccacgttcttcttgtaccaagcggtcaaatcgcccagatactcgctgtagctggaggtccagttgatggcgggatagtgccgggcgtaggccagggatttgtccagcgcccagaagcagcgggtaaaccgcttggtgttctgggtgacgggttcggagaagtcgctgccctggggggacacggcgccgatgatggtcacgctgccggaaccgccgcccaaaggctccaccatgcccgcgcgctcatagaactcggacaggcgggagggcaggtaagccgggaacccttcttcagcgggcatttcctccaggcggccggaaatttcgcgcagggcctcggcccaccgggaggtggagtcggccatgatggccacgtgataccccatgtcgcggtaatactccgccagggtgatgccggtgtagatggacgcctcgcgggcggccaccggcatgttggaggtgttggcgatgaggcaggtgcgatcggtcatgggccggcccgatttcgggtcaaccagctcggagaactcctcgagcacctgggacatttcgttgccacgttcgccgcagccgatgtaaacgatgatgtcggcgtcgcaccatttggccagctgatgctgggtcatggtcttgccggtgccgaagccgccggggatggccgccgtgccgcccttcgccaaggggaacagggtgtcgatgacccgctgcccggtgatcagaggggcgtcggcgtacttccggctggccacggggcgcggggtgcggatgggccactgctggcagagggtcagatcgtgatccaggccgtcctcgtcggtgatggtgaccaccgtgtcgttcaccttgtaggccccgctgggcttcacggccttgacggtgccgtacagttggggaggcaccatgcatttatgggtgatgatgggggtttcggggcaggtggcgtacacgtcgccgggatgcagggtgtcccccgccttcaccagcaccgtgacctcccacagcttgtcggcgtcgatggagggcaccgacacgccccggttgataaaatcgccggacagcttctcgatggccttcaggggccgctcgatgccatcgaaaatgttgtcgaggatgccgggccccagcgtggcgcacagcgggccgcccgtggcgtacactggttccccgaccttcaggccggtggtgttttcatatacctggatggtggtcgccttggcggtgatgccgatgacctcgcccaccagcttttcctcgcccaccagcaccatttccatcatggacaggccggtattgcccagcactgtgacgacggggccgttgatgccaaagactgtattcataccaaaagcccccttattctacggtcaagccggaggtcttggcgaaccattcccgttggatgtccagcttggtgtccagggaatcgtccgccagcatgccggtggcggcgttcaggccgcgcaggccgcccaggtggatgtccgcggaggtctccacccggctgcccgccgggcagagggccgtcagatcggggatcagcgcctcgtcccggggcgccacctcgtacacggtgccctcggcgggcatccgggccgccatggcggtcagcgagtccttgagggactggcggtattccggcgtggcagtataggcggccagctgttccttcacctcggcaaatatggtttcggtcatgtcccggcgcttgcccagcagctttttacgggcatccagctcccggcgggacatttcgcggctggcgttgttcttcagctccatacgctcccgctggattagatcataagcgtccgcgagcacttcctgctcggcttgtgtcagccgctcgattttatagtcttccacctcttggtggattttctggcgctgttcctccgcgtaatcggttatcgcctgtacgaatttactgactttctcatcgctgttcgccatacgcagctcccatctccggcgagttgtctgcgccgcagagcggccgtatgccgcgggcctttcgccggaaaagcccgctcccgcagggtttaggtaagcgctgaataaatcggccacagcatcttttcggcggggatttactcatcgcttacctagattttgattccgatggcctcgcggacataccgggtgatggaatccttggcgcggccgttgccgtgccggtcggggatttccacgataagcggccgggaccgattgagcttcagatcgtccacgaggtcgccgcacatcttcacgagatgctcggtcatcaggatgaccgccacatcgtccatgttcatggcggcggccagggcctggtgcacctcgtcgggctcgtgtaccaccgtgccctcgatgccggccagacgcatgcctacgcaggtgtcgttgttgtcactgatgacataaaagcgcacgggtactcactcccttccgcgcggccggctatttcaggatgagaatcataatggcgatcagcaggccgtacaggccgaagccttcgcccagggcgacgaagatgatggatttaccgaaagccttgggatcctccgccgtggcgccgatggcggcgggggcgccggaggcaacggcgataccgccgccgatgccggccaggcccacagccagggcggccgccaggtatttcatgccgtcgcccacgctggtgacagcggtggcaacttcttcggcggcggcgggatcgttcgcggcggcggaggccatgaagggcacggcgcaggtggctgccacaatgagaatcagggtcaggaagtgcacgcgcatgaccttcttggcgggcttgcccttcttcaccaggataaaggaaatcagcagggaaacagccagcagggccaccggaatcatcaaatacgccatgttcataacaagtacctcctaaatataatcgatgtgcgggaaaatctcccccaatttatttatcagccgatacggagaggggctggaaagcgcggccgtcgccgacgtaataccggctgaacatttcatagaactcgagacgcatgacctggatggacaccagcagggcctccatccccatgaccagggcgttgccgataatcaccgcgatggtgaagcccagcgggccgaacagctcagcgatggcaaacaccgccatcatcatgccggcgtgaaccagcacgaacgcggccacccgcaggaaggacatggtgttggatacataggacagcaggatttcgaattcctcgaaaaagttctggatgatgaactcgccccatttttctggcttccagtccttttcccctgccataagcttgcccagcggctctcggaagaaaatcaccaccaggggcagcacgataagcagcagcacatagggcagattcagcacatggacgtcgaacagcagctgacagccgaaacccagcaccagcgagccgtagaacaccagccccgcgatgccgttcggaccaaagacggcgctttcataattgcgctgcttgaagccggaatagatgttgagcatcatggccagcatgatgagggtcaagccgatgaccaccgcgaacaggatgatgttggtggccatggcggagttcatgacctcgatgggcttttcctccaggccgaacagcgccttgtacatgggatccagcacatgctcgaaaccgaacaccgacccgtacaccaggccgaagacggcggaggaaatgccgcagggcagcaggatgcgcccgatgggcatctgcttgaaatgccacatggcccagccgatgacggccaccaggatcccctggcctaaatcgccgaacatgatcccgaacaggagggtgaaggtgatggccacaaaggcggtggggtcgatctcgttataccggggcaggccgtacatgtccacgaagtattcgaagggccggaaagtccgggcgttgcgcagggtgacagggggcgtgtggtgggtgtccccctccgccgactcaatggaatactcgatggcgtcgatggcgtccagcgcggtctggaactttttctcctcccgggcggggatccagccggccaagataaacttgtcgttgtaccgggccgcgtactgccgcacgccgaacagggtggccagctgcttgtaccgggcatgcacctgcaggcacagattcttttctttggcccagtagtccgcgatttcctttttcacctggtcgagcgcggcgttggtggcgttcagctcggtgcgcagcttgccgacgatttcctccggggtgcccacggcggagggaatgcgcaggcgctcgaagtacaggctcgagaagatccgatcgatgtcggaggccatctccagcggggcgaaatacacgccccagtaatactctgcgtcgctcgctcccgggaaaaacagcacatacgggttctggctgtaggcgttcagcttctcaaagctgtccttgggcaggcggccgaagcgcaccttgatggtttcgcagtggatgatgctgtccaggtcgatattcagcccccggaaatgctcgaactgctcgatatcccggttctgggcctccgccttggtggtcagctcgctgcgcctcttggacatctcggcggccttcgccgtgaattcctccacataggcggccatgtcgtccatctccatggtggagggagccacgcggccggacaaatcgccctgcacccgggcgatggccgattccagggtactcaaggggacgctataggggttctcctccttgatggtcatgaaatcggaggtgtcggaaaagaaggtcatggcgtcgtcaggctggaacacgccgctttttccgcaggcatagactaccttgtccaggctggccatctgtccgatcacgctgacgagcctcatttttgcaactgccaatgaaattcacacccccttattggtcgaggaggacaagcatgggcttgatttcctccgggggcattccgtaccggatgccctcaatgatgttgatgatgtcgtccagctccacatccatcaggatgatataggagacgagcaccaccatcggatggatggagtaatggatatgccgccgggcattgaaatacggcacccggtgatgcagatcgtggataaaccgccgctgggcctccggcagggacttgcccacccgggtggtgtaaaaaatccggagcacctcgtccgccgtgggggcgtcgatcatcttgtccatggtcttttcgggaatgcagcgcccggacggcagaaggttggcgcggattaggtcgggcgccatgccgaaataccgcttcatccgcacgatgcgggagacgttctgcacgtcgatctgggtgccgcacaggttctcgagctgctcgtgcaaatcgcctgacgtgtcgtcgatgatggtcagcagggtgttggtcagataggtatgcagcgcgttttctatttccgtaatgcggatatgcccgttctccggcgggaactggctgatcattttcgcgtagggcgtcccccccaaggcggcgaccagctccgcctggtttttcgccttgcccatcttcatgaaatccaggcgcgtctggctggtgaaaaacaacggcatagagaagaaaaattcgtcgctgcgccccgcgttcatcaaccgcaggcactggatgatctggtcgatttccccccgccggatgatgtaggcggacatgtgcatccccacggtggcgtcgtaccggctcagagaggaatagtcgttgaacagcttgcgccggagtagcatctccagatgcccccgatggatggtagtctcgttgatttcggtgagcatcaccgcataggaggtacggtttttcagataagaggccacctcactgacgctgtgacagttcagcagctcgagataattctgcgatttcaggctgttgccgtacatggcgcgggccttcgccagaataacgttggcggatggtgccgatgcgcgcatggccatgccccctttcgtggataccttaccgtcaggattccttcacctttttgacaatatcggccacccactgcgtatgcttttgcgcatacagccgctcgaggcgggccgtctgttcggcatagtattcctcgcgcttgcgccatttctgctcgagcagcgtctgttcggtctcggcgttgatttggatgcggcggcgggcgcgatccaggtattcctctttgagcgcctcggcccgcttgacgagctccttctccgattccagcttttcccgccgggcggcctcggtgatttcctgcgccttgcgatccatatcgatgatgcgcttgatcatttcttccatgaacgcctcacgcctttctgtctatcggcgccgggaaaattttccggatatgccgacgtaatttcgggggagaatgaccttttgtcattctcccccgaacgtatgctgtttcatacaaataggatggccttggatttcagtatatacctgtaaaaataaaattacaatgttcaaattggcgaaatgtcacggaatttcgtgtgtggtttcgtcaatttttcaggctctgcatgggggctggaatccggccgccccggccgataaaccgggcgggcgagtaggtgttcagcggcatcaccgggccgccgcccagcaggccgccgaagctcagttcctcccctaccgtcttgccgatggcgggtatcaggcgcaccgccgtggtcttggagttgaccatgccgatggcggcttcgtccgcgatgatggcggaaatcacctccgccggcgtgtcgccggggacgttgatcatgtccagccccaccgagcagaccgcggtcatggcctccagcttctccagccgcaggcagccgcagcgggcggcgtttatcatccccgcgtcctcggtgaccgggatgaaggcgccggacaggccgcccacatgggaggacgccatgaccccgccctttttcaccgcgtcgttgagcagggccagggccgcggtggtgccgtgggcgccgcagcattccagccccatttcctccaggatgtgggccaccgagtcgcccaccgccggggtgggcgccagagacaagtccacgatgccgaagggtacgcccagccgtttggacgcctcccgggccaccagctggcccatgcgggtgattttgaaagcggtcttcttgatgagatccgccaccgccgtcaggtcgcagtccccggccttagccagggccgcccgcaccacgccggggccggaaacccccacgttgatgacgcagtcgggctcgcccgcgccgtggaacgcccccgccataaacgggttgtcctccggcgcgttgcagaataccaccagcttggcgcagccgatgcagtcccggccggcggtgcgttccgccgtctcgcggaccacccggcccatcatagccaccgcgtccatgttgatgccggccttggtggagccgatgtttatcgaagaacagacgtgatcggtgacggccagcgcctcagggatgctggcaatgagctccttgtccccgggagaaaagcccttctgcaccaaggcggagaagccgccgatgaagtttaccccgcaggtgcgggccgctttctccagggtgacggccatcttcaccggagccttgtcctcgcaggcggccaagatcatggcgatgggagtgacggagatccgcttgttgataatcgggatccccagctccttttcaatctgctcgccggttttcaccaggtccttggcgtaccgggtgattttgtcgtagattttcccgcaggccttctcgagactgctgtcgcagcagtccagtagggagatacccatggtgatggtgcgtacgtccaggttttcctcctgaatcatggtgatggtttccagtatatcgtgggcgttgagcatagtgttcccgtgcctttcctggcgggggtgtcccccgccccaaaattccagtgggtttcgccgttagatggtgtgcatagcgttgaaaatatcttcatgcatggcatggacggaaaggcccatttccttgccgatagcggtcagctcgtccgcgaactgggtgaaggggatatcgcttttcgaaatgtccaccatcatgatcatggcgaacatatcctgcaaaatggactgggtaacctccaggacattgatgccgtgcccggcgcattgggcggaaacccgggcgagaatccccaccatgtccttgccgatgactgttatcactgcgcgcatactctgctccattctccgccggatccgccccgcggcccggcagtgctgttttcattcgtcctattctaccatatttcaaccggaaaagaaagagccaataaaaagcggccgccgaactggtcaagtccggcggccgcctcgcgttcggccctattgcagcacaatcagcagctcccggctgcaggagaggaacttggcgccgcggtagacccccgcggcccggctaatggccgaccagttttggcgaaggctgtccgcgaaggcgtcgaaatccccctccacccacagccgggcgatcccgtcgcccctgtcggcggcctttaccaacgcggccacggcatccacctggaacgcccgctgtaccaggcggtttttatggtagtaattcagcgccgtggcggtgcagtccggcaggggatagttctcggcatccatggtgtgatcctcccggatttgggcggtggtgacgttgaaatagccgtaaaacaccggcttgtcggcctcgcggatgccgttatagaccggatcgtcccaggtgatgtccacatggtaatacgcgccgtccagctgcaccagattccaggcgtgcccctccccctggctctgaccagtgacaaacaggcagggcacccccgcctggtataataggtactggaaggctttggagtatccgtcgcacaccgccagccggttcaccagcaccccgtagagattgtgaatctggggctgactctgcgattcgtcgtaagcggtctgttcgaccagcctgtcgtggatggccagttcccgctcataggggctcatatccccggtaatcccctccagcagcttcgcggccgcggcgttcaccgccgccttggcggcgggcagctcagcggcgctgaaggtgtaggcagggatgatgtccacgattttatcgccgtccgtatagtggtagcggtacgacgcgtccagccagaaaacctgggggaaatccgcgcggacatacgcgtacgcccgctgcatctcgtccaggctcagcttcagatccgccagatacacggctccctcccgccgctcgctgacggcggcggccagccgccgataggcggtcagcagccgggcgttcccgctcagctgccgtgcgccgtaataatccgccgtgtccagcggcgacagggcccggctcagcggctcgtcggccggcacctgggtggggggcgccgtgacgggggcggtgccctccgtcacccgctcccccgtcggccgggtcgtggaggtggcgacgtgcctttttttcgttgtgggggccgccgtggcggcggtgacgttctgggaggggagcgtcgacgagaaggctgcggcagggccgtcggccgacgagaccgtcgtggtttccataggcagggagagcgtctcacgcgtcccgtcttccgtccgaaggccggaggaatccgccgtcgacggcggttcggccgcttggcaggcggaaagggccaacaggccggacaggcaaagggccagccagccggatggccgggcaaacgcgctttttttcatcgacagcgccccatttctaaaagcctttttcttcattttactacaaaacagcgatcttgtcaccgatcccttcaattttcccccggaatatgctatgatgcaagggcaaaggagtggtttccatgacatgggtggattttcatatgcataccgacgcgtcggaggacagcgacgcgcctctgcgctccatgtgcgacgcggcggttgccaaggggctgtgtgccgtcgccgtcaccgatcacctggagatggtggactacgaggactatgtcggcacgctggtcaaatcgtggcgcgacagcggcgaggccgtgcccgcgtacgccggccggctgcggatcgcccgggggatcgagctcggcgagccgctggccgacctgaagcggaccgaggccatcctggacgcctacgatttcgactttgttttaggttcccagcacaagctcaacagcctggacagggaaaccaacatcgattattacttctacgactacaccggcaaggacgtcgggctggtgatggacgagtatttcgacgcggtgctggagctggtcaactgggggcggttccacgcgctggcccatctgacctacccgttccggtacatcccagaggagaagcggcccgccgatttcagccggtggcaggaccggatcgacgcgatcctgcggcagctggccgtcaaggggctggcgctggagatcaacacctccggcctgcggcagccgggcggtaccacccatccgcccctgtccctggtgcgccggttccgccagctgggcggcgagttcatcaccatcggcgcggacgcccatcggccggaggatgtgggcaccggccttgaacaggcggccgccctggcccgggaagcgggcttcacccaccaggccgtgttcttcggtggaaaaatggaattgctgccgctggaataaccggcaaagccgccgcgcagaagcctgcgcggcggctctttttatagagtatacagcttggcggcgcccttggtcatgagattccggtagaggagggcgctggcggcgagaaacgcgagggtgacgccggtcatggtccacaccgggggaaggaatgcctgcagcccgaaggtcaggccggcggccacccccaccagacccatgccgcccaagacggcaatcatggtggcctggctctgcttgatgacctccgtttcagttttccaggtgaaatgaggataggcgagattgacgcgcaggccgaacagcggggtgaacacggcggcggccagaggcagggcgaacagcagcagaagatccggcaggccggggcgcgtggcgacggccagcagggcggcgcagaccgctgtcagcggcacggtgacaagcatccccagcagcagcttgctgcgaaaaatatccttcgcggtcaccggcagggccttgagcgcctggaagtgatccccctccagggaaatggcgctggcggccgtgttggacataacgatgaagaagcagagcagcagcggcagggccagcccgatcccgtcccgcaggtcggggatttgaagcgcgctttccagcccgtccatccccacgaccagcagggccaccgacgcgacgagcagcagcagcatgccgatggcggtgttcataacatacaggggcgaggccatataccgccgccattccttacggaacagggcggccaaaggggtggcggtcttcatggcccgtaaccggtagccggaggaggcgcgcccggcggtgagccgggaattccaccggcggaaccgccaagcggtcagggcacagaagccggcgaacagggccgccgacacggccaggaaaagggcgagggcccccacgtccccccggcagaccgcccgcacgaacaaaggggccaggacatacgcccggcccacggcgtccatgacggcctggccgatgtcggcgaagttttccaccagcgtctgggccatggtggaggcgaccaccaccccgcacaccagcgccaaggacaccagcagattgaccaggctggaacgcttgaagcgggaggaaaccagagcgaggaaggtgccgatcaccgcggccacgatcagaggcaccaggggaatggccagcagcgccaggaggaaatacagggtataaaaccagggcggcgcggcgaacaccgcgtacaccacccaggcgggcaccatcgtcagcagggtgaacgccagattcacgccgtacagcatcagcaggcggctggccaccaggctgcccgtgcgcacaggcagggacatcagaagatcgtagtccttaaaggcgaagagcagaccgggggccttgtagacggtggtcaccagggacaggacggaggccacggccatcatcaggccgggcaccagatcgagcaggccggcaggctccagcacgaaagccatgccgacgctgtacagcgtcatcatccccacgagcagcagggcgaccgtgcccatcatgaccaggaagccggtcagcttgcgcttttcgccgggatcgccggtatgccggatcttattgaacccgaatagggccagcagctgattcttcagcagcaaacgcacttcattcatcatcggtcaactccaggaatacgtcctccaggctctgactgcccttgacggaggcggtttcgccgcaggcgatgagccggccgtccttgatgatggcgatcttattgcacagcttttccgccacctccaggacgtgggtgctgaaaaagatggcgctcccctgcccgcacagctcatgcatgatttccttgagggtatgggaggccttggggtcgaggcccacgaagggttcgtccagcaccagcagacggggcgtatggatgagggcgccgatgagggccagcttctgcttcatgccgtgggaataggaggaaatgaggccgcccaggctgccggtcagctcaaagcggccggcgtaatcggcgacgcgggcctcccgctcggccttccccacccggaaaacgtcgccgatgaaattcagatactggatgccggtgagatgctcgtacaaatcggggttgtcgggaatgtaggcggtgacgcttttgcaggccaccgggtcgctcttcaccgaatggccgtctattaaaatctcgccctcggtgaaatccagcaccccgaccacggcgcggatggtggtggttttgccggcgccgttatggccgatgaagccgaaaatatcgccggcctccactgtcagggacaaatcgtccacggctcggcggccgcccttgtaggtcttggaaaaatgagaaatcgtcagcataggatcgatcctttccagagcggcgcgccgctctacttctcccgccggccggggcgcatgtccgccggcgtcaggatggtggtcagccgccgctgccggcgcccctccccgggcgggagcgcggcggcctccattaccagggcgctcagcttttcaccgaaggcccgccattccgcgtcgttcataaagagggtggcggcggacacgcccaggccgtcgcgggcgggatccgcctcatcctccgccagataccgctccacctccccgatgaggcttatcagcagggcgggcagcatccggcgcagctcctccttcgtcggcgggccctgggcgggcttgcccagcttctcgtccgccggattatccgtcagggcgtaggtgcgttccaccgtcccccgcacccgggtttcctccaccaccgtgagataccccagctccgtcagggtgcgcagatggcggtagagactggcgcgcggaatgtcgggcagggcggcggccagctcctgcacggtggcggtgcccagaagggccagccgctgcaccaggcgcaggcgcaccggatgcatcaggacgctgtgcgcaaagtcggccaacgtcatctcacctccaagattattatcaattttgataataatccaaaattcgagacttgtcaagacaaagaatgacaggattgttattaaattgtaaccataatcgcctgttttccggtaggcggcgtggtatagtggggggagaatacagaggggattcgtttgaaagaaagacacccgcctttcgttcaaacgggttttgtggaagggaatgaatcatgatcatgaaaacgccggcctgacccagcagcagctcaagaacatctacgccggcaaaatcaccagctggaaggcggtgggcggcgcggatcgccccatcatcgccttccagcgcaacgcggattcgggcagccatacgcgccgggagaacgcgtggggcgcaaataaatccgccgttccccggaagtcccggggaacggcggatttatatctgttttttgatccgatcgagggcacccttttccaggcggctgacctgggcctggctgatgccgatttcgctggatacctcgatttgggtcatgcccttgaaaaagcggagattgaggatgcgcttctcacggtcgctcaggttccggatggcttccttcagggcgatttcatccagccagttgcgatcgtcgttgtgatcccccacctgatccatcacatagatggtgtcgcccccgtcggaatagaccggctcgtacaggctgaccggctccacgatggattccagggccagcaccacatcctccttgggcatatccagctccttggcgatctcctccacggtgggatcccggagcttttcgttggtgagccgctccttgacctgcatggccttataggcggtgtcccgcatggatcggctgatgcggatgctgttgttgtcccgcaggtagcggcggatttcgccgatgatcatgggcaccgcataggtggaaaaccggacgttcagggtgacgtcgaagttatcgatggccttgatgaggccgatgcaccccacctggaacagatcgtccaggttctcgccccgttgggtgaagcgctgaatgacgctgagcaccagcctcagattgccgttgaccagatcctccctggccgacgcgtccccctcatgcatccgcctgagcagctgcatcttctcgctctcggtgagcaccttcaaagtcgcggtattcaccccgcagatttcgaccttgttgtacatcgggacacgtcctctctgcaaatggcgtggcccgtgaaagggccctgcttccagtattgccagatgcagggagaacatgcaggagggtgaaaaaacctcgctggaaaaaaacggcgcgaacggaaaatcagcccgcccgctcgatgtcttttttcaggcgcttgatgatctttttttccagacgggagatgtaggactgagaaatccccagcagatccgccacctccttctgggtatgctcctggttgccgctcaggccgaagcgcagctccattatcagctgttcccgttcggacaggcggcgcacgcactcgagcagcaggtttttttccgcctcctgctcgatgttgcggttgacgatgtcgggatcgctgcccaggatgtcggacaggagcagctcgttgccgtcccaatccacgttgaggggctcgtcgatggacagttcgttgcgcagctgggtgtttttgcgcaggtgcatgaggatttcattctcgatgcagcgggaggaataggtggccagcttgatgttgcgggaggggcagaaggtgttgaccgccttgatgaggccaatggtgccgatggagatgagatcctcgatgcccacaccggaattctcgaacttccgggcgatatagaccacgagacgcaggttgtgcgtaatcagcatatcccgggcgtccggatccccctcctccatccggcggaagacgtccgcttcctcggcgggggtcaggggcggcggcagcgtgtccgcaccgttgatatagtggacgtcctcccccgcacggcgcagcagccgccgccagaggcgggataaaaagctctccagccgcggcagcaggccggcgggcagaggcacttcctcgcgtttgactgtgatcatggttcgatttcccccttagagcaattagcgaataaactggcacaagttcggcggtaaaaatggcgtgaagacgtcgttgtcgtccttggcgggcgccagcccgccggcgtcctccgccttgccccacatcatttttcctcgcctccttttatgccattccacccgccaattgctctagatgaacgcccggcgatgggcggaaagctcgcggatttcgccggcggcgcgtcgaacaggccggcgatgtcggtgcccaccagcgcgtcgtagtccccccggcccagttcctcgcagacggccacataggcaccagtggcgtcccggttcgcgccgttttccgccaccacggtcagatgctccgggcggaaggcgggcagcaacccgtcgccccccaccgagcggaagggtaccagccgtaaacggctgcgcaccgcggcggccgcgccgccgtttccagccccggcctcgccggagacgaaggcggccggatcccggagtgcctcccgcacctcggcgggcaggacgctctccagcgcggcgcggcggaccaccgccaccgggctgccggaaaacagttcggtcaggctgttgccgctgtcgtacagggcgcgcaccgccgccgtccgcccgccgcaggtcaccagcaggcggtaatcccggcccaaaggcgcctttttgcgggtaaaccggtcgtacaggcacagggcgccgtagctcaccacggtcagcagcacgagggtcagcggagagacgtcgtaatacaccacgccgcccaccacgtaaaagccctggggcgcggcgaagaagtacaacgcgccggccatgccggcaaacagcgtggagatgacgaaaaagaccaccacggcttttatgtacggcagccgcccccgccaaggaaaggccaccaggagaatgacgcaggccgccgccagcttgaccgccgtggcggcggccgtgggcaggtcgggcaggaagatcaggcaggaggtcgcggcccccagcagggcgcccagcaccatccgccagcggcggcggggcaggcgcaggatgcgggccgtggccagcagaaggatgaaatcgatccacaggttcaacgccagcagcacatcgatgtaaatgaccggcatccgcctcgtccctttcgtatacaaacgcccgtcccaaggtcacgcggacatccgggcttgtatatccattatatcgtcaggcggggggaaattatgccgaatgaggagaggcggcggcgtttttttatgaaaaggctgtcgaattcttcctgcccggacgccgggattcgccggaattcgcggaaaagcgcgcggccggttggctttttcgcgcaaatgtgctatactggcagcgcgcggccgggcggccgaactttacacaacaaggacgggacacacaccatgaatctgcacatcaagcaagcggttctccatgtgcttgacaccagcatcgacacgccggttctctccgacgcctgcctggaactgagcgcggacgtatacgagtttctgagccagcacgtggaacgggccgcggccagcgacgagcggaaggcctgcgaattccaagagggatcgcccttcctgacctatcccctgcacgatctggagcagttcctgcccaccacccgggaaatcgccctgcggctgtttcaatacatgcggatttatccggacatcccggcggccgacgtgctgatgatgcaggcggagatcgatgagcagccgcattttgtgctgctcaagctgaattacaaggaatcctacatccattttctgcaaaacggcgaggaggaaaagcgcacctccatcgtgcggcagcgcacggtgctgccggcgccggggggcaagggcggcgagacgttcctgctgaacatggccaccggcggcgtgcaggtcatcgagaaaaagttcgatattgacgggaaaaaggatttctacttttcctcccggttcctggaatgcgccgccgccctgtcggaaaagcagaaattccaggaaatcaaaaaggcggcggagagcgtcaacgagctgtttggcgggggcgacaagctggacaaaaaggcggagacccgggtggcggcggtgctctgcgactacatgggggacgcgcaggaggcccgggtggaaagcctgtgcgaggagctgtacagcgacaaccccgccgccaaggaggagttcacccggatcctccgggagaagcacgtggagccgcaggacacggtgcaggtggcccccgccaccgtccgccggatggaaaagcagtccatccgcacgcccgacggggtggagatcaaaatccccatcagcctgtacgagagcggcgacgcggtggaattcatcaacaacccggacggcaccatttccctgctgataaagaacatcgagctgtgaaaaacagcttgggtttgtctgccgataaataagcgaagccgcttccaccaacgggaagcggcttcgcttatttatcgcatgtttggcttacatcgcgctgcgggcgtgaaggatccagcgggcgcgatccaggggatccacgccccggcggggcgtatcctccccgcagcccggcgggcactcgcggtatccggcaaaccgggaggaatagctgcccttgccggaggtcagggagcggaaggtcaccggatagtccagggaggtggccaccggcaggacggcctccagggtgaaggtatcccgggtgacgacaggggaatcgaattccccccgcatggcgaggatatccccgattacccggccgagatgcgcttccccagccgtcaggcgcacctgcaccaagggttccagcagacgggatccgcaggcggtcagggcgcggaggaaggccaccggcgtggcgacgaaaaagtccagcggatgggtatggatcgggtgatgctctccggccgtcagggtgatggccgcatcggtgacctcccagccgtgaatcccctgcgcgagggtttcccggacgctggtttccacatgatgctggtaccggtaaggcagctctttttccttgatgaccgagcgatagacgatgccgctccctcggggaaggggctccatccgcagagtcaggcaggcccagcagggcttgggcatggtgtaccgctcgcttccctcgccgggggcggcgggggtttccttgtaaatcacgctgggggcggaaaaattggcgtggaggcggtagcggccggccagccgctcactgaggatttccagctggattttgccggtgatccgcagatagatctcccgcttctcgcggttccattccaggccgagaaggggatcctcctcgctgagctcccgcagggcgtccagcaggggggacagctcctcctcgcaggagggaaacgcccgcaccagcagcaggggcaccgccaggcggccgggccgccgccgttcctgcgcgccgaggatatcccccgcgcggatggagggcaggccgtacagcgcgccgatctccccgccgcgcagcacgccggcgtcggtggcgcggctgccggaaatccgccggatctgggtgattttctccatctccgaacggcccagcaccggcacggcgtcccgattgcgaagctggccgccgaaaagacggacgtgtgcggccttgcccatgacgggatcgtgctcgatggcgaacaccacaccggacaggggcgtattctcccgggtgtcggccggaggcagaaagcggacgatgccgtccatcagctcccgcatccccacccccagcttggccgaggccagcagaacaggtgtgagcttccccgcccgggcggcccgggtcagggctttctccagcgtctcgtcgtccaccgggcggccctccagataggcgtcctccagagcgggatccgcttcggccgcggccagcagcgcctcctcccggaaaacaggatcggcaaatgggcggggcaggacggcgcaggcggcatccccctccccctccgcccgctgcacgggcaggcaggcggcggtcagctcccggccgatttgatcgagcacatcggcaacgcggctgcccgcccggtcgattttattgatcaccagcaggacggggagatccatgcggcgcagggcttcccacagcaggagggtgtgggcctgcaccccctccacggcggagagcaccaaaaccgcgccgtccagcgcggccaggctgcgctccacctcccccgcgaagtccacgtggccgggcgtgtcgatgagctggacgacgcctccgccgtattccagccgggcgcaggcggttttcactgaaatgcctcgccgcttttccacctccagccagtcggtctgtgcggtgccctcgtccacgttgcccggctgccgcacggcgccgcacagatacagcaactgttcggtcagggtggttttgcccgcgtccacgtgggcgagaatcccgatattgcggatatccagcacggcgcgtccctcccccgggcggttatttcgggctgatgatgccgacgcggtaggcgcgcagcagcattttcaggcggtcgattttctcctgaatttccgcacctttatccatgtccttgaccatcaggcggtggcgggtggtctcgaaaatggtggtggtggtcaggatgtccttgttctcctgaatggccgactgaatgccgccgaaggattcgtgggcgatcagccgcaggccgtgggaggaatagatcagggtgtagccggcgatgccggtggtggcgtgataggccttgcagaagccgccgtcgatgacgatgaggcggccgtccgccttgatggggctttccccctggatggccttgaccggcacgtggccgttgatgatatgggaagacgagggctcaagaccgaattcccgcaggattttgtcgcacaggtcggcgtgctggatatggcggtagtagggatccttttcttctttccacagggcgggctcggccacaaagtaccgttcgaaggtgctgattttatcccggccgaacagcggggaattccggccgcaccacagataccacaggaaatccacatactcctgcttgagcgggttctcggccgtggcgtagtaggcgcgccgggccgtcttgtcggcatagtccatataggcccggccgctgtaggagcggccgtccgccgccgtgaaaacgcggaaattgccgtcctcatccatggggatgcagccgtggaacagcaggttttggttgattttcagatacatgcttccatggctgtacaggaagcccacgtgcttttggagccgttcgctgcccaagaacgcccggcgcagggtggccatcagctcccgctccgccaccgacagggcatagggatccgccgcgtcgagggtggggaaatggcagtcgttgagcgggtaggcgatcccgccgatggtcaccgtccgtttgtcgcagtccacgttccctagcagcaggcggtcgtccatgccgtattccgggtggcggcggatgatctgcccctccagcttgaactgcatgatggcgatggccttgtgcaccttggacagggtgtccatgctggtgggcagatagtccttgtcgtccgggttacggggcatgaaccaggtgcagtccttataggtctcctgcgcgaagctgatcatgtcccgcaggctgatgccgtagccgttttccacgatatccaaggtattatactgtagggccaggttgagcacgcaggcgatgcacgcctcgttccctgccgcggcgcccatccagaggatgtcgtggttgccccactggatgtccacgcagtgatgctccatgagcaaatcgaggatgttgtccgcccgctcgccccggtcgtagatatcccccacgatgtgcaggcagtccacggccagccgcttgataagggagcagaggcactcgatgacctcctccgcccggttgatatcgataatggtggagatgatgtgctggtaataggactgcttgttctcctcgtcgtagttggtatggagcagctcgtccagaatatagccgaatgcctcgggcatagccttgcgcaccttggaacgggtgtatttggaggccaccagcttgcaaacctccaccagccggtagagggtgatgctgtaccaatcgtccatattgacggtgtcccgcttgatttcctccatcttttccttggggtaatagataagggtggcgaaccaggcccgctccttttccggcatggaatgagcgaaaaccatgtccaccttttcccggatgacgccggatccgttgttgagaatatggcggaaggcctcgtcctcgccatggaggtcgctcatgaaatgctcggtgcccttgggcaggttgcgtatggcgttcaggttaatgatctcggtgcagacggacgagatgtccgggtactgctgggccagcagcttaaggtaatcctcctggcggcgcagctcctcattctccaggctcacggcgggcctcctttccggcaattacaggcccagacgggcccgcagggcggcggttttgtccgttttttcccacgacacgcccaaatcctcccggccgatgtggccataggcggccagctgccggtaaatgggacggcgcaggcccagctgcccgatgatggcggcggggcggaaatcgaagacggcccgcacggcctcggccagccggtcgtcagacaccacgccggtgccctcggtatccaccagcaccgacacgggatgcgccacgccgatggcataggccagctgcacctcgcagcgcttggccaggccggcggccaccacgttcttggccgcgtagcgggccatataggaggcggagcgatcgaccttggtcggatccttgcccgagaaggcgcctccgccgtggcgggcgtagccgccgtaggtatccacgatgattttccggccggtcaggccgctgtccccctgcgggccgccgatgacgaaacggccggtggggttaacgtaaatcttggtctggtcgtccatcagcccggcggggatctccgggcggatgacccggtcaatgagatcggcgcggatggtctgaagcgacacgtcggcgctgtgctgggtggagaccaccaccgcgtccacccgcacgggggtgttcccctcgtattccaccgtcacctgggtttttccgtccggccgcaggtagggcagcgtcccgtccttgcgcagggtggccagccgtttggccagccggtgggccagggaaatgggcaggggcatcagctcgggggtttcgtcgcaggcgtagccgaacattagcccctgatcccccgcgccggttttatcgaaatcctcggcctgggcttcccgcccccgggcctccagggcgtcgttgacgcccatggcgatatcgggcgactgctcgtcaatgacggtcagcaccgagcaggtattgccgtcaaagccctggttcgcgtcgtcatagccgatgtcccgcaccacctgccgggcgatggcgggaatgtccacgtagcagtcggtggaaatctcgcccatgaccagcaccatgccggtggtggcgatggtttcgcaggccacgtgtgccgtttcgtcctgggccagaatcgcgtcgagcaccgcgtcggaaatctgatcgcagaccttgtcgggatgcccctcggtcaccgattcggatgtgaaaaaatgccgtgtgttttccatactgtacctcttttcttttccatgccaatcaaaaacgccgcccggcagaaaccgggcagcgtcgtattccacctcatcttccggtttccaccgcaggatttagcaccttgccactcggcaggttgctggacatcatcgggcctgttccctccgtcgctcttgataagggcctattcggttgtcacggtcttattttagcacgcctcgcggaaaaggacaagaccgggcggaatttttcccgaagatgcccaaaacgcaaaggggcggcgttactttccctgtgtaaggtagcgatttttctgcaggaagggggcgagggccttaaacagcaggcccgccaggatgcagttggtcaccgcgatgatgaggttcatggggatgatgcccggcagcatcagggacatcaccacatcgtggggaacgccgaaggcgtggacggtcaaaattaggttgagcggaatcatcaccagggtcctggccagggagcccaacgccatgcccacggtcatgccggtcaggctgggcttgcggtcatagaggatgcccaccagcagcaccatggcgcccgatgccacaaagtgcatcacgaagcccacccagccgttgatgcccaggataaaggcctgcaccagggaagccaccagcaggatgagcaggccggggatcggcccatacagcagggtgccgatgagcaccggcacgtccgccatatcgtactcgataaagctgacggccgggatgatggggaaatggatgagcatgaccagcaccaccgcgatggcggccagcatgcccatttgaaccagagcgacgacatcggtgcggatttttttcataacaagacctcatttccggcgtttcgcggcgcaaaaaatcccataacggtgcggctgacgccgcccattatgggacgaaacatacgcaggaggctgcgcacgtcttctttcatccggactgaccgcactgctgcggaataccgtcggctttggaatttcaccaaatcggcccggcactgaacgcgccgggttcgcgggctgcgggaggctgctcccttaccgccggtggggaatcgcaccccgccccgaagacaaccatatattttcgatttctaagtatagcacgcaacccaagagccgtcaagctttttagcaggattgccaagcgcaggggactgtggtatactagaaaggattttcggaggggataaacttatggatatacaaaacgtgccgcgtatcgtgcaggagcttgtcccgggcaagcagatcaccctcgcgcatatcatcgccaacccggacgacattctctatcagaagctggggctgaacccggcggtggactatgctaaggcggccatcggcattctcaccatgagcccaagcgaaacggccatcatcgcgggagatctggccatcaagaccgccggcgtggatttgggctttgtggatcggttcagcggcaccctgatcgtgaccggacgggtgtcggaggtggaggccgccctgaaagccattgtagactacgcccgggacgtgctgggcttcaccgtctgccccctgacccgcacctgatgaaaaagatcctgctggtggggcgcagcgaatgcggcaagaccaccctgacccaggcgctgcggggagaaaccatccattatcacaagacccaatatgtcaaccatttcgacgtcatcatcgacaccccgggcgaatacgccgagaacaaatttctcggccgggcgttggcgttgtattcctacgaggccgacgtggtggggctgctgctcagcgcgacggagccgtattccctctatcccccgtgcgtggcggccagcgccaaccgggaggtcatcggcatcgtcacccaaatcgatcagccccgcgccaatcccgcgcaggcggaggcttggctgcggctggcggggtgcgagacagtgtttcatgtcagcgccgccagcggggacggcgtctggcggatcctcgaatatctgcggcaggagggggacgttctgccgtgggacaacgcgtgaaccaggagaaccgggccgacggccgggttctttttttctgccatccagcatatatactacggaaatgcagacaacccatgcggattttaccagtctttccagggagacccctgcatgattttgcaatttccttgttgaaacggctcgaataatctggtatactagcaataacaatttatccaggcagtcgctttccctgtgcctggacataaggagtggcagaatatgaatacatgtccgaaatgcggcggcaattacgaaggcgacgtttgtcctttctgcgcggcgagcgaacagcaggccgccccggttcagggacaggagtacgcccagcaagcacccgttcaggacgctcagcagattccgacgcagggctatcaacaggccccgcagcagggctatccgcaaggctatcagcaggttcctcctcaggggtatcaacaggtgccgccccaggggtatcaacaggtgccgccccaggggtatcagcaggtaccgaccattgtggtcaacaatgtgaacaccaacaacgtgggcggcgccggtatgcccggcatcagccccaagagcaagatggtcgcgctcattctctgcattttcctgggcaccatcggtatccatcggttttatgtcggcaaggtcggcatgggcatcctctatctgttgaccggcggcttgtgcggcatcggctggatcgtcgacatcatccagatcgcctgcggcaacttccgcgacaacatggggctgttcctgaagaactaacccgccggcaggctgccattataatatgtgcttgtaaaaaagcaggccgcttcaaaagcggcctgcttcagcttgtcaaagaaggagggaacaagcaaggggttgctccctccttttggagaaaaaagcgggaaagaagaaggaaaagaagaaaggggagtagtgccgggagcggtataaagccagctttttaagattcatggcagcaaacttaagcgtgacccattgcgtaacgcgggccaagcctctgtggtgagtataacgcatggcgtgtttgtctttcgcatcggcaaaaacgcgctcgatggtttgcttgcgcatggcgtaaatgtctttcgccaattgggttttgcgcagttgctccgctaaatccaatgcttcctgccagatgtgacgatatatcaccttctgcccattggcattgaccccgcactcctttcggcaaggacagtcccggcaaaccttcggggtgctgcggtatagccgtttgccctctttgttggtggtggtatgccggagaacttgcccctgtgggcagatcagctggtcgtttttttcgtcataggaaaaatcccatggcataaacccttcccgtcgtgttccgtgggggcgggtgtacggaagaatggggagccggccgtcttctaaaatacgcttcgcgatccatggctgcttgtagcctgcatccattgtcacatactggatttccggaaatcgactggttacctgctcatacacactgtcccatgccacgctgtcatggacattccccgctgttacctttacccctaacaccattccgtgacggtcacataccgtgtgcgcttcataggcaaactgcttttcatgctctcccttgtggtacatcccgcattccggatccgttgtcgataccacctgttccgttgttccgccgtccccgtgactgtcgtcatcctcgtcctcttcttccactggcgctttccccagcttcatcctctcctcgttgacctcttcgcgaagccgcttggcatacacacgggcagcctttgccacctgttccttctggtatttctttttgttggcgcttgctttgatatgcgtcccgtctatgaataccatgctgctgtccaccatgtggttgttcagcgctttgttcagtatatgctcgaagatttccgtcgccagttcttccggaaaccgccggcaaaacgcatagcttaccgtcgcaaagtgcgggagcttgtccaacagcccatatcccagaaaccatcggtacgatattgtatcacatgcccgctgatatgtctgcctcagcgacgggatcccgaacaggtgctggagcagcaccattttcaccagtaccaccgggtctgtccccggccttacatttttggctgcgctgtagtatggcgctacccgctcatagatccactcgtagtccatcaccttctctattttccttaccagatgattctccggcactaatgcttctatatccgttaccgctacttcccgccgtccgtctctttctctctcgtacatcttttctcaccctactccattttaccaaaaaagccgcctttcggcgacttccttgacaggctgaagcaggccgcttcaaaagcggcctgctttttatttcccggtcaatagggacagggtttctgtacggctgcgcggatcggttttcatccggccgcgcagggcggaggtctgcgtccgggagccggcggcccgcaccccccgcatggtcatgcacaggtgttccgcctcaataatcaccgccaccccctggggcgacagctccttttccaggaaatccgccacctgggcggtcagccgctcctgcagctgcggccggcgggcgaaggtgttgacgatgcgcgccagcttggacaggccaatcacccggccatctttgggaatataggcgatgtgcgccaccccggtgaagggcaggagatggtgctcgcacatggaatacagcgggatgtcccgcaccgtcaccatttcatccggagaatcctcgtgaaaaatcttcacatgggcgtggggatcctcctccaggccggaaaacacctccgtgtacatggccgccacccgccggggcgtttcctgcagcccttcccgttcagggtcctccccgatcgccaggagcagctcccgcacggccgcctcgatgcgctgtgtatccataggaaatccttcctttctcttcctagagcaattggcgagtgaaatggcataaaaggaggcgaggaaaaatggcgcggggcaaggcggaggcccggatcaggcggcgcccgcaacgccatttttactgccgaacttgtgtcgttttattcactgcttgctctaaagagcagctctgtgggacagcgccgcatggcattcattatatcgggatctgccggttccgtcaaggtttcggaagaaaacaagcagacggcttccgccgcctcctgcgaggagggcacagtaattcgtatcgggaaccgccttcaggctggggagcggtacagcaaaaaaggatgcgggaatttaccgtcccgcatccttttccactcagccctctttcaccagggagcgatacagcttgatatactcgttggcggagcggccccagctaaaatcggtacgcaggcaccgatccatcaaaaccggccaatcggttttgttcgcataagcgccgagcgaacggcggatggcgtacagcatgtcgttggcgttgtaggtcttgaaggtgaagcccatgccctcgccgtcgccgcagtcgcggatgctgtccttcaagccgccggtttcccgcacgacgggaaccgtgccataccggcaggccaccatctgagacaggccgcagggctcgctcttggagggcataaggaagatatccgcgccggcgtatatcttccgggccagctctggcaggaagcccgcgcagtaacagaatttctgcggatagcggccctgcacctcccggaaatagttctcataggcccagtcgcccgatcccaggatgaccacctgcaggttttcctgcagcagctcgtccaggacgtatttgaccaaatccagccccttatgggccaccagccgggtgaccatgccgacgaggggtacgtccgccgcctcgggcaggcccagccgttcttgcagagcccgcttgttttccgccttgccagagggatcgtcggcggaataggtcttgtagataagcggatcggtctcggggttgtacccctcggtatcgatgccgttgaggatgccggtcagcttccattccctcgcccgcaggatggtgtccaggccgtgggagaaccagggatccaggatttcctgcgcgtaggtcgggctgacggtggtcaccttgtcggccatctcgatggcacccttcatgaggttgacgcagccgtcctgctccacgatggttctgctgctttgcggaatgccaaagacatcctccaggatttccatgccgtatttgccctggtactggatgttatgaatggtgaaaaccgttttgatgttttcgtacccctccctgccagcgtagaacaggctgtaatacaccggaaccagggcggtctgccagtcgttggcgtggatgatatcgggtttgaaatcaatgtacgccagcatttccagaatcgcccgggacaggaacgcaaaccgctccgcgtcgtcgtaatggccgtaaaggccggggcgcttgaaataatactggttgtccaacaaatagtaaatcacgccgttgtggcgggcctcgaacacgccgcaatactgccgcctccaggccacgggaaccgacaggctggtcaggaaggtcatgttgtcccgcagctcctgcggaaccgattcatacaagggcagtaccacgcggcagccgatcagccgcacccgcatcgcatggggcagcgatcccgccacatccgccaggccgcctgaggcggcaaagggaagcgcttcgctggttgcatacaaaactttcatggtatcctcctattccgccgcacgcaggcggcacagacagtctgcttgtttgccgccg

SEQ ID NO: 2383 - DNA, 23024 bp, Unknown
  16S sequences of unknown bacteria
aaaaatacataaaaaagataaaaagttttatattagcctatatatcttttacataaaaaaatatatagattgtctatttctataaaattttatttataatatatattttaataggtatactttaacaaaaagcttttaatattagtttttgtgatgaaaaagcagtaaaaacggcactttttaattctttttttacaataatagtaaatttgaaaaggtatactttaacataatttctaataaattacaatattttgtgaccattttcaacagtataaaatgaatattcatttttccatattaaaatattcagcttataatctaaatcacacgactgttatccggttggtgatgcctatttttaacatctatcatcccaaaacacagtgatgtgtgctttggttctgtcacttatataacatttctatccatcacctttctgtgtttaagatgtcaaagatgccataaataaaagagacctatgtttatgtaaccacaggtctctttttatatagttatcatttttctgacttttacataaatcaaatataataatgtgtcatcatggattgcgaatagcggcttgtgcggctgccaaacgtgcaattggaacacggaatggggaacaggaaacatagttcaatcctactttgtggaaaaattcaacagaagaaggatcgccgccatgctcaccacaaattcccagtgagatatccggtctggtaatacgtgctaactttgcagccaactccactaattgtcccacaccggtctggtccagctttgcaaatgggtcaaattcaaatattttgtgctcatagtaatcatttaagaattttccggcgtcgtctcggctaaaaccaaatgtcatttgcgttaggtcgttggtgccaaaactgaaaaattctgcttcttttgcaattttatcggcggttaaagcggcacgtggcacttctatcatagtaccaacaagatatgtcatctctataccactgtcggcaattaattggtcagcggttgttgtaacaatatcttttacaaattttagttctttttcttcacctaccagtggaatcataatttcaggagtaatatggatatttggattttgtttcataaccgcaattgctgcttgtatgacagcttttgtttgcatttgtgcaatttcagggtaagaaacagccaaacggcatccgcgatgtcccatcattggattgaattcgtgcaggcttgcaatcacatctttcaagtgcgcgatggttacatgcagctcttcagcaatttgaaggatatcttcttcttttgtaggcaagaattcatgcagtggtgggtccagaaaacgaatgaccacgggggcgccttccattgcttgataaattccttcaaaatctttttgttggtaaggcaataatttttcaagcgcttcttttctttcctgagtagtggtagcaacaatcatttcgcgcatggctttgatgcggtcagcctcaaaaaacatatgctctgtgcggcacaatccaattccttcggcgccaaaactacgtgcttgctttgcatcatgaggattatctgcatttgcatacacctttaggcggcgagcactgtcagcccattgcataaaacgactgaaatcccctgaaatggaggcttctactgtaggcaaagcctgaccgtaaacggctccggtggaaccgtctaaagaaatgtaatctccttcgtgataggcttttccgcctaatgtaaattgttttgcctcatagtctactgtaatttctccgcagcccgatacacaacatgtacccatgccgcgggcgacaactgcggcgtgggaggtcatacctccgcgaacagttagaataccttgtgcagcagacataccttcaatatcttccggtgatgtttccaaacgcactaaaattactttttcacctttatttgcccattcttttgcatcttcagctgtaaagacaatacgtccgcatgcagcacccggtgaagcggcaagacctttcccgattggcgttgctgcttttaatgcttttgcatcaaattgagggtgtaataaagaatccaactgttttggttccacacgaagtacggcgtctttttctgtgatttttccttcatcgaccaaatcaactgcaatttttaaagctgctgctgccgttctttttccgtttcttgtttgcagcatatacaatttgccgtgttcaatggtaaattccatatcctgcatgtcggcataatggtcctctaaagtttgcgcaattgtggaaaattgttcgtaaatttcaggcatggtgtcttttagatgggagataggttcaggagtacgaatgccggcaacaacgtcttctccttgtgcattcattaagtattcgccaaacagtttcttttcacctgtggcaggatcgcgggtaaatgctacgccggtaccggatgtattgcctgcattgccgaataccattgcctgtacgtttacagcggttccccagctgtaaggaatttcattcatacggcgatacacgtttgctcttggattatcccaagagcgaaatacagctttgatggcttccagaagctgagtgcgaggttcgttgggaaatggttcgcctttttgtttatgataaaaggctttaaattgtgcgaccaaatcttttaaatcatctgcggtaagctctgtgtcatgaataacgcccttttcttttttcttagcgtcaatcatgtcttcaaaagcacttttgggtaattccattacaacatcggagaacatttgaataaaacgacggtaggaatcatatgcaaaacgaggattttccgtaaaagcggccaatccttccactacagtatcgtttaaacctaaatttaggatggtgtccatcattcctggcatagaagctcttgctcccgagcgaacagataccaataaaggattggatgggtcaccgaattttttttcgcaaatggtttccattttagataagtactcatagatttgagcttgaatttcatcgttaatttgacgaccgtcttcataatattgcgtacatgcttcggttgaaatggtaaagccttgaggaaccggcattccaagtacggtcatttctgcaagatttgcaccttttcctcccaataactctctcatggtgccatttccttcagaaaacagataaacatatttatgtgccatattttaaatcctcccatacattttttgttattttgttgaatcattggggtttgtgcgaattctacaaaattttattatttttacacatctatattaactattatatcaaatttgagaaaatttttccatagatttttattgtttttttaatatttcataaatttacgagaaaagtgttggtttgggcttgaaaaattgtgcggttattgagataatagttaagttaaaaggtacagctttctatctttaaaaaagataaatatacagaacgaagaatcattctttgtttggaggatgaactatggcaaatttagactgtgcgattatccttgccggcggtgagggtaaacgcatgaaatccaataagccaaaagtattatcacaggtattgtttcagccaatgctgaagtgggtggtagatgctgttttaaaggctgatttggagaatctttgcgtggtgtccggatttatgcatgaatgtgtagaggattatctggatgagttgcaggaacaggaagaacaatatcatcatatttgttttgcatatcaaagtgaacgtaagggaactgctcatgccgttatgatggcagatgcatttttaaaggaacacagcggcggtgatgtcttaattttaaatggagacgcaccgcttgtggatgaagcggtcatcagagcttcttatgaacagcacaaaaaagaacagaatgccgttactgtgattgcggcaacgctggaggacgcaacagggtacggtcgtgtagtgcgcaatcatcaaacaggtgcattgactgctattgtagaacaaaaagatgcagatgaggaaaccttaaaaataaaagaggtaaactccggtgcatactggtttcacattgacgatttgctgtctgtgctatacaatatagataactgcaatgcacagggagaatattatctgccggatgcgattcaattattgctcaaagcaggaaaaaaagccggcgcttatacggcggataatgcaaatgctgttctgggtgccaatgattgtatgcagctgaatcatttaaacgtcattgcgcgggagcttattttaaagcagcatatgcaaaacggagtggaaattccttgtacagatggtgtggtgataggtcctaatgttacattgggaaaaggaaaccgcattttgccaacgacgatattaatcgggaatacaaccattggagacagctgtgtcattggtcccaataccgtggtgagtgatagtatcgttggaaatgagattacattacataacgtacattgcattgcttgtagattggaagatcatcaatcgcctgcaccatttagtaccattcaaggtaactgatgaaacagaaagatatattaatgatttgcttcgaaaaacggagccttatatgttaatagggggattttacgaatgaatattcatggtaaagatattaaaatttttgccgctaattctactgttcgagtgtcagaacaaattgccgagtgtttaggtctgcctttgggcaagtctgaggtttctactttcagcgacggtgagattaccgtttctttgtttgaatctgtgcgtggttctgactgctttattattcagtctacatgtgcgccggtgaataataacattatggaaatgctgattatgattgacgcaatgaaacgtgcttccgctgctcgcattacagcggtaattccttactttggttatgcacgtcaagaccgtaaagcaaaagcgcgtgacccaatctcagccaaattggttgcagatttgattaccactgcaggagctgaccgtgtattgacaatggatttacacgtaccgcaaattcagggcttttttaacattccggttgaccatttgttgggtgctcctgttttgtctaattatttaaaagaccgcattggtgacaatgtggacgaatatgtggcagtatcccctgaccttggttccgtaacccgtgccagaacattcgcgacaagattgggttgccctttggcaattgtggacaagcgtcgccaaaaagcaaatgtatctgaggttatgaacattattggtgatgttcgtggaaaaaaagtaatcttaattgatgatatggtggataccgccggtacattgtgcaacagtgcacaggctttgattgataagggtggtgccacagaggttatcgcttgtgcaacccatggtgttttgtcaggccccgcaattgagcgtctgcaaaacagttgtatcaaagaattaattttgctggataccattccgcttcctccggaaaaggcaattcctaaaattacattgcttccggtggctccgttgtttgcagaagcaatcgagcgtatttatgaggataaacctgtatctacaatgtatacattttaattaaatattgcataaagtcaggcgaggtaggcaactatctcgccaaaactttgttgcgtgaaaaggagtgttatcatgctgaaagatatttttgcatccatatccaaaccaaaagcaggaccgattgaatatgtaatcgtcggacttggtaatcccggaattcaatatgagggaacacgccataatgtaggctttatggtgctggattatattgcaaaacaatgcaatgtttccatagaccgtatgaagtttaaaggtatgacatgcgatactaccctaaacggaaaaagagttttgctgttaaaacccatgacatacatgaatttaagtggagattctgtacgggacgccatgaatttctataaattgacacccgatcgtgttatagttgtatatgacgacatctctttgcagccgggaaagctgagaatccgtttgaagggaagccacggcggtcaaaacggtatgaggagtatcattgaacaatgcggaaccgatactttccccagaatcaaaatgggaatcggggcaaaaccgaatcccggttgggatttggccgattgggtattgtctaaattcggtacgcaggaattaaaaccattggaacaagctattgaaaatgcctaccgggcggccgctctcatggtacagaataaagcaaatgaggcaatgaatcaatataactcttaagaatacagaagtacaggaaaggaggaggagcatgaactttttaaaagcaggtatgcataagcttcctgaatatatgcagttaaggcaggcggttgaaagcaatgcattgcctgcagtagcaacgggattgtccggtattcataaagcaactataatcaatgctttggtgcaggataccaataaaacagcgttgcttttggcggcagatgaagcggaagcacaaagaatttgtcaggacttaacctctatgggattgcgttcttttatttatcccacaagagattttacatttcgcaatgtagaaagtgcttcccgtgaatatgaacatcagcgtattcaagtattgtcccgtattttaaaacatgactgcgatgttgtcgttgcatgtatggacgctgcgctgcaatataccattcctcccaacgagttggaaggacgtatgatagaattaaagaaaggtcaaaccgtcagtttggagcaagtggtacaatccttggttcgatgtggttacgtacgtgcggaacaaattgacggtaccggtcagtttgcagtacggggaggcattctggatttcttcactccggatgcaccgtatcccgttcgaattgaattctggggcgacgaaattgatacgataggattatttgacctggaaagtcaacgcagaaccgaaacagtcgatgctataatgctggcgccttctgttgaagtgttggtagacaatccttctgagttggcagataaaatcgaaaagcacgcctcttctttgagaggaaaaacagctcccaaggcaaaagaaattttgcaaatggaatgtgaccaactgcgaaatggacgtcattttcattgtgcagataaatacatcacaatgctttatgataggacagcaaccttgctggattatttttccttgaacgatacattggtgtttgtatccgagtttcacaaaggaaaagaaagaatacgaacaacacagtggcagtgggcggaagatgtcaaggaatatctggaagaaggtgttctttgccgcggtttggatacttacagcggcgactggatttatatacaatctcagctggaaaaaaggagcactgtttgtttggaggcttttgttaggggaacctatgaggttcctgttcgcacattgctgaatattactgccagacagttatctgtgtggggaggaagcattgcgctattggaagaagatttacaggcaatgcagtcttcaggacttacttgtattgtgctgggaggaacagaaaaaacagcttccaatatagcaacggatttaaaagaaaaaggactgtctgtcgtatatatgccggatatgtcagagataccggacaaaggagttatcattacaacgggaacattatctgcagggatggagttcccagcggctggttttggaattattacacatggacgtcatacgggaaaagctgcagctaaaaaaagaaaaaacaaacatgcgcaagaattgtacagcctttcagaattaacagttggggattatattgtccacgcttctcatggtattggcgtatttgagggaatccacaagattaatatgcaaggtgtggtaaaagactatattaaggtacgctatgcaaaaaaagatactctgtatgttcctgtaactcaattagatttagtatctaagtatattggaccaagagaagatgcgactgttaaattaagcaaattaggcggacaagattggcaaaaaacaaaagcacgtgttcgttctgccgtaaaagatatggcaaaagaactgattcggttgtatgcacaacgtatgcaggcaaaaggacatgctttttcgccggatacagagtggcagcgtgactttgaggctcactttgaatttgaggaaacagaagatcagctgcgctgtattaaggaaatcaaacatgacatggagctttcctcaccaatggaccggttattgtgcggtgacgttggatttggtaagacagaagtggcgttacgtgcggcatttaaatgtgtcagtgattcttgtcagtgcgcattgttggttccaactaccatattggcatggcagcattatcagaatatcagcaaacgtatggaaggttttcctgtacgtatagaattgttatccagattccgtacaccaaaacagcaggaagatattctaaaaaggctaaaacgcggagaaattgacatgatagtaggtacacatcgtttggtgtcaaaggatgtgcaatttcataatcttggattactcattgtggatgaggaacagcgttttggcgtagcacaaaaggagcgtttgaaagacagctataaaaatgtagatgtacttacattgtctgcaactcctatcccgagaacactgaatatggcactttcaggaattcgtgacatgtctgtcattgaggaggcccctcatgaccgtcatccggtacaaacttatgtattggaacatgaccaaggtattatctgtgatgcaattcgccgtgaattgcggcggggaggacaagcgtattatttacataataatgtagaaagtatcgagcgcgttgctgcttctctgcaaaatcaaattcctgaggcgaaagttggctttgcacacggaaaaatgacagaaagtgaattgtctgaaatctggagaaaattgctcgaacaagaaatagatgttttggtttgtaccaccattattgaaacaggggtagatgtaccaaatgtaaatacattaatcattgaaaatgcggattgtatggggctttcacagctgcatcaaatccgtggacgtgtgggacgttcttccagaagagcttatgcttattttacgtttacccgcaacaaaattttgacagaggtagctcaaaaacggctttccgccattcgagaatttacagagtttggttccggttttaaaattgcaatgcgcgatttggaaatcagaggtgcaggtaatattttaggcggagaacagcatggtcatatggaaacagtgggttatgacctttatttaaagctgctgggagaagcagttaaaatggaaaagggagaactgccttctgctcctgtagacaacgaatgtttggtagatatgcaggttcaggcacatataccggaacggtacattgaaaatctcagtcagcgtttggatatttaccgcaggattgcaggtattaaaaatcaggatgatgccttggatgtcttggatgaattgacagaccgtttcgggaagcctccggtatctgttcaagggctgattgatattgcattgctgcgtaatatggcgtcacaaattggtatatttgaagtaaaacagcgtgatgattatattatgctgtatcgtgagccgatgaatatggagtttttagaaccgctgattaaaatattaaaaggcagagtgaaattaagcgcaggtaataaaccgtatgtcagtgttaaagtgacgggaaaggaaactccattacagacactaaaacaagtcttggagattctgatttcagataaaaagaagtaaaacataaataagtgaacaaatataccataaattttcacataatgttcactcagcaattatggacttttaaaatagaactcggtataataaaagaacgtttcagttttataggaggtttagaatgaaattagtaaaaaaagcgactgcattattggctgtttgtgcaatagcaataggtatgacagcgtgtggcactagcagcggcagtgaaattgtggcagaaaatgaaaacacaaaaattactatgggcgcatatgcttattgtatgtattcggcatattatcaggccagctactatgtacctgattcaacaaaatcgattctttctcaggagattaatgggcagcctgccgaggattggatgagagacagggctttggaaaacatgaaaagtatgtttgttgtagatgctaaagcgaaagaattaggagtttctttaacagaccaagaacgtaaaacaattgatactaatatggatcaggcttggaactctagcaaagaacaactttcaaaatatggtattaccaaagaaggtgcacagcagttcttctatgattttaatgcaaaatttgctaaaattttccaaactctatatggagaaggtggagaaaaggcaattcctgctgaagataagaaaaactattttattgaaaattacacggattttgcatactttactaaatcgatatctggcctatcagatgaagataaagctgctgcaaaagcaaatttagatggttatgctgctgccattaacgatggttctaggactatggaacaagtagcagaagagtataaaacagcagaaaatttatcaacgaatccattacaaagtgatgtaacaaacttatctaccaacaaaaaatatgttcaatcatattcagaaatggtagctgcattaaaagagatgcaaacgggtaaggcaagagtggtagaaaccaattcttcgtacatgttggttgtaaagaatgatattaatgcaacagctgacgaaaaattaaaagatgaatcggttgaattacaggtgttagcagcattaaaagaacaagaatacattactgatatgaacgctttggtagaaagttacacagattatacattacatgaagatgtgatgaataaatttgatcctgctgtatttgaacaatccagcgatacatcttccgctgaatctactcctgcaagcagtgcagtaagtgaagcgtcagaagatacaacttccagccagactacaacatctaactaaagcaaaaaatggatgcatgatcatgcatccattttttatgtcttattattttgaaaagtttggcatattaccgggttcatgaccaccgtcttcaaagtaaatttcgtaccatacaataaaaataaataaagtccaaatacggcggctgtaatcgcgtaatccattatagtgggtatccaaacaatcaatcagttcctctgtatggaagaacttctgagcaataggagaggtaaatgcttcttttacaatgttatagtattttttgtcctttaaccatacacgagtaggaacagggaagccgagtttctttttctctgcggtttccattggcaatctgcgttgtgctgcttttcttaaagcaacttttttttgtcctttttgcacacgtaagtgagttggtaaggaagctgccactttaaatacttctttgtctaaaaatggtacacgcaattccaatgagtttgccatactcatacggtcagcttttaagagaatatctccaaccatccataaattgatatccaaatactgcatgcgggtgcagtcatccaaatgttttacacggtcatagtaagctgcggttacactttgagggcgagtgacacagtctttatttttcaaaagttttaacttatcttcataggagaacatattggcatttccaatgaaatattcgttggtaggtagttctcctcgtgtgacaaagccttgccctttgaattgttttttagatttttgggcggtatctttcaaccaagtgcgcaatccttgtggaagtttacgatagtttttaaataccaacggttcattataaacatcatatccgccgaataattcgtcagcaccttcaccggacagcactacttttacatgttcacttgcaattttagatacaaagtaaagtgcaatacaggaggggtctgccaaaggttggtccatgtggtactgaacatttttgatatttccccagaattcatcggaggaaattactttataatgatggtccaatcctacaatatcggcagtgcgttttgcaaagtcgatttcgttgtatttttctccaaaatcaaatcccaccgtaaaggccttttgtcccggaaaataggtagaaacatagctggaatccacgccactggaaaggaagcagccaacctcaacgtcactgattttatgagtatccacagaattcgcaaatactttttcaattttgtcaacagcttgtgcttcggtcatatcgttctgcggttcaaacatggcttcccaatagcgggtagtggttatttttccgtttttgtaccataaatagtgtccgggcagtaaacaatataggttttcaaaaaaggtttgaggaggcacagcatattggaatgagagatagttatttaatgtatcataattaaattttttctcaaagccggggaattgtaaaatacttttgatttcagagccatacaccaaatggtctccaacttttgtgtaatgcattggtttgatgccaaaaaagtctcttgcgataaataatgatttatctaccgtattccaaattgcaaagccaaacataccacgcaggcgatttaacagcccttcgcgccattcctcaaagccgtgaattaacacttcagaatctgtatgtgtagcaaagatatgcccttttcgctgcaattcttcacgtaattccttatagttgtagatttcgccgttaaaggttagtacaagcgttttatcctcgttaaaaattggttggtcgcctgcctccaaatcgataatacttaatcggcgaaaccccattgaaatttccggattagaaaagtatccgcagctgtcaggaccacggtgaataattttatccgccatatctttcagtactcggtcacggtttaatagttctcccgtaaatccgcatattccacacataactataaatcctcctagtgtctccttattggttgctttcttcttgttctgactgctctgtttgctgctcttgctgcatatgctgatgtgtttccaaaatttcttttgctacaccattgtcaatacgcagaaaagcatttggttcttctgttacaatcgattctacaatttgtaaggatgcttgatatacatccattttaattccttggtaaacaggcggttcttcttcgtttagataaaagacatattctatggtatttttatcatggtcaataccacaataaaagcttttttccggtgtaacaccccattttgcggttaccacttgtgtgagagctacttttacaagttctgtagcgtaatcattcagtcctgcttcaagaatgagtattttttcttttaattcttcaatatttgtaacaatgcgtttttttatctctttcaaacctgatacggaaatttgctttaatacagcaggatcttcgtcttttggctgaacataaatcataaacttacgtattttgtcttgataaaggcaggaatataccatttgcgtttcataatcgcaggaaccgcatctccagaagaataaggtttcatccagcactttatcacgcatttctctatctgttggaatggtgatagaggggtatgcgataaattcttccagaacaccgcagcttgggcatcctactacttttttcatgctttttgccataaagggcaccacctttagtttataattaaaataaaaattctatgcattgttatttaaaattgttccgccgcctataacggtatctccgtcataaaaaaccacggcttgtccaggtgtaatggaacgctgcggctcatcaaacataacttgtaccagaccattttccattggtagcaacaccgcaggtgcaggtggagcttggtagcgagtcttagcggttgcttttaaaggctccgttaaacgttcaatggaaatccagttgatgtctcctgcgactaactgttttgcatattggctgcctgccttacccaatacaatttgattctgctctgcatttattttggtaacaaacatcggttctccaaatgagataccaagaccttttctttgtcctatagtataatgcgcaattcctttatgagtaccaagtactgttccgttttcatctacaaactggccgggttccgcttttttgcctgtataacgttcaataaaaccggcataatctttatccggaacaaagcaaatttcttgactgtccggtttattggcaacaatcaaccctgcttcctgtgcaatagcacgaatttgaggttttgtataagtggcaaggggcagcaaagtatgctccaattgaaattgggttagggaatataatacatagctttgatcttttgccgcaggcgctttttttagcagccatcgtccctgttcattttgctcaatgcaagcataatgtccggttgcaacgtaatcaaaccccaattctattgcgcgtttcatcattgcattaaattttacatggcggttgcatgcaatacaaggatttggtgtgcgtccctgttcatattcttttacaaaataatcaataacagtttcttcaaagatatccgtaaagttaaataccaaatgctctattccaattttataggcaactcttctggcatcatcaatatcatctatggagcagcatccgccggaaacgcattgttccatataacggtccggtctcaaacgcagggtaacacctgtaacatcataccccgcatttttcaataacaaagcggcgacagagctgtctacaccgccgctcattcctaacattactttttttttcatatagttactgccttttacattttctgtactgtactctttaaaatagaccgagacaggctcagcctcggtctattttaaaatcattatttttctgtgtctccaaatgggtgaatatgattatctttaataatcggaatttgattttcttcctcggaagcagcttcactttcagaagattcttttttatagtcttcgccgcagctgccgtgaacgtcacaaatatttttgacaatttcctcatcggaaggaaaatcactgctgtttaatgtatcctcggcagaaatttctttctcggcaatcatttcgttatttatggtttccgtataatcccaggaagaagcttcttcggcattttcacaactggcaaagcccaaatcttcacatgcggattcaaaatcctcatcacagaagaagtcttctgcatcaatggttaattcgtctaattttgtaagagcacggtcaatgcggttatttgcatgttccaccgccttacagtaaaattccgtttcttcattttcttccttacgcaaatgattaaaataatatttaccaagtgcgatgtaagcttggtttgcttttgtttcttcttcacgaattacatatttaatgcggttaatcaaattgtttttacgattcttttctactactaaatttacagcagatgaaaatccttgataaacgttatgtaaaatactcatgattcctcactattctctgccaatggtgtaatttgtggggtatgttatatcaatcatatggtttgttggcagtcaaaccatatgacagtattataaattatgtttatacagaactattataacgcatatgacataaaaaaaacagggtttttcttctaattttactgatatgataaaaatttacattctgtatacatgatactggaaaaatcgttcgttttattcgttgtctttagcatttcacatgatataataaaaaataaaagaacatatgttctgaaaggcgtggaaaatttggaagacacacaatgggccaaggcttatttgcagcaggcagatactattcgtttttatatcaaagaattaaaacagcagatgaattgctctgactgtttcggacaaagtactgtaaaagcacggatagacatattgtatggaatgtatttggattgcaaacatataggagattttttacataaacgtgcgcaagttgagaaggtattaaaacaagaaaggagagagagggcaagtgtcaaaaaggttactgaacttggataccatgacagaaagcatatttggaatgcaacagtatcaatctcaaaacagttcacaaatggatacggaatatcgtcggatgctgaaagtgttgaccaaagctatgcagggagaactgacaaaaagacaatatgattgcatgtatgcttattattttgaaaataagacacaagcacaaattgcaaaagaattggggattggagctcctacagtaaacaaacatatgaaaaaagcaaaagaacgtttatttaaggtcatgcgctattcttttcaaaggcttgagtgatagaaagttgattgtattttatgtaataaaaaacgcttgtattacatgaatacaagcgttttttgtttcgttggaaaatacttaagaggtgtttgcaaccttccttagttttccggagacgattcacttgagaagaatccatatcccattcctttattgtaaagtccgtaacagtccaatgttttttgagaggaatcaagaccaacactgccatatccccaaccgataaactcttccgttagatttttcacagaagtttgcggtgtataaaataaaaactcttttccgctttctaatccgtaaggctctgaggcaatatagcgtacgccatctgtaatccattctttactttctgtactttcagtagtgatttcttttagcgtcatagcataagtattatcatctatttgttgaatattgtcgaatgctccgctaaatttacagatataaacggtaccgtgaggatagccttcaccaatgaatcccatatcagagtcatgataactgccttcaaaagaaccatctctgtttaatgtgatggaagttgcccatgcaccggctccgctggagaatgtcattgttaaaggcgaggtattcggcaaatacatctctttattttgcgaagtttcttccgttttggattctgttgaagattcattctggttttcttgggccgaaacattgctgtgcagttcttcttgtgcaggattattactttcagtatgtgattcctgatggttgtttccactgcatccgcttaaaataccaattcccatggtaagacatatcaatgccattccggtttttagtatattttgttttgtaatcaaaacatacacctcctttcatttcctaaccatttttacaatgttttataaaaaagaaagcaagtcaaaggtacttttttactgccaaaatccaacaccacttttttctctcctgaccgctgaaaccctctgcgttcataaaattggtaggtacaagcatcatcggtatataggtagacctgttttcctttttcacgacgctccaattcttccaatagtttgctgccgattcccttctgttggaaggcaggatttgcggcaagaaatacaatctgaccgtcaggacaatggcattttctatattcacgaaataacacttggtttgtggtatcgtaaacacctgcaccgcccttataaaacaatttttgtaatagattgaatatttggatatacattgtttttccaaaagacctgtatgatttcttttctcccttgatgtccgccaacaatactcctgcgagttcttctcccacataagctgcaattacctgagtagcacggttgagttcatcataccaaaaataatttccgtatagatatagtagaaatttgttgtccaaatagaggtcaaagtgcatacctgttttggcaaactgtattgcttttttataatccttctttttgatatttgtgatttgaatctccatcggttttcactccaaatgttatcatatataacagaatggtatttgttttattatagcatttttaacagaacaaatgctataacgttccgcaacaaaccaaatttaaaatttggtttgttgcaaggctgttataaccgttaaagtgttctcataatgaatatagaagagatgctcctttcggcgtttgttttgttgctgttatgaggcggttataatatggaaggaatggttacacggtttccaatacgtaagtgttacaacgttttgcctgataactctttgattgtactgctgctatgtggctgtgacagcatatcataaaaatctacatacatgttatagaaaatttctttcgagaaatgaaaaaagagcaaaagcactcgctttgctctttttatcttttgagatactcttttaaagtttatccgaaaagtttggaagtaaaatagattgtaaatcttttgctgtttccacaaattgtgtagcaccttcccgctccatttcttcacgggtgccgtagccatacaatacgcctatgaaattggtatttgcatgtttcgcaccatgggcgtcaaagtgggtatctcctatcattacggcatgactgggttttgtattgcaatgaagaagacctttttcaatcagttctgttttattgctgtgtcgttcgtctaaatctgcacctgccatataatctaaaaatggggttacttttaaatggtccaacacaattttcgccattggttccggcttggaggttgcaacgcacaattttgctccgtgctcttttaaattttgcagcagttccataatatacggaaatgtgctgttattataaataccgccgtttaaataaacatctctgtaatgagcaacgccaatatctgcttcttcctgcgtcatgccgcaaaaatgaataaagctgtggcataagggcggaccaataaatttgcgtaacgtagctttatcgggaataggtttgttcatacgctgtaaagcttcagttacgcattgaaatacgccgggtgcagattgtgcaagggtgccgtccaagtcgaaaataacagtttcaaatggtaatagttgtttcatagtgcctcccgtaactattgtaatttacggtccaatgcttttttggcaaagctttctttttttacactcacacgagtatgtgtgccggtggcaatcacgcctgcattatctgttgcagtcaatttgaattcaaaaaaacgtccgtcgacttttgtcaactcggcttcggccgttacggtaactccttccgctgttggacataaatgctgtacacaaatttcggagccaaccgttgtataaatatcttcaatataacgtgcggcaaggtcgcatgcagcaccttccatcaacgcagctaccataggagtagcgaatacatcaacagtaccgcttcccacactggaggccaattggttttttgtaacagtcagttgtctggtcgcttttgctccaatttcaggattgttcatagtgtatactcctttatgattgatattcttttagtatttccttctttttctgtaagcctataaaaagatatttcatttgaatatgaaaaattgcacagtcatcttttgtcgtcatcacaattcggcaatagcaacaaaacataaatggaaatgattctcttgcaattatctaaattttggtctttggcaagagctctttgttgttaaaaattgctttgcaatttttcttatgatataattaaaaaattcagcagaaatatgctgtttgttcatcataacacattttatcgcattttaaaagatacacttttttggaaatagaatgaatcgaaaaggatgatttatatggattttgttacagcgttatccacacaatttcaattaaaaccgtggcaagttcaaaaggtaatggaattgattgacgaaggaaataccattccttttattgccagataccgtaaagaagcgcatggctcattggacgaccaagcgttacgccaaattgcagaccgattagagtatttacgttctttggaaaagaaaaaagaggaagtggctcgactgattgaggagagcgggtctatgacttcggaagtgtcgcaggcattggaaaaagcagagacactctcggaaattgacgatatttaccgtccgtttcgtccaaagagaaaaacgcgtgcatcagtggcaaaagcaaaaggattgcagccgctggcagattgcatcttggaacaaaatccacaaatcaatccggaacaggaggctctggcctatcttagtgaagaattggaggtcacctcagcagaagaggcactgcaaggagcgaacgatattattgcagaactcatttctgatgatgcgagcattcgtaaaaggctgcgggttgtgacaatggaacatgccttgttaacatccaaagcgtcaaatccggaagaagattctgtatatgcgcagtattatgaattctctcagcctgtaaaacagattgcaggacaccgcgtacttgcaattgaccgcggagagagagaaggttttttaaaagctgcagtggatttggataaagaaaagggactgcatattttatatagtacctatgtaaaaggagactctttatgtgcggaattggtacgtcaagctgcagaggacagttattcccgtttgattttcccttccattgagcgtgaaattcgtgcagaactgacagaacaagcagcggaacaagccattaaagtgtttgcggtaaatttgcgtcaattgttaatgcagcctcctgtaaaaggaaatgtagcaatgggacttgacccggggtatcgtacaggctgtaaagtggcagttgtggatgcaaccggaagggtactggatacaggtgtgatttatccaactcattccaaggcaaaggcgcaggaaggcaaacgagtgataaaagatatgattgccaaacatggtgttacggtgatagccattggcaatggtactgcctctaaggaaacagagctgtttaccgcagaagtgattgcggaaatgcagggtacgcctgttcagtatatggtagtaagtgaagcaggagcgtccgtatattctgcttctaaattggcagcggaagagttcccggattttgacgttacactgcgcagtgccgtatctattgcacgcagattgcaggacccgctggcagagcttgttaaaattgacccaaaagcaatcggggtgggacaatatcagcatgatatgcccaaaaaacgtatggatgaagccttgggcggtgtggtagaagactgtgtaaactccgttggtgtggatttaaatacagcttctccttccttattggagaaaattgcgggtatcagtacaaccgtatcaaaaaacattgtacagtatcgtgaagaaaacggagcattccaatctcgtgcagaattaaaaaaggtgccaaagcttggcccaaaagcatttgagcagtgcgcaggatttttacgtgtcaacgagagcaaaaatatgctggaccataccgcagtgcatccggaatcctatgatgcggcaaaagccttgttaacattatgtggttttgatacaaaagccataggaaagcagaacttggcaggcttaaaagaaagagtagacggaatcggcttacagcaggcagcggagcagctggggattggtgtgccgacgctgcaggatattataaaagaattgcttcagccggggcgtgacccgcgtgatgaactaccgtctccaatgctgcgtaccgacgtattggacatgaaggatttaaaaccgggtatggaattacaaggtactgttcgcaatgtcattgattttggcgcgtttgtggatattggagtgcatcaggacggattggttcatttatcccagatttgcgataaatatattaagcatccgtctgaagtgttaaaagtaggcgatgtggttactgtaaaagtattatcggtggatttggagaaaaaacgtatttcccttaccatgaaaggttaacggtattcattgccgcttgcaagcaacgcaaaaaatcggtataatgaaaacaataaacttgtacgatatgataaagatgaaagaggttgaaaaatcctatgaaattaggtattgttggcttgccaaatgtaggcaagagcaccttgtttaatgcgattacaaatgcaggagcgcagtctgcaaactatccgttttgtaccattgagccaaacgttggcgtagtggctgttcctgacaaaagattagatgtgttggctgagatgtatcattctcaaaaaattctgcctgctgccattgagtttgtggatattgcaggtttggtgcgaggcgcttccaaaggggaaggattgggcaacaaatttttggccaatattcgtgaagtggacgcgattgtacatgtggtacgctgctttgaaaatgatgacattatccatgtagagggcagcattggcccggccagagacatagaaaccatcaatatggaactgattttgtccgatatggaaatattggacagacgtattgaaaaaacacaaaaacttatgaaagcagataaaaaatatcaggcagagtatgactttttccaacgtgtaaaagaaacattggatcaaggaaaatccgcacgcagtatttcttgtacggaagaagaagcggaattgctggcatcggtttctttgctgacaaacaagccggtgatttatgctgcaaatatgagtgaagacgactttaaaaacggcattgaaaacaacaaagggtttcaagaagtaaaggcaattgcacaggaagaacatgcaggtgtattgccaatttgtgctgaaatagaggcggaaatttccaatatggaagcagatgaaaaagaactgtttttgtcagatatgggcttgacggaatcggggcttgaccgtttgattagagaaagctacgctttactcggtttaatttcttacttaacggcaggtccgcaggaaaccagagcatggactataacagatggtatgaaagcaccgcaggcagcaggtaaaattcatacagattttgaacgtggatttatccgtgcggaagtagtggcatatgatgatttggttgcttgtggttctatgacaacagcaaaggaaaaaggacttgtacgttcggaaggcaaagaatatgtggtaaaagacggagacgttattttgttccgttttaatgtatagaaagcttgttaaaaataaaaacagccggtattttaataccggctgtttttatttttaacga

SEQ ID NO: 2384 - DNA, 10067 bp, Unknown
  16S sequences of unknown bacteria
tgctgcccgcagagcagtatcgcgacggcgcatgggtgaacgtgatgggctctgcgccaggaccctgacgcagagcagcctgcaaggccagtcagcgaggaggaactatgtacgaaacgctattgagcaagtacggagtacgccaacttggcttctacgtgaaaagcatcgaggagaccgccgcgtttatggcgaagcatctcggcgcgggaccgtttttcgacatgggcgtcaacgagcccgcaaagctgcagctgcacggcgccgattgcaaatcgctcacgcgctgcgcgctgggccacatgaacgacgtacaggtcgagctgatcgagcccgccaacgacgagccgagcgtctacaccgaggcgggcggctttgggctgcaccacatctgcctgtggaccgacgacctggcaaagacgatcgaggagttcaaggcggagggcgtcgaggtagccatggaaatggtctcggggcaggggcttcccgtcgtgtatctggacaccgtcgaggagctgggtgtctacgtcgaggtgaacccgccgctcgatcagctgtatcagggcatcaagatgcagcacgagaagtgggatgggacgcgtccgctgcgctcggtcgccgagctcatgggcaagtagcgcccctgtggcaagctgcagcagcaggtacggactaacgcgaaagcgaggaaacttatgacaactgataacccttatgacctttccggccgcgtcgccctcatcacgggagccagttcccatggcatcggcaaccagtcggcgaagattctcgccgcccacggggcaaaggtgtttctagttgcgcggcgcgaggagaagctgaaagacgcctgcgcggagatagaggcggcaggcggagtggcgtcgtattatgcgggcgatgtctcgcaggaagagacctgcagggccgcggtggagaagtgcgtcgccgaatttggcaggctcgacatcatggtgctggcggcggggatctccgggctgtccgagcggagcatggaagacgcgttcgataccgagaactggcgccatatgctcgccgtcaacctggacagcgtgttcttcatggtgaagcacggctgggaggaatgcgccaaaaacggcgtcggagccatcatcccggttgggtcgctggcatcgtggcatgcggcgggctccacggcctacaccgccacgaagggcgccgttcgcgcgctcacgcagaagtggggcaagctcctcggcccgaagggagtgcgcgtgaacgcgctgtatccgggcttcatcgacaccgacatgacgcatcgcgccaccgaggtcgagtcctacatcaattccgtgatcgcgcggattccgctgggcaggtacggcacggtcgatgactgtgcaaatgcggtcctgtaccttgcctccgatgcgtcttcgttcatgaacgggcagcatctcgtcatcgatggcggggagctcgcctaggcgcgagagcgactcttttcgcgtgggcccgcgtgccggagcatgcgggcccacgcatccaatgcaatgagaatacgagggggttccaatgtctgtggagaggacatcggggaacgtgtttcttgacgccccgaataacaagaagctcatgaccgtcataggcgtctactgcggcgtcttggcaaatctgcttgtctcgacgtctaactcgacgctgtttcccgcggcggcagctgatatcggcggcatggaaatctacggcctggcacagggcgtgagcggaatcttgggagtcatcgccatgccgatcttcggctttatcgccgctcgcaatcctgcgatgaagcgctggctgtgcggcggctcgctcggcatcggcgcgctcgttctgcttgtccgcgcgcttgcgccgtccatgccggtcatcatcgtcgcgaacgtcttttggggcctcgtgagcgcaggcgtgttcgccgtcggcttcacgatgatccgcgacgtctacgaccgcaagcgtgctggcttctacctgggccttgtgggcacgatgatgtccatcgccatgctcgtggggccgtttttgggcggtctggttatcgaccgcatcggctggcgcgtgtggtgctggattctgttcgcgattcttgccgcgggctttgcagtcgtcgtgttcggcggcgtgaaggtttccaaggaagacgtcgcagaccttgcccgcaagggtggcaagttcgactttctgggcagcgtcatcatcgccatcttcctcgggtgcctgatcatcgcgctgtccatgggcggcaactacgtcaagttcggcacgccgctcaacaccgtgctgctcgtgatctccgtcatcgcgtttatcgtcttgtgcgtggtcatcaagaagaagggcaacgatgccatcgtcccgaccgacgcgctcaaggaccgcaacaccatggtgcttgctgcggccaacttcctacataacttcggcgcgatgaccatctcgttcttcatcgccggcttcatcatgcgcacgctggcaaacgatcccatctgcgtggcaatcgggcctgcgctcgcagcgggcgttgcggcggcgctcatggccgtgctcggcctgttcttggggccggtattcggcaaggccatagccaaggcgggcaccgccaagaacgtgatgatcttcggcaacgtgttccgcgtgctggtcatggcgggcttcgtgttcgcgctcgtgcccggtgtgcccgtctgggtcatctacatcctgatgttcctcgcgggcgtgttcacctcgcagcagcaggcgacgcagtccgcagcgcctcagatcatgctgagcaaggacctgcgcacgatcggcaactccgtgatccagctcgggcagaacctgggcgcgggcatcggcatggcggtcttcaccctggcgctcggcatctttggcgccggcggcatgaggatctgcatgatcatcgccctcgtcgcgtggatcgtgctgttcttcatcacgttcctgctcaagtcccctgcccaagagacctcggaagaataggaggagcatcatgagaacagttcgagtggtgacgggtgggacctctgggatggggctcgccaccgccaaagcgctgggagcggacggccccgtcttgatcggcgggcgcaacgaggcgcgcatggcgcgggcgcttgacgagcttaaggcggcgggcgttgaggcgtacggctcgcagctggacgtctccgacgcggcgagcgtcgcggcctttgccgcaaaggcggcagatatcgctcccatcggcacggttgtgcatgcggcggcggtcgatatggacaatgcggatacggacaccatcgtgcgtatcaacgtgctcggcacggtaaacgtggtcaacgcgtttttcccgcgcatgatcgaggggagcgcgctcgtgaacttcgcctcggtgaccgggtactactaccggcccactgctgacgagcttgccgtgtgggacgaccccggcaatgccgagctcgccgagcggttcacggcggggctcacgccctttgacgcgccggggctgcccgatagcgcggcggcatactttgcctcgaaggcgttcgtgatgcgctacaccaaggcaaacgcgcagcggttcgcgagcagggggtgccgcatcttctccgtttcgccggggtcgttcatgacgccgatgctcgagacgcaggaggagaactacgactccatcaagaagaccacggtcttcgagaggtttggcgatcccgacgagatggcgtatctggttgccagcctcgtcgattcgagggcggggtatctgacgggggccgacgtgctcatggacggcggcatgttcgcaaagagatgcgtgccgcagctttcatagccgcgtgcgatacaggcaagaatggggatgaacttcatggcgaaggattacgcggattacttcaagggacgcgattgggtccatatgctgggcttttgcgcacccgactggaaagagttcatgaccgagcacaaccgactgttcgggtcggggccgttcttctacactacgaacacgtttgggaagctcgtttaccacggggaagaagtcgactgcaaggggctcgagttccatgcgtgctacggcgcctgggggagccattcgatcgaggtcgtgtcgcagaacgactggtcggttccgacgatgttcacggagctcaacgagcagggcaagcccggcttcaaccatatccacatgttcgtcgagagcctgcaggaggcaaaggaggcctgcgaggcgctggagattccgatcatcacgattgggtatcccgacctcgaaaacgcgctggagaaggcgcgcgcgacgggcatggacgaggaagcagtgcgcgcgaaggcgggcaagccgtcgttcatggtggccgatctacgcgggcagctcggatttgccgtgcagttcatcgagccgtctgccaagcggctccacgacgcgattttgggcgcacgggacaagtgggacggttctgaggagcatatgttcatcaagctgggataacacgggtttgcatgcgcgcccttcggtacaccgtggggcgcgcttggtcgttttcacgccacggcgggcggccactggtggcgcggcgtgccaaacggccatcggcgggttgcggtggctcggaaccgaccattggcggcacgccatgccactcccgcgcggttcttcgagagccgtcgctctggtatgctgcggaaccatgagcattgggcattgggggagagatggagtttcaccagctggagcagtttctggcaatcgcatcgacgggcacgatgcgcaaggcggcggagagcctctacctctcgcagccaaccctcagccataacctgaagaagctcgagtccgaactggggcatcagctgttcgaccgctcacacaacaagatgacgctcaccccttacgggagaattctgcagaagcatacggagttattaatcggagactggcgccagctgctcgccgatctggcggaagaggaacgtcggcaagcccagaccatacgcgtcgggtgctattcgactgtgcacacgtttttcgagatgccacagcttgccatcgcgtttccggctctgaacttcgaagtttgggtcgaagatatttcctcgatttgcacgaagctgcaggaaggcgtgttcgacctcatcatcgttcccgattgcgacgcctcgtcgtctgtcgatcttgtgccgattgacgatgagcaggcgtatctctctgtacccgtgtcgaatgacctgtcgaaaaagcagacagtcgcgcttgacgacttgcgcgaatgccagctcattgtgcccgacaatctcttgggcttgtctggctggtacgaagagattgttcgggcctctggcgcagacggtcttctggtcgagtataccgatcgggaagattatctgaaaaagctcgactcgacgatgaaatgccatttcagcaccacgctcatgcacaggctcaccagctccggatctgggcgcatggagattcccatcgagggcgacgtcgcgcggagaaccgtctgctatgcccgcagtgcagaggacaagcgccttgattccatcgcggcgttcttggaacgcaacggcaacagggtctacagcgggcatgcgtttctgccgtatcttctcagtcacggtaacgtgcacaatctcatcgttcacgatgaatcgatgtcgagagagcgcatgctggcctaggccgatagactgcatctatcggcgcatggatgacagcttgggtccagagccgctgctcgctcctactcttaaatggacaattcggaggcccgtgcccgggttttcgagtattcggagagaggggagcgtacatgggcaagacagcagacaagactgtgtacaagactaccggctggggcggattcggatcaggttcgaacacggcggctgtcgatgtgaaagatggcaagattgcgcgaatcagaccgctcgaccttacggagaagtacaccgaagaggagctcaatccgtggaagatcacagtccgcggtcacacgcttacttgcgggaccaagacgaccctgccgccgatggcattgagctacaagaaccgcgtgtattccaagaatcgtgtgctgtatccgctcaagcgcgtcgactgggacccggaaggcgagcgtaatccccagaaccgcggtatcagcggctacgagcgtatcagctgggacgaggcaactgacatcatcgccaaggaaatccgtcgcataatcgatacctatggcaacaaggccgtatttctgcagggcgacggacatggcgagaccaaggtcatgcatgcaggtcacggtgcgaacacacacctgatgaaccttctcggaggctttaccttgcaggcacgtcagccggactcgtgggaaggctggtactggggcgccaagcacatgtggggcatggacccggttggccagcaggcgttccagtccaacctgctcaaggacatctccgagaactccgacgcggtccttttcgtcgggtgcgatcccgagaccacgccgtggggctggggcggtcaagatgcctccaagatcagctatttctggaacgaaattggcatcaagagcatctacatctgccccgacctcaactacggagccgctgtccatgcagacaagtggatccccgtccttcccaataccgacgcggcattgtggctgggcattgcctgggtgtggctgactgaggacacctacgaccatgagtacatcgagacgcacaccgatggcttcgactggttcaaggattacgtgctgggaggcgcagatgggcagcccaaaacgccgaagtgggcggagtccaagtgcggtgttccggcgcgccagattaaagcgcttgccagatactgggcaaagcacgttgtctcgacggcacactgcaacggcggtggatacattcgctccgtgttcgcgcacgagcccgcgcgtctcgagattgcgctgctcgccatgcagggcgtgggcgctccgggcaagaacatgttcaagatgatggagtggaacctctacgggatgccaagtctcgacccgatcccgcatcgcgattggggcacgttcatgtgggcaggcttcacgggccacgtcgccgggaccgacctcgaacacttcatcccgcagacgctcgtgcccgatgcaatcatgctgccggagggcgagaagctgacctggtacggccgtgtcgtcgccggcttgccgcgcgtcgaccagttcacgcagtaccagtatccggaagaggacggcacgcgcatccacatgatctggaccgacacaccctgctggtccacatgctggaacggcggaaatcgtatgcaggatgcgttgcgcgacgattccatcgagttctatctcgtccaacatccctggatggagaacgacacgctgttcggcgacatcatcctgccgatctcgaccaagttcgaggaagacgacatcctgacttccagccaaagcttcacaaacgacctagtcgttcacgagggcgttgcaattgaccctctcggcgagtcgatgtccgacaccgaggcggttcttgccatcgctgacaagctcggcatgaaagaggcgctgtgggaacactggtgctatccgcctcaggtggcggcaaacaacaccgattccgccggtaacgaccaggactttgtcgtcatggaagaagcgtcgaccgagcatgtgtttggcgaacccggctttgatgcgctgaggttgcgcagctacacgctgggcggctgccaagagcacatgccctacgacgatttcatggaaaagggttacctgcccaaccgcttccgcgacgactgggaagacgatcccgtcggcatgcgcgcgttctacgaggatcccaagggttctccgctcgacacgccaactggaaagatcgagttctactccacgggcatccacgatgtgtggcccgatgacccggaacgccccgaagttccccactggattgaggaaagccctctgcatcaggagcgcctcaccaccgagcgcggcaaggactacccgttcctcgtcgtgtccaatcacccacgcttccgcgtccatgccgaaggcgacgactgcacgtggctgcgcgagatcgacatgtgcaaggtgaccggccccgatggctacaagtacgagcccgtgtggatcaatcccatcgacgcgcggaaccgcggcatcaagaacggcgatatcgtgcgcatctacaacgagcgcggcagcgtcttgggcggcgccgtcgttaccgaacgcattcgcagaaacgtcatcagccaagaccacggcgcgcgtgttgacagcattgtcaccggcacgggcggtctcgaccgcggcggtgcgaacaacctgatctgcccgggcgccacgacgagcaagaatgctcccggtgaggttaccaacggcttcttggcaaatatcgagaaggtcgacgtgttcgccttggcggagaagtatccagaacagttcaatcgcgactactgccccgcagatggcatgcaggcaactgatcgcatcgtgaagggggagtagcatcatgccgaagaacgtatttttgattgacatcgccaggtgcaacggctgccataactgccaagttgcctgcaaggacgagcattgcggacaggcatgggaaggctacacgctcgcccagcccgagacggaccagttttggtgcgaggtggaagagaccgtgcatggctcggttcccaaggtcaacgtgacctaccagcccaagatgggcgcgcaggacgaggcgattcgcgcctatgctcccgaggtcctgcaggagcgagaagacggactcatcgttctcgaccccgagaaatgcgccggacgcaaagatatcgccgacaagttcgacggcgtgttctggaacgaagagcttggcgtctgccagggctgcacgggctgtgcccacctgctcgacgatggatggaaagagccccgctgcgttgacgcttgcgcgacgggggcgctcaagtgggtctccgaagacgagctccccgagggggccgagcgccttaccgagggcagccatgtctactacctcaacctgcccaagcgctgggttgcaggagaggtgtatgacgagctgaaagacgaagtcatcatcggcgcgactgtcaccattcagggagatgacggcgctgtcctcaagacccagaccgacgagtttggagacttctggttccgtcaggtaaaggctcaaaagtacagcgtctggtacgaggctgacgggtatgtgaccaagacgggggaagctgacgcgacagaggcggacgcgcacgtcgggtctgtgccgatgtacacgatggacttcaagtagtttggttactccgctgcggggtcaaggccatatggccccgcagccctcagattcatatattaggcctgttcgaaaaatgcaggtcggggaagagggttcaccatgagcatgaaaacacgaggacatctgtacggtgttgtctacagtattctgattgcatttgtcattgccatcgtcatgggccttgtcggcccgtcgcttggcggccatcccatcacggggatcgggtttctcaattcgctgtggcagggtaccttggtcggtggaatcgtcggcatcatcctgcctatccccaagattgtcggcttctacttcgaccgcgtcggtgccgagagcaagattgcgaagacgttcgtcacctgcatccttctgacgactgtgtttgcgatagtgatgattttctacttcacggcaatcaacatcgggttcgccacgttccagaccgatgtcggccccgtaacctttatgaatcgctacatggatggcttcgcggtgcagtgggcgtacatcttcgtcgcggcatttgtgggcgacccgattgcatccaccctcgcggcgaaggtcacgaacttttacccgcatgcccaggcggcacgttctggtgatcccaagaccgatgtcacgaaggcgtaaacgcgcgggatagtgccattggaggttttgcatgcgcgcccttcggtacaccgtggggcgcgcatggtcgttttcacgccacggcgggcggccactggtggcgcggcgtgccaaacggc

SEQ ID NO: 2385 - DNA, 4068 bp, Unknown
  16S sequences of unknown bacteria
gacgtacaggcgctcaagcgtgatattttgcttgggcgtttcggcaaggcaaagcacatcgccgtctaccatggcttccgccgcggcgccgcttactatgcacgcaacaattgggccgggcggatcacctgccaggggcgggaagtattcgacagtccctttacaaacgcgtgtgcccatcattttcagatgctgacctttctgctgggaccgacaatgcgtacagcctgtgacatcgagagcgtgcaggcggagctgtaccgcgcgaatcccacgattgaaaactatgacattgccgcgctgcggtttcaaacggcacaggggctgccgctcctgtactatacggcgcacccgatccgcacagagttttgggggccggtgggcgtgttggaatttgaaaacgccaccatcacttacacccgggaaaagccggtatttcgcggagtgatggcggatggaagcgcctttgattacagcggcgtggccccaggcgccgatatgcagaagctgatggatgcgattcaggcggttgacagcggtgacccgccactttgcggtgtggaagcggatttgccgcatatccacgcggtacgtctggtgcagcaaaaccctatcactccggtgcgttccgagctggtgcagccggtgcatacggatacggatgatttctattgtgttaaaaatctggagcagatgctggttcactgtgcggaaaaccgggcattgccctccgagctggggattcagctgggttgacagcgcgccatttcaacaatttacaaaggcaggccccgtttggcctgcctttgtaaattgagacacagatgccacatgaaatttcattccaggtttcttgattgggtgagtcggagagcggccgggcaggggcgggacaggatgaacttgtccagcccctgcccggccgctgcctatgtgacctgcccctggctttggcaagtatgagccgggcgcgtacccgtttgtcgggctggcccgcatgttccacggcatcggcgccatgaagaaagctatgcggttggccacggccccttcttctggttatttgcgaatgtatgtgtgagcgccaggaataaaatatagaaaaacgccgagggaaaatgtaggcttgtagcggaggcgaggggaaaggacagctttccgatcaggggatgaaagctccccgatgaagaactgaatatggagaatcacctgtttgacactgccgctgcggtatagcggaagaacggtgcgggtaactctgctgcctgcgtcttcccaaaacagtatatccccatatttataatgcgtctttatcgtgcagcacctattgacaggtgcgggttttgtgttatactacatttagaaattcatctaaatgagacgcggcaaaatgccgcgccttttgtccgcacggccggacggaacggagggtatcatgctgaccatcaccaacttttcaaaaacgtatgcaggcggcaaaaaggctgttgacaatttgtcgctgaccgtcaatgcaggcgagatcatgggctttatcggccacaacggcgcaggcaagaccacaacactgcgcgccgtggcgggcattttggattttaccgagggagagatcgtcatcgacgggcattccgtaaaggacgaacccgtggcggcaaagcaggtgacggcgtttttgccggacaatccggatctgtacgaatttttgacgggcatcaaatatctggctttcattgcggacatctacggtatctcgaaagacgtgcgcgaagagcgtatccgcaagtatgcggatgccttcgagctgacgggcgcgctgggcagccccatcggcggatacagccacggcatgaagcagaagctggctgtcatttcggcgcttatccgcgcgccgcggctgctgattttggatgaaccctttgtcgggctggacccgcaggccgcgttcgtgctcaagggctttctgcgcgagatctgcgcggcaggcggcgcggtgtttttctccacgcacgtactggaggtagcggaaaagctgtgcgaccgcattgccattataaaaggcggccgactggtgaaaatgggcaccacggcgtccgttgttggagatgagagtctggaacaggtgttcctggagctggcgcaggagggcggtgcacatgcgtaaactgtgggtgcttttgaagctgaatttccgcgcgatgctgcgggcgttttcgtttcgcagcggagcgggcagcagcaaaaagaaggccgcgggcggcctgggcgcgctgctgctgatggcctttttggcgctgtacctttccggcgtgtacagctttttgctggcctccatgctggcggaggtgggcatcgtggagatggtgctgcctttgatggcgctgatggcctgcgtgatgtcgctgatgtttacattattcgcagccagcggtcttgtgttcggcggcaaggacagcgatatcgtgctggcgctgccggtgccggcctttaccgtgatgctgagcaagatcctggcgctgtacctggaaaatcttgtgttctgcgggctgtggatgctgcccacaggcgcggcttatctggtgtatgcggggctgggagcggggcaggctgcgggcttctgtgtgcggctgcttgccgccgcattgtttttgcctttgctgccttccgttttggcattgctggggggctgggtgatcgcctatttttccggccgtatgaagcacaaatccctggtgggcacggtgctcagcatcgtgctgacgggggcggtgctggtggggagcctgcagatcaatgcgttggcggcggcactgctgcaaaacatcgagggcgtgcggcgcacgctgcatacctggctgctgccgctgggcctgctgctggacggccttgtgggcagctggggcgcgctgctgggctttctgctcatcagcctggcgcccttcctggtgcttgtctggggtatgagcacgcagtacaagcgaatcctgtccagccttgccagccatgtgacgcgcagcgattacaggctgcgtgaggtcaaggccggaggccggtttgcagcgctgttcaaaaaggaatgcggccgctattttggcaccaccatctatttgctgaacaccgggatcggcgcggtgatgctgctgggcttttcggtatacgtgctgttcgtgcggggacaggcggcgctgcttgttgcgcagatgggcggcgcgcaggcggtggctcccatgctggcggccgttgtctgcctgatgcaggcgacggtgaataccgcgtgcgtctccatcagcctggagggccgtacgctgtggattttgaaggaagcgcctgtcccgccccgtgagctgtttggcgcaaaggcgttggtgaacgttctggtgtccgacgtgcccgcgacgctgagcgtgtttctgctgtggtttgggctgggcctgtccgcgccggacgcattggcgctgctggcactgtgtgtgtgcatgggactgttcattccggtggcggggctggccgtcaacctgtggctgccgcgtctggattgtgaaaacgacaccattgtggtgaagcagtctgcctcatcaatgatcggcattttcggcggcatgctggtcgtggggcttggcgcactgctgtgggctgttggcggcaagctgctgggcttcgtgtggttcagcctggccgcggccgcggtgctgctggcgggcgcggcgttgggctggcactggctgtgcggttccggcgcgcgtatcctgcagaagctgtaaggaggcgggaacagtggcggagaacatgaaaaaacgggaggcgcggatacagaaggccggcggagtgatcggcggcgtgatcggcattgcgtccatcgtgttcgccatggccgtcgtcgtgttttccggtgtgagtgtaaagctcaccggaacggcgctggagctttccggagggatcggggacagggcgtctatcccatacacggagatcaccggcgtggaatggcgcgatgtttttgacaagggaagccgtacccgggggaccgggaccggaaaaatatccagcggtacctttaccaatgatgaattc

SEQ ID NO: 2386 - DNA, 5312 bp, Unknown
  16S sequences of unknown bacteria
ccgcagaaactgcaaattggggactgtccccttttcgcggtttcacacgcgtgtcacatgagttcacatcggtgcaaccactgcatggctgacggcgcatagcatcgctacatgggggttcgtccttcctggtgtggcgaacccctgccgcacaccaggtacgccaggcaagggtgatagctcatgatcagcttcggcgttttcatcggcgcattggtctcgaaccccgtgcttctcgtcatcacggtcctcatcatcggcaccatcttcgtcaacggcgcgaccgacgcgtccaacgcgatcgccacggctatcggcacgcgctccgtaaacccggacgccgccatcgccatgggcgccatctgcaacttcatcggtcttatcgtgatgacgtatctctcgacggccgtcgcggacaccatcagcaagatggtgaactttggcggcgatggacattccgcgctgatggcgcttgccgcggcgatggtctcgatcatcgtatggggcgcgatcgcgtggaagttcggtatccccacgagccagagccattcgctcatcgccgggctgaccggtgcggcgattgcggtgcagggcggtcttgcgggcatcaactttggcgagtgggtgaaggtcatctacggtctgctcgtgtcgacggttctcgggtttggaatggggtgggggatatccaagctcatcccgattgtgtgcgcgcggatgcgcaggtcgacggcaaaccatgtgttcgggccgctcaacgtggcggcgggcgcgtttctcgcgttcatgcacggggcacaggacggacagaagttcatgtcgatcgcgatgctcggcatcgtgctgtcggtgggcattgacggcgcgtacggcgactacccgttctggatcatggtgttctgcgcggcgtgcatggcgctcggctcggcgatgggcggcaagaagatcatcaagtccgtggccatggacatggtgcacctggaaaagtaccaggggtttgccgcctcgctggccgcggggctgtgcctgctgttcgcatcgctgacgggcatccccgtctcgacgacgcacacgaagacgaccgccatcatgggcgtgggggcggcaaagcgcctgcgtgccgtcaagtgggacatggcggggagcatggtcctcacgtgggtctgcacgttcccggggtgcggcctcatcggatgggcgcttgcgatgctgttcgtgcgcatcttctagctcgtgacccgaggggccgatgacacgaggggccgtgggtatcgtgccatgttggttcgaagggacaccccgacttgcccctcgttcccgagctgatgcgagctagatgaggatgccgtcgcagtggtcgacctcgtgctggatgatttgcgcggtaaagcccgagaacctctccgagcgctgctcgaagtgctcgtcttggtagttgacggtgatgcgccggtagcgcgtggttgagcggacgccgtcgagcgacaggcagccttcctcggtgtggtacggccccttcttttccacgatcgtggggttgtacatgaggcgcggcgtcgttccgtcggtgaagacgatgatgcgcttgagttcgccgatcatgtttgccgccatcccgacgcacgtcgcgcggttggcgacgagcgtgtcgcgcaggtcttcggcgattggcgcgtctgcctgcgttgcgggcacgctctttcgcgagagcaagaattctgcatgtacgatgggccgttccatggggcactccgtttcgtggatgtgtttgccccatggtaccccagtgacacgaggggccgtgggtatcgtgccattttgacgcgaggggacaccccgccctgtcccttcgtgcccgccctgccccttcgtgccacgccgccccgtgtccccgccgcgggcgagcaatccccatggacgttcatagttcctccatattctccagtaatccccattgaagagcgttaccaaaccgaaataatgagggatagtatccataatccctagtgctatcggtcaaataaccacaagtgcaggggattgtggttcgggagttatcagcaaagagaggggatattcatgagtctgacacgtcgtgatttcctgaaggccgccggcgctgccgcagccgttaccaccgtggcagggggtgcagcatcctacggcacgtggctcaagccggccgaggccctcgcggagagcgcggacgagaagatcgcctacaccttccaccagtggcactgcggcggcaactgctcgttcaagtgcaccgtgcgcgatggccgcatggtccaggtcgagcccaacgactggccgggtgagaagaagttcaacaccatctgcctgaagggcatcagcgaagtccagcacatctacggcgacacccgtatccagacgccgctcaagcgcgtgggcgagcgcggctcgggccagttcgtcagcatcagctgggacgaggccttcgacgagtgcgccaagcagatcaaggcggtccaggacaagtacggcaaccaggcgatgctgttcgacacctgcctcgagccccgcaccggcttcaccttcatcgccgacttcctcaaaggccagatccaagacgaggacatcgagggcgtcgacgtcggcatcggcaacggcatggacccggcgctcggtcgctacgacaaccaggagatgcttgcgacttgctcggttgccgactgggtgcactccaacacgatcctcatgctcggcacgaacatccccgagtcgggcctcgtctacaaccgctggttcttcgacgcgaaagaggccggcgccaagatgtggacgatcgacccgcactacaccacggccgccggcaaatccgacgagtggatgcccatccagcccggcaccgatgccgcgctgctgctgggcatgatcagcctcgtcatcgagaacaagtggtacgacgaggacttcatgctcaagtacacgagcttcccgttcctcatcgacaaggcgaccggcatgctcgagcgcaacaagcagaccaaagacgcgcccgaggaaggttccggcaagtccaacccgttcaaggtgtgggacggcggcgtcaagaactacgacgcgtcggctcacccgcagctcgagttcgagaacgacaagtacatcacggtcttcagccagctcaagaagaacgcggcggagtacacgctcgactgggctgcggaaaagacgcacctcgaccccgacaagatcacccagatgaccgacgagttcgccaacaaccagccgtccgttctggccatgggctggggcggcccggacaagtggtacaacgccgacgtcgtcgggcatgcggcggtcacgctcgctggcctgtgcggtatcaccgacaagcagggcggtggcctgggcggctacaaccagtggcaggtcacgtacggctgcgagttcggcgaatggccggaacccgacgattggggaaccgccgacggcaccgagggcaacttcgagcgccgcgacgacgatgcgggcgtgcacggctacgtcgcgctgggtgatgcgctgctcatgcactacgccgacaccaacaagacgcgcgagtgggtcaacaagctcgatttcgttttggccgtggacatctaccataccttcacgtgcgactgggcagacatcgtgctgcctgccagctcgaagttcgagctcaacgaggacatcggctccgtcaagaccgcacgcgactatgtcgagctgcagcaaaaggtcatcgacccgctgttcgagtccaagcccgactacgagatcgagtacggcctggccaaggccatgggatgcgccgatgcgctgcccaagacgcgtcgcgagctcgacgaggcgatgctcgcgagcgacgatccggcactggccggcatcaccgtcgactcgctcatcgccaacaacggcctgcagcgcctgaacgtgcccgaggagtgggcgacgtcgtaccgcgaccacgacttcacgacgccttcgggccgtatggagctctactacgactggctcaccgacgacggtcagcagctgcccaagtacgaggatccgaacgaggcctacgagggcaacccgctcatggacaagtacccgctgcagctcacgcaggcgcgctccaagttcttcatccacaaccagttcgtcgacgccaagtggatccagcagttctacgtggcgacgctcgagctcaaccccaaggatgccgacgcgcgcggcctcaaaaacgacgacatcgtccgtgcctacaacgaccgcggcgagttcaagtgcaaggtgcgcgtcaacaacgcgatcaggcccggctcctcgcgcatctacgagggccagtgggccaagtacatggaagagggccctgtccagaacctgacgaacgacaaccgcaacaagcgctccatctggctcaacgccgcgcccgtcgccccgttcaacgacacgctcgtccaggtagagaaggcgtaagggaggaatagacaatgaccaaactgggaatggtaatcgacctgtcccgctgcgtcggctgccacacgtgcgcgaacgcctgcaagatgagcaacaacgtgccgatgggaatgctgtggaaccgcgtgctcaccgacggcgaggacgtactggacggcgcgcagggcacgtaccccgacctcacccgcaggtacgttccgctggcctgccagcattgcgagaaccccgcgtgcatgaaggtgtgcccgacgggcgcgacgcacaaggacgagaagggccgcgtcgagatcgactacgacaagtgcatcggctgccgcttctgcatggcggcctgcccgtacaacgcgcgcgtgttcaactggtccgagcccgaccacgaccccgacttccagaccggcttcaaagacgtgccggttcgcccgcgcggcgtcatggagaagtgcacgctgtgcaaggagcgctgcgacgccgaccccgacaacgagccgatgtgcgtcgtgtgctgcccgtccagcgcacgtgtctacggcgatctggacgaccccaactccgagatctccaagatcgtcaagcagagcaaggcctacaacctgcttgagggcaagggaacgcgcccccaggtctactaccacgactagaaaggagccgaaaagatgaaatccatgaagaaatccgtcaagatcgcgctcggcatcctcgtcgtgctgatggtgatcggcctggggtgctggatcggccagcagatcttcggcctggggatcacgggcatgtcgaacggcacgtcctggggcctctacatctgcctgttcctgctgttcgtcggcctgtccgcaggcggcctgatcgtcgcatccgccggc

SEQ ID NO: 2387 - DNA, 7117 bp, Unknown
  16S sequences of unknown bacteria
tgatggtcgccagctcatgggcctgcagcggctgcgtcagatcgccgctgatgacattgccgctgaccgaagcgctcagcgtatccttcacgtccccatacttgccggtgctggtaaacacttcctgcggatcaaatgccttgggcatatgaatttcataatgcagatgctcgaccgtcgtatccatgctcgtcacaaatgtccaatacagcatctgcgtgccttccggcagctgcaggtccgtggtctgcacgatataagacacggtgaatgactgcctgccggtcagcgtctgatcacgatcgcccatggccacagacagactgtcctgattctgggtgatcgaaagcaggcggtcacactggacatcggtgatcggaaaatagtagtcccggtatacgatgccctccactgtctggatcggcacatggcaggtcggcgtgatcgtccgcacgaagctgctgcgataataattaaaattcagatcgtatgcctcgctgaccagcagtctgccgtcttcctgaacatgaatggtgatgtccaggttctccaccgtatatgcctcgctggcattcagcgaaacgccagacatgcccataagcaacagcaccgccatgatgcaggccgcaatgaaccgtttcatgtcatcatcctctctgcgtttattttaacatttatccttgacgcagacaacctcgtccaggtgcgagaggagatcagcggcggaaatcaaacgcttcggcaaacaggccgttttccatgatgagcgtctgctgtccgtctgcgccgatgcccgtgacccgcagatccggggtgccgaacatgaaatcgacatgggtcatcgactgattggcaccgcatgccttgcgctcttcctcgctcatcgccagcccgccgctcaggcaggaaggatacgcatcgcccagcgccaggtgacaggaggcgttttcatcgaagagcgtgttgtaaaacagcaggccggatcgggcgatcgcagaatcctgcggaacgagcgcgacttctcccagatagctgctgccctcgtcaaactcgatcagcgcgcgcagcgctgcttttcccttacgcgcgtcatatccgtacaccttgccatcctgaaattccagatggaaatcctcgatcagctgaccgttgtaatccagcggcttgctcgcatggacgacgccgttggtcttcagccggtgcggcatggtgaacacttcttccgtcggcaggttggcgttgaagcggacgccgtcctgcgtctgttcgcttcctccttcccacaggtgtccctgcggcaggccgaccgtaagatctgttcccagcgagctggtgaagtgcagcgcggtaaaccggcatgcgttgaggctgttcacccgctgttcgaacatcgcgttgcgcttttcccagatggcgagcggatcatggtgcgcgtcgacatagacacagtcaaagatggcctgccacagcttctttacgccgtcttcgccggcatccgcgaacacctgatccgcccagccggcgttcggcacggccacgatgctccaggcgcagatattgtccatcgtgtatttctgcaccgccttgctcgccctggcccaggccaggctggccgcgctgatctttgcggcgtcacagtccgcaaacatccccggtgtctcactgatcacatggagcacgcacgccccttctttcagatagtccagacggctgtcgatctgccagtcatggaccctgcacagcgtctgttcgtcctggtgcaggtaatgcaggcggctgacgcgctcatcgctgtagcgcatcaccacttctcccgcacccatgcggtacgcctcctcacagatcagcgcagcaaagtcagcggcctgcacatccgcattcaccatcaccgtctgccccttctgcacattgacgccgcaggccagcgccaggcgcgcatatttccgtttcaacagttccagttcattcatcatccattcctccatttgggtaaaagtataccacaattcagccgagcgcgacatccaggatcatcatgagcgcaaaaccgagcgcaaagccgatcgtgcccaggttgctgtggcggccctgcgccgtttccgggatgagctcctcgacgaccacatagatcatcgcgccggccgcaaaggaaagaaacagcggcagcagcggctgaagcgaggaagagagcaggatcatgacgatcgccgccagcggttccaccgcgccggacagcacgccatagaaaaatgcccgtctgcgattcatccctttctcagcgcgcagcggcatcgagacgatcgcgccttcaggaaaattctgaatggcgatgccgatcgacagcgcaaaggccgaggccatcgtcacttcgcttccctgcgccatcagcgcggcaaacactgcgccgatggccatgccctccgggatgttgtgcaaggtcacggcaagcaccatcatcgtcgtcctctgcaggctgcagcgatgcccctctgcctcatcgctgccaaggtgcagatgcgggatgagccagtccagcagcaacaaaaacgcaatgccgccgatcaagccgcagacagccggaagaaaagagagccggcccagcgcagaagacatctccatggccgggatgagcagtgaccacacgctggcagcgaccatcacgccggaggcaaagcccagcagcgtcttctgcacaagggcattcatctgccggcgcatcacgaagacacatgcggccccggcactcgttccgatcaatgggaggatcagtcccagaaatatattcatgttcatccattcatctcctcacattctatccatagtatgtctgaatatggcttcctgctcatttttttctactatatcatcgttccagccatcgcgcaacgcagacgaactgcaaagattagcgtatgctaactaaagagcagaaaaagtgtccggcgtttcttccggacacgggatgatcatatgatctatacgttgatgtcggcgtgcatgccaagcgcatccttttccttttccaggatcggatcgatatgctcggcaaagaattcctcggtctgctgcacgctgcggccaacgaaattagccggcttcatgatcgcctgcagctgctccaggttcatcgggaaacgcggatcatccgcgatccgctgcaacagatcattcggctttccttcttccttgaccactcttccggctgccatggaatgcacgcggatggcctcatgcagctcctgacggtctccgcccatcttcacgcagtccatcatgatgttttccgtcgccatgaacggcagctcgttcatcagatggctctcgatgaccttcggatagacgaccaggccctctgtgatgttcagatacaggtccaggatgccatcgacggccaggaatgcttccggcacggaaatgcgcttattggccgaatcgtccagcgtgcgctcgaaccactgcgtggcagccacgatggccgggttcatgacatcggagatgacataattcgccagagaagccatgcgctcgctgcgcatcggattgcgcttgtacgccatggcgctggagccgatctggctcttttcaaaaggctcctcaacttccttgaggtgctggagcaggcggatgtcattggagaatttatgcgcgctctgcgcgatggagctcagcacgctgagcacacggaaatcatatttgcgggaatacgtctgcgtggacaccggatagcaggcgtcatagcccatcttttccgcgatcagctgatcgagcttcttgactttgtccgtatcgccgtcaaacagctccatgaagctcgcctgggtgccggtcgtccctttgcagcccagcagcttcttgtgttcgagcagccagcacagctcctcatgatccatgagcagatcatgcgcccagatgctggcgcgcttgcccagcgtggtcggctgagccggctggaaatgcgtgaatgccagcacaggcagatccttgtactgcagcgcgaacttttccagacgcgccatcacgttgaccagcttgcgcttgaccagctccatggcctcatgcatcaggatgagatcggtattgtccccgacataacagctggtggcgcccaggtggatgatgccctttgccttcgggcactggcagccataggcgtatacatggctcatcacatcatggcgcacttccttctcgcgctgtctggccacatcgtaattgatgtcgtcctgatgagcgatcagctcagcgatctgctcatcgctgatgtccaatcccagctcctgctcgctctgcgccaatgcgatccacagtcttctccaggtgcggaatttcttgtcgttgctgaaaagcgcctgcatctccttgctggcgtaacgctgcgccagcgggctctgatacgtatcgttcatgcgcgcctcttatttatccagtcccagacggcggtaaacttcctgataagcgccttccgcatcgcccagatcgcggcggaaacggtccttatccagatgatcgtgtgtcttcatgtcccagtagcggcaagtatccggagagatctcatcggccaggatgatctgaccgtgataacggccgaactccagcttgaagtcgatgagctcgatgcctacgccggcaaatacttccttgagcacctcgttgaccttgaaggccatctcgctgatcgtgtcgatctcttccttcgtggccagatcaagcgccagcgccatgtaagaattcatcagcggatcgcccagatcgtcgttcttatagctgaattccagggtagagcacttcagcggcgtgccctcttctacgccgtagcgcttggagaagctgccagctgccttgttgcggatgatgacctccagcggcacgatctccactttcttcaccagcgtgcggcgctcatcgagctccttcacgaaatgtgtcggcacgcctttttcttccaggatctggcagagatagttgctcatgcggttgttcaccacgcccttgccgacgatcgttcccttcttcagtccgttgaacgccgtagcgtcatccttgtaatcgacgatgagcagatcctcatcatccgtgcggtacactttttttgccttgccttcatacatcatttctaactgttccatgtttacctccatttgcatattcgaaccttacatggcatcatcgatgatgtcatgcagaaagatattgtttacgcgatccggtcccactgagatcatcgatacgcgcacgccgatgaaatcctcgatgaagcggacatatgcctggcagttttccggcagctcatcgaaggtcgcagccttggtgatgtcttcatcccagccgtcgaacacctgatagaccggcttggccctggcgatgtcttccagcgaggaaggcatgtagtcatagcgcacgccatccacgtcatacgccacgcagacataaagctcgtccagtccgctgagcacgtcgatcttggtcagcacgatgtcggtgagcccgttgatcagcgccgcgtgcttcaccacgttgaggtccagccagccgcagcgtctcggccgtccggtcgtcgcgccgaattctccgccgttggcgcggaggcgctcgccggtctcatcattcagctcggtgacgaaaggcccttcgcccacgcgggtggagtatgccttcacgacgccgatgacctgagagatccgggaaggcgcgacgcctgcgcctgtgcatacgcccgcagaagtcggtgaagaagatgtcacatacggataagtgccatagttgatgtccagcatcgcggcctgcgcgccctcgaacagcacatccttgccctcatcgagatcgcggttgacctcgctgacgctctcgcacagccggccgacgatctgatcgcggatcgcgctgaagcgggcgatcatctcatctgcgtccatcgcctcgccgccgtagatctgcgtgaacagaagattcttgtccgcgaggaagcggcgcgccttctcttcgaataccgcaaaatccttcagatcgcacatgcggatcccatgtctggcgtacttgtcggcatagcacgggccgatcccgcgcttggtcgtgccgatcttctttgcgccggaatgctgttcctgcagctcatcctgataaatatgatagggcatgatgatgtgcgcgcggtccgagatccggatgtggtcacaggaaagcccgcgctcctcgagcatgcggatctcctccagcagcacgaaaggatcgacgaccacgcccgggccgatcacgcacttcgcctcctgatgcagcactccggaaggcagcagatggaggatgaatttctctccgttcacgatgaccgtatggcctgcgttgttgccgccctggaaacggacgatcgtatcggcgtgctcgctgaggacgtcgacgacctttccttttccctcgtcaccccactgggtgccgactactactctacctggcatttctttcacctcttcaaactttctaaaaatgcaatcacgtcaaaattatatgccttccatttgatttgtcaatctttttctgacgatggccggatattgccgttttctccgccagaaacgccgctatttccgcgttggggataaatggaacgcccgtggttgaacagcctggaaaacgccacgctgaccacgaagaatggaagggcctgcaggccgaacacctctgcgccgatcaatatcggcgcgatcagggtgttgctcgccgatgcgaacaccgatgcatagcccagcgccgcgccggacgcggcagacagaccgaatgcgggcgccagcactgcgccgagcgaagcgccgatggaaaacagcggagtgacctctccgccctgaaagcccgcggaaagcgtaagcaccgtaagcgcgcctttcagcagccagtcataccagatgatctctcctgccccctggctcatgtcgatcaaattggtgcccaggccagcatagcgcccctgatgcagcagcaggatgaggaagctgatcagcgcgccgcacagcaggatgcgcacccggggatccggcatccacgccgccatcttgcgtttcatgaatgccaaagacgcgctgaaggccaggccgcacagaccgaacaggatgcccagcagcgccgcctt

SEQ ID NO: 2388 - DNA, 8384 bp, Unknown
  16S sequences of unknown bacteria
atgcagcagttccaggtcgcagtgaaggtccgctactttcaaactgggcaggccgtgctgtcgctgcccgaaaaagtcgccagggccgcgcagttccagatcctgctgggcgattcggaacccgtcgttggtttccgtcatggcccgcaggcgcgttttggtgttctcgctgcgggcgtcagaaaacaggatgcagtaggatttttcggttccgcggcccacccggccccgcagctggtgcagctgggacaggccgaattgttcggcgttttccacgaccatgatagtggcgtttggaacatccacccccacttcgatcacggtggtggataccaggatatccagtgtccctgcggcaaaagcggccatgatgctttctttttcggaagatttcatcttcccgtgtacgcagcctacccgaagatcgggaaagatttcggtttgcagacgggaagtatattccgtcactgtttttttttcgttggggatcgtgtccggtgcacccaccagggaacagacgatatagacctgccggccggcacgcacatgctttcggataaagcggtacacccgttcgtggtagctgtttggtacggcgaaagtgtctgtcttctgccgcccggggggcagttcatcgatgacggaaatatccagatcgccatagatcatcagcgccagggtgcgggggatgggagtggcggacatcaccagcacatggggcttttccgctttggcggacagggctgcgcgctgggccacgccgaagcggtgctgttcatcggccaccaccaggcccagggaagaaaaagtcacgtccctggaaatcagagcctgtgtgcctactgcgactgtgatttctcccgtttccagctgtgcgcggatgctctttttggttttggcgctcagtgaaccggtcagcaatgcacagcgcacgcccagtttttccagcagcggggccagggaatgatagtgctgctgggacagcagttccgtgggcgccatcagggcggattgataaccattttgtgcggcaaaatagatgcaggcggcggccaccatggttttgccggaaccaacgtcgccctggcacaggcggttcatgggcgttttgccgcacatatcggccatggcctcccctaccgcgcgccgctgtgcatcggtgagggagaaagggagggcatcgtagaaaggctgcatatcaatgggggagcacactgtggagctgagatccgtgcggcggcggcgcagcagctgcatgccggtgcacagcaggaaaaattcttcaaaggacagtctgcgccgcgccacgttcagggcttcaaaggaggcagggaagtgaatattttcataggcgtagccgatgtggcatagatggtagtgcagccgcagttcttcagggagtacgtcggggaggatttcctcgcaggcattcaggccttgacggatggcgcgatgcattgtattttggctgatccccgcagtcagcggataaattggcataatgcgcccggtgatcgctccgatgccgtctttttcaaacagaggatttatcatttggcggcgcagcagggttccctctgttttgccataaaatacataggtttctccgacgattaaagtgtttttgagatagggctgattaaaaaaggtgagaaagagcgcggaggtattgtctaccaccttcaccttcagcaaatccagtcctttgcggacatgggaagccaccggcgatgatgccaccatggcccgtacgcagcagttttcgccgatgggcagcgtgtcaatggtgcggaggacggaacgatcttcccaatccctggggaaataagagatcaggctgagcaggtcggtgatgcccaacttggccagcgctttggcacgggcttcgccgatacccttgatatagcgcacatcggtatgcagatcgctcatatcctatccctcctgtttaccgcatagtgtaccataaaatcaatgttttggggagagaagcgtgaaaaaatttgccgcggccgatgaaaaagcgccgcacattctctgaatgagaatgtgcggcggcacaggacaggatgtttcagctgtggagcttttgagaaaaatccgccagcacgtcggaaattttgatctgctgggggcacacggcttcacaggcgcggcaggcgacgcaggcggaaggctgcttgtcagcaggcagggcggacagcgccataggggccagaaaaccgcctccggtgaacgtatgctcattataaagtttgagcagcatggggatatccagttcctggctgcagtgactggtgcagtaatggcagctggtgcagggcacgccgccggtcatagcccgggcaatctgctgcagggtgtcccactcttcaggagacagaggctgctccgtttcaaagaagctcagattttcctgaagctgctccatagtggacatgccggaaagcgtaacgcccacagaaggaatggactgaagaaagcggaaagcccagcccgccgggctttctttcgggcgcagtgcatgcagcacagcggcatcctcttccgacaactggcagagacggccgccccgcagtggctccatcacccacacagggatgtggtagcgttccagcagagcgactttttcccgggcgtcctggaattcccagtcaaggtaattcagctgtacctgacagaattccatggcttcgccgtaggcttcccaaaaccgctccagtacatggatgctcccatggatggaaagacccaggtgacggatgcgccctgcctttttctgctgcgtcaggtagtcgaaaataccatactgcggatcaagatattgttcaatgttcatttcgcatacgttgtggaaaagataaaaatcaaaatattccacaccgcatcggcgcagctgctcttcaaagatctcctgcacttttcccatgttggacaggtcatagccggggaatttggaggcgaggtaataactttggcgcggatactgacgcaggcagcgccccattaccgcctccgaatgaccgccgtgatagccccaggccgtgtcataataattgatgccgtgggccatagcgtagtccaccagttcttttgccgccggctcgtccacctgggcgtccacgccgcccactgtgggcaggcgcatggcgccgaaccctagggcagacagcttcagatcctgaaaatccttataaatcaaaacaatcatctcccgttgtatcgatacagtttcaaatcgttcgttctggtgaggacggtagctcttcaacaacgcgttttatcccacggtcattgtaccatgactgggccggcaggggaaggggcaatccgtctgtgcggcatcaacaaaaggtctatgcaaacggaggaaagaccgcccgcagcgggctgcggacggtcaggttcagctttcgttgacgtattctacgtattgataggaaagtccttcgcactccataaagttggattcctggcggattttccactgcggctgttccagcagatccgggaaaaaaacatcggcttccggtgcggcatccacccgggtaatcagcgcccggcggcaataagggaggaacattttgtaaatcgcttcaccgccgatgataaatacgtcgctctgcagccggtcggacacttcgatgagcacgtcctgcacgctgttgcacacggtggcaccttcaatttttaaattcgggttgcgggacaaaacgatgttggtgcggttcggcagaggctttccgccgggcagggatttgagtgtgttgtggcccatgaccaccactttgcctgtggtcagagccttgaactgtttcaggtcgtcgggaatgtggaacagcagttcgttgtttttcccgatgccccagttgcggctgacgcatacgatcagattcatattggggttcctccttacactgcgacggggatctttgtgtcgaatgggtggggatcgtatccctctaaaacaaagctgtcgcgggtaaaccggtaaaaatccgtgacagaggtgtccatagtgaagtgcggcgcgctgcggggcgttcggccgagcagatcctcgatgatggggacgtggcggtcatagatgtgggcatcggcgatcacatgcaccagctcgccggcctcgagtcctgcgatctgggccatcatgtgcaccagcacagcatactgcaccacgttccagttgttggcggccagcatgtcctggctgcgctggttcaaaatggcgttgagcgtattgccgctgacattgaatgtcatggaataggcgcacggatacagcgccatctcgtgcagatcttcaaaattgtatagattggtcatgatccgccgggaggcaggattgtgctgaaggtcataaatcacccggtccacctggtcaaattcgccctcggggtactggtgccggatggccagctgataaccgtaagctttgccgatggagccgttttcatctgcccactgatcccagatgtggccgttgagatcgtggatattgttggatttttgctgccagatccacagcaattcgtcaatacaggttttgaaatatgtgcgccggatggtcagaatgggaaattcccgcttcagatcataacggttgacaatgccgaattttttaatggtatgggccggagcgccgtcgtcccagcggggacgcacttgctggtcggtatcccagatgccgttttgcaggatatcacggcagttttgctgaaaaatttcatctgcgtaactcatgcgctgctctctctttcactgatttgcggccattattatagcacatgcctgggataaagacaagaaaaacacaagcaggcgattctcttttggaactgttgtatcagaaaatgcagcgatcgaacgggggcgaatgagttctgcggtcttttggttgcaactttttccaaattgtgctacggtaaaaggcacaaaagagatcgggcattttgccgaaagggagtttggcactgtatgaatatctggaaaaactatgccctgcgcctgagtgcggttggggcctatcgttcgtttctggttttgcccccggtgcaggcgctggcgaaactgatccgtgcgcttgccgaagaaaccgcggatgatgaagcgctgctggatcactatgcggaaaccttttatgcgctgcagaaggcggggtacgattccctggggggctatctttgggagcactttcgctatgatgaaacgccctacggcgatgctgcggcccggggcacagccaacgcggccctggtcgatgcggcgcggtgggatgtggaaacatttgcagcgctgtctgcggttacgccggcgcagtggcgcgctgcggtcgccaggcgggccggagaagaggccgctgcgctgctgcctgtttggcgcgctgacgacacgctgtcttttgaagttttgacggaggagtaccggaaaaatggagccggagagttcgcccggtataaggcgtttacctggtcgaaccacacgctgctccgtgtggtggatccggacctggaggagcacgctctgatcggttatgaagaggaacgcaaagaggtgcaggacaacacccgtgctttgctggccggccacagcgtgaacaatatgctgctctatggcgctgcgggtaccggaaaatctgccacggtgaagagcctgctgaaagttccggagttttccgacctgcgtatcattgagatcgataagcaggagctgtcagacattcccgctctgctgcgccggctggccggccggcggcagaaatttatcctgtttatcgatgatttgagttttgaaaatgccgatgtgggctactccgttttgaaaacggtactggagggctccattgagaaacagcctgccaatgtggttatttacgccacatccaaccgccgccacctgatgcgtgaaaccttcagcgagcggggggacgacgaagtgaatatccgcgaatccatcgaagaacgcaccgccctgtccgagcgtttcggtatccgggtgctgttccggggcctgaacaaggatcagtatctggaaatggtgcgcctgctggcgaagcaggcgggactggacagcgcgccggaggcgctggataaaatggcgctgcagtgggagcgggagcacgccagccgtacaccccgcagtgcccagcagttcatcaaatatctcaaaggactttaagattccggagacaaaaaatacaaaagggcccgccggtcgaataccggggggcctttgttgaattgaccaatgaaatttgaaaaagttagcaaaaagggagaaattgtaccggctccctttctgcagatagggaaggatggtataattactctcataaaaacaccgtaaaagtgcgggtgttgttttgcggacggaaaggatggtgcgagaatgaaaaagatgtatctgtggcagatcgggatctatggaatcgttgcggcggtggccgcaatcttttggatccagtatgtggtggtgggtgcgaaagaggtggcgatccgctatgggtatgagcagtactatttccatctgtttgccgcgcgtccgctgctgtattttgcgctgggggcgctgggcgtcaccgtgctgcagtgggctggaggcatgcttctgcggcgcggtgcgcggcgggtctgcttggtgttgggtattgtcttggcggtgtcgtatgcagggtgtatcctgtgcttgcttttcggccagatcctaccgaacggattcccttggttgatcgttgcatttatcaacacagagcatgcgctgtggctggttcccggcgcgctgtttgcgctgggctttggcgagagccgcgcaaaggagcagtgaacttataaaagcagcggcccgtcactgtagtgacgggccgctgcttttgtgtgttattttgtgccgaaaatacggtcgccggcgtcgccgagaccggggacaatgtacccgtgttcgttcaggtgatcgtccactgcaccgcagtagagatctacgtcggggtggtttttcatgatgcgttcaatgccttcgggagcggccagcagtaccatcagcttgatgtttttgcagccgtaatccttcataaagccgatggcagcgtcggcgctgccgccggtggccagcatggggtcgacgatcaggatatcgcgatcggccacatccttgggcattttgcagaaatactttaccggttccagcgtttcctcattgcgatacaggccgatatggcccacgcgggcgctgggcacgatgcgcagtacgccgtccaccaggcccaatcctgcacgcaggatcggaaccacggcgaattttttgccatccagtgtaggcacggtggctttgcagatgggtgtttcgatttctcgggtggtcagcggcagacttcgggtggcttcatacgtcatcagcatgccgatttcagacacgatttcgcggaagtccttggtgctggtatttttgtcgcgcaggatgctcagtttgtgggccaccaaagggtgatccataatatggacgtgttcgctgtacataatagtgcgcttcctttctttgttccgttattgaaggctggtgcgctgctgctctttggcaagccgttcccgttcggcctgcgacaggcgaagatagaccggctgcaggtcctgggcggccgtaaagaggcctgtctgggctgccgcttcggcgcactggcagacgcccacggcatcctgcatgcgcagcgcttcctgcgccagggcacaggagacaccggcgtctttaagtgcattataacacagcacggctccgtcgccaacgacaattttcgcacggtgttcccggcgcagatcttccgccacggcggcgagggagacggcacggtccgggcacaaccgctgcagtgtgccgccttcggccaaaaatagggcattgtatacttggctgcgccgggcgtccatggcgcacaccagcaccgtattttccagatgggccaggttttgggccatggcttccagtgtagaaacaccgatgcagggcagttctctggcccaggccagccctttggcggcgctgatgccgatgcgcagcccggtgaaagagccgggacccacggccacagccacggcatccacgtcagcgatgccgagttcacaattttgcagcatggcttcagccatgggcagcagggtacggctgtgggtcaggccggtgttttgaaagctgcgggccaagagttttccatcctccatcagggcgacggaggcggattttgccgaggattccaaacctaaaattttcacagtgcatgcgctccttccacatcaatctcccgccagttctcgtgtgttgggctgcggcgcaggcggacataaacggtatcggccggaagggcatcggtgatgttttcgctccactccacggcgcac

SEQ ID NO: 2389 - DNA, 17753 bp, Unknown
  16S sequences of unknown bacteria
aggcgatatgatcggtattgatctcgatcgttcgggctacagaagtgttcatgtcccatcctttcttttattatcgcataaaatcagcgcttgcaaagagccgatgcagacgattcgcctgtgttcagcgtccatctcgctgccctgtctcttcatctgccctatacggaagggaaaagcgtatccctaaatgttttgtaaaaaagcgcagcccggataaaggcagcgctgtgtttgatcattggtagatggatttggcataatccgaaggggtgatgccgaattcctgcttgaacttacgcgaaaaatagtgcacggaggtaaagccgagcatactggaaatttccgatatcgtatgcgtgctctccttgatgagcagcttacctttgttcagcttgaggttgctgatgtattgcttaggcgctgtcttcagattgttcttgaacaatgtctgcagggaagagcgcgatatggaaaactgatggcagatctcctcgatcgtaaactgttcatagatatgcgcgttgatgtattgcacgatctcgttgagcagttcgctttcaaaacgctcctgcataggcgaactggtcacaggcgtatcctcgttgaagtcgaactgcaggatgagcacgatgatctccttaaggtaacacagcatcagctcatcatcatacatatgctccaggttgctcactttgataaagttgttcagcgccgcgtagatctccttatgcgcctggtatacgcgattggtcaacaaataaggattctcgcagtccatttcgaacatgaccgtcagatagctgcaggagttggacggtccagtgctctgggtgtgaaattggccgggaccgtagatgatcagatccagtttgttcaactcgtattcttctccgtctaccgtggtcgtcagcgagccattatcgatataggtcagctcataatagttgtgcttttcgccaggaaagctgtaattggcattgcgcacttgataataacagctcaggatctcctgaatattgatcttggggatcagccgttcatagacgatcggcaggtcgtctgggatctttacttcttcgtatttgctgtcgatgggaaaactgatctcatattttgcgttctgtgagatcggaatgcagttgaacagtgtatccgggcgcagcttgatgacccggtggatgacaaagcgctcataatgataaggatcattgcgcttggcgacgatcagcatgatgatcccgctgagcgcccgcaggtagaccggtttgtcgtaatgcatgaaatgatgaatctgcttgtcgcgaaggcggacaacattcagtttgaaattcttgggcggacgtgagtcggattcaggcggattcctgaatacttcgccgtatttgctgaaaagaaaactggttgttcgatttaacatgtgattcacctcgaatgattcagtgccgacagtaacagactgttttctcttatgcattctattataatgcataacagggatgaatttgaagaaaaaagtgagacagccggctgtaaaaataaaggaagggagttcaatgaaaaaaacaagataatcacataattgtccgcaattggagaaaatgcccattataaaactggataaaattgataaaaatatggaaaaaattgaatatgattgtcgcagagtgtcaaatatcatgcgaatttactaaaaagtacaaatcaatttttaaaaagtgtaaagaaaaaaagtatctattcacatagaatgaaaccgagcaaatgaaagggttttcttgtcacggcgtctgaaaggtgatcagaaaacctcttgtttggttcattatttcgaggtagaagggagagagaataatgccaaatattttattgactcgaattgacgcacgtctgattcacggacaggtcgctacacagtggtgtggtgttctgggtgcaaacctgctgctggttgcaaatgatgcagtagccaatgaccagttccgtcagggactgatgaacatggccgctccgtcatatgcacagactcgttacttctctattgagaagacttgtcagatcatcagcaaggcaagccctcagcagaagatcttcatcatctgcgagaacccgcaggatgtgctgcgcctggttgaaggcggcgtgccgatcaagaaagtcaacatcggtaacatgcacatggcagaaggcaagcgccaggtcgctacttctgttgcagtggatgacaacgatgtcgctactttcaaaaagcttcaggacctgggcgtagagctggaaattcagcgtgtgccgcagacaggtgttgaagatctgagcaagctgtggaagtaaacagcgcgctcaaaagaaagggataagtttttattcctgcttaacttgtgaaaggagaaaaacatgggaagctttagtattgttgaagttgtattgctggccattgtcacattcatctttgccattgaccagttctctttaacagaattaatctatcgtccgatgatcgcctgcccgatcattggtctgatccttggttccccggaaaccggactggttgtcggtggtacctacgaactgatgatggtcggtaacatgccgatcggcggagctcagcctccgaacgccgtacttggtggaatcgtagccatgatctttgccgttaaggcgaacatgaccgtagacgccgctctgggtgcctgcatgatctttgctacattcggtcagtacattgtaacattggtattcaccttcgcatctacgctgaatgcaaaggctgacaaggcagctgcagaggctaacccgagaggagttactgcctgcctgaacatccatatgcttatcctgggcgctctgttcgctgttatcgctatcgttgcatacgctggcggtactgcagctgctggttccctgcaggcattcgctgacagcgctacatggttcatggctggtcttggtgcagctggtgcgatgatgcgtttcgtcggtttctccatcctgatgaagatcatgatggctggtgacatgtggggctggctgctggctggtttcgcactcgttcagctgttcggcggcgtagaagctactgcatctgcagccctggttctggtcgcatttgtaggtattgccttcatgctgctggacttcagaatcaattcaattgctaaaaacgcagaaggaggtatgagtgatggcatctagtaacgatatgctgcattacaaggatttaactcctgctccgagactggataacaaaacgctgaataagatggtatggcgttcctgccagctgcaggcttgcttcaactatgagcgcatgcagtccgtaggatggctgtggtccatgcttccgggtctgcagaagatccacacaaataaggaagacctcgcggcttctatgacacacaacctggacttcctgaacacgcacccattcgccgttacattcgtaatgggtatggtgctgtccatggaacagcagaagatggacattcagacgatccgttccgtacgtatctctgttgccgctccgttaggcggtatcggtgatgccctgttctggatgaccctgattccgatcgttgctggtatgactgctcagatggcaatggaccgcagctggatcggtccgatcctgtacttcatcatcgcgtttggtgttgaaatggcgctgcgctatggtctgatgtactggtcttacaacatgggtactaaggcagttacgatgatgactgctcacgcgaatgagatcactcacgctgcatctgtcctgggtgtattcgtaatcggtgctctgatcgctaactatggcggcggaacttctctggctatctctatcccgaatggtgaaagtacgatcgttattcaggactacctgaataagatcctgcctctgttattgccattactgatgaccctgatgtgctacttcctgatcatcaagaagggcttcactccgatcaagctgatcgttctgttgctcgttattggtatcgttggttgtgcattcggtatctggtatcaggctggtggatacactccgctggttccggtaccttgggatatcctggcgtaatcaggacgacttatactctctcactgactatcaagaaactgcctgcagaaggcagcttagggcaaaccggaaatctacgatttccggtttgctttttttgtcggaattctatataatgtctaatatgtaaaggcgggaatactatggatgcaaatatgttgatgatttatgtgatcgccatcgtgtgtatcggcgggggattgttttattttctgcagaaatacatcaggctttctaagctgaacaaagcaatcgagaacaagaagtatgaccagatcctggtcatgtgtgaacagccctcgcttcgtaagggaatcggtgagtttacctgtgatctgtatcggctcaatgcgcttcgttccatgaatgagacagaacggctgaagagtgagctgaatcagatgctggagtattacggcgggaaggaggagaagcggctgtttgagctgtactatcattatttcctgaatcacaaagattatgcatatgcaaaggaattattggcggccattcgggaaacggaggatgaaccgtttattcaatacaatgagtgggcgtatgaggtcatcgcggaaggacgcaccgatctggcatctgaaatggaagatgcggtcaacgataaagtatattctggctttgcgctgggaacggttctctatctgatcgctctgcagctcgaccggctgaaagagtatgaggatgcgaaggcgttttatcagactgtgacggaatgcatcaccaagcgggaattatattatacgctggcagagcgcagatgcaatgaactggatgatctgatcccggaagatgacgcggaagaagattttgacgacgaagatgaagattaaaaaaagagcggtagatcatatcagattgtgatctactgctcttttatcgttactgggacttcgatcagcgtgcgttcgatgaaccgcggaaggaacttgccgttgctgagttcttggaaatcagcggaattatcatgatcgcagaggtaggtgtaacagacctcttcgtcatatgctttatcgaggatctccaggcaatgctcacggaagtaatagtcgatgcgcccgatcaggtcatagctgaagcggatctcgtatttctccatccactgcttcttggtgatctgcgcggtggacagcgcgtgggatacgcttttggaatacgcgcggatcaagccgcctgcaccaagcttgatgccgccgaaatagcggacggtgatggcgatgatatcctgcatgtgattgcggtcgaggcattccagcatcgggacgccggcggtgccggcaggctcgccgtcatcgttgctgcgcttgatctcattatgctcgccgatgatgaaagcatagcagtgatgcgtagcgtccggatgcaggcgccggatggccgtgaggaacgcttttgcgtccgcttcgctctctgtgcggtgcagataagtgatgaagcggctctttttgatttccatctgttcttcatgatcttctttgattcggtacatgttatcaccgctaaaattataatataaaagcggacatggcgcaaatttgtcagatccggcgtgaaatggctttcggtatgacttgtcgcttttcacccgtatgcaaatctggtataatgaaactaaacctgcaggtgctgcggggatgtggaaacagacagtcgaaaggagactaccgatgaaaatagcagttgtgacagacagcggaaccggatggacgatgaagcaggcgagagcgcttggtctgtattatcttccgctgcaggtaaaatgcggcgatgaggaattcctggatggcgtggacctcacggtttctgaattgtatgcgcgtctcaagcgcggcgagatgccgacgacttctatgcctccggtgggaaaagtagaggcattgttcgaggagctgaagcaggagcaggtcgatcatgtgatcgctgtgccgctgacttcgggtatttcttctactgcggagatgatccaggcagctgcgcatcgcgcggaaatgtcactgacgctcatcgacccttatactaccgtaaatatccagggttatctggcgctctgtgcgcatcagcttgcccagcagggcgtggagccggcggaaatcgaacgccgcctgaaggcttgcgtggagcattccaattccctgctcgtcccggatgatctgcatcacctcaagcggggcggacggctgacgccgttagcagcgacgctgggcagcatgctgaagatcaagccgctcttgcagctcaaccccggcactgcaggacgtgtcgatgtgcttgaaaaagtgcggacgatgtcccgcgcgctcagccgcatggcggatgttgcgcaggatgaaggatttgatccgaagacgtatgaactgacggtgctggacagcgaggcggaggaaggcgcacagcagatgatgcatctgctggaagaaagattccccggcgtgcagatccaccgcagttccatctgcccggtcatcgcctctcacacgggaatgggcgtcgtggccgtccagtatatcagaaagccggaaggaatcgaataacaggaaagaagggcgtatgatgaaaacagcatttgtaacagacagcggaactggcgaaagcatggaagtgctgagcagagaagggatctacagcgtgcctctgcagatcagctgcggagagcagagctattcagattcggtcgacatcaccatcgatgaggtctatgagcggatgcgcgagggtgcgatgctgagcacctcgctgccttcggtgggaaagatcgaggagctgtttgaacagctgaaagcagaagggtatgagcgcatcttcgctgtcccgatctgcagcggcctttccggaacggtccatgccatggagatggtcgcgaagcagcagggccttgtctttgactatgtggactgccatgtgacggcagtggtccagggatatctgatcaggctggccaagcggctgatggaaaggggcaagagcgtggaagaagtcaagcacgcctgcgaagaggtcgtgcatacgaccgatacgctgcttctccccgacgatctgcagcacctcaagcgaggagggcggctgacgccgttagcagcgacgttgggcggattgctcaagatcaagccgatcctgcagatcaatgaacataccaaaggaaagatcgacgtagccggcaaggtgcggacgatgtcaaaggcgatggatacggtgatcgagcggatgaagcaggccggcgtggaccggcgctattccgtgacggtcgcccatgcagatgcgccggaagccgctgaggtataccggcggaagatcgaggcggccatcgaaggcgtgcaggtcaatgtcatcaagctggtgagcgtggtcggcgtgcatacgggccgagggtgccaggcgctgcagtatttctgcccgttaagcgaagaataagcaagaagggaaggcccagagtgtgggaccttcccttttttcagcggttttccatcatgctgcggctgccgatgtaggtgatgaagaaatagagcagatagatcagcaggaagatgccgaacgcctcaatggtagagatgaagatatggcctcttcccagctgggagacgatgctgtggatgaagatgatcccgaacacgctgtggatgacggccaggctgagcgggaggatgaagcaggtcaggttctgaaggaggacggcatggcgcatcatctcctcgccggcccccatgcgccgcaggatctgataagacgagcgggtgttctggttcatggacagctgctgcagcgagatgacgaccgaggaggcgatcagcaggatgatgccggtatacaggccgagataagtatagatgaccgaagtgcccacgctgttctcatgaacctgatcgctgttttcggtatatgcgccctgcatggtcagctgatatcggccatctttccacagcgcatcatccacgatcttggagaagtgctgtgtcgagacataggccttgagctggacgttccagtagtcgcagaaattctcggcatcggccgggatcagcacgtcagagatgacgaggaaggcagcgtcgctgtctctggcaaaggaagcggtgctcggacgcagtgccgcctgcgcgttggggagcatctgcatcgtatggccgaagaccatgatgtgcggctgatgcatggccagctcgctcatgagcgaagagaaccgggagctgctggtgcagaggatgacatttcctggctgcaggtccagcttggtcatgccatggtcagcgcgcagctgattatagtcagagagcggcatgatctccagcggcgcatccagcatccgcagatccagcggtacatcgatgtccatcgtctccatgaggtcgcagagccggggataagtgaattcgctggcaaaggtgtgaaagaaacgctgatacaggatcttgtcgtctggcagctgcagcttgcggatctcttgttcaaagcggcggtagctgaacgcatcccgctcacccatgagcgtatagggatggatcaaagagaagctgtatggggtcaggctgccgatctcgctgttcagcgtattgttcacgctcagtccggcagtcatggtggtgatgctcaggaagagcatgatgcagatgatgctcaccgataaatatccggtgtgcaggcgaagcgtgatctggcgcaggatgaagcagttcagcgcccggtaacaaaatatgcggctgcggcggaagaatacggagagcaaggcggagatggccaggaagaacagcagcgtgccagctatcatcaggaaggcagccaaagccatgcgctggctcaacagcgtgtccgcgctcagcatcagcgcccatccgccggccagcatcatcagcgcagcaaataagatgagcagggcgctgcgcagccggttgaacgcaaagcgggggatgtgctgcgcgccgtagagcagcgtggtgagccggctctgcgagaggatcagcgtgttgaagatgacggtgatgagcgagatcgtcgtaaaggagatcagcgtgatgagcagggcatgcggggaaaagacaaaatggtagcggacatgcacgacgaacagcgaggccgtaaacgtacagaccagctgggaaagcaagatgcccagcaggatgcccatgatcagggagagcgcgccgatgatcatcgtctcgaggatgaggatgacggacatgctgctgcgcttcatgcccaggacatgatacgtaccgaattcctgacgccgccgcgtgatcaggaactgattggcatacaggacgaggaaaccgaggatgaaggcgttcaggatggacagcctgcccatgatcagggagagattgtccaggatgtccggaacggtatccggcagatcctctgcacctgccagcaggctcatcgatccgctggcattgaagcagtaaaacaaagagaccgcgatggtcagcgtcagaaagtagatcagataatcgcgggaaaaatgacggacgttgcgccgcgcgagcctaataaccactgacgacatctcctcctagcaaggtggtgacctccaggatgcgctggaagaaatctctgcggctgtcatcccctctgatcagttcattgaagatccgtccgtctttgatgaagaggatgcgtttggcataagacgcagaaaaaggatcatgggtcaccatcatgatcgtgttgtgtgtatgttgattgatcgtttccagcgtcctcatcagcatgccggagctggcggaatccagggcaccggtcggttcgtccgcgaggatgagcgcaggcgacttgaccagcgcgcgggcacaggtgacacactgcttctggccgccggagagctgccaggggtatcgggacagcagatcctcgatgcccatcatctgcgcgatggcgagaatgcgccgatggatctcatttggcgcgcacatctgcatgctcaatgaaagcgcgatgttctcataagcgtccagcgtttccagcaggttgaggtcctggaacagcagtcccagatgcttccttcgaaaggcggacatcgccggctgcttgagcagcgtgatgtcgcgggaaccgatgaagatatgaccggtggatacagagacgatgcctgccacgcagttgagcagcgtgctcttgccagagccgcttggccccatgatgccgagaaactctcctttttccaccgtgaagctgatgttgtccagcgcgcggttgacactgccgctgccgccgaaatacttttcgacctgggaaacgttgagtatgacgctcatagcgaatagcctcctttgtgtctgcgcttcagaaaattgtgcagcgtgttcaggttgatggccagcatcgttgccagaaaggcaaacagcaggatataggcaaatcccttggacatgatgcccggtacgcacagggcgacgacctcaaggatgcccagcgcggtgatgcagatcccgctgcgatgcgcgaacaatgtcttccacatcggatctccctcccttcgttttcgtctttattatagcggaagggcagatgaggagacatcgaactgcgtgacagatgcctgacaaagttgtaagcttagcgctgccgctgaaggaaagcgcatgccctggcatatgcatcctcatcaagcacgcctgctgtcgtgacggcgtgctgggggaaatgctcttccatgggcagatcatccagggatatccagcagggacgaggatgcgcttgcagccaggcgcggatctgctcagggcggctttcgcctgcggggacactgccgatgacgcgctgcgtgagatgccaggggcgaaagagcggctgaaaagcggccagcggataaacggcgctccaggaagaggtcaggacgatctgggcgtcgaatgcgctgcacagctgcgcgagcagcgacatcgcctgtgcatcgatcccggaatacagcgtgcacatgccaggatcgacacgcagaagacgcagatcatcaaagcgtctggccagctgcttcggcgtgcacagccggccgcgcggcggcagcggccgcaataccccgtcgaagtcgagaaagatgacgggcctcatttcagcaggagcaggttggaaagcgggaacgtgatgatcatcgtcgttccctgatgcagaacggactccacatcgatgtccagatacagcttttcacacagcttgcggcatagatagaggccgatgccggtcgccttttcattgtgcaggcggttgtttccggtgaagcccttctggaagatgcgccggatgtccttgggatcgatgccgacgccgttgtctgcgatatacagcttgagctgattttcctgctggctggtgtagatgcggatcacgccggtgtcggaaggggtgtaattcagcgcgttggtcaggatctgatccaggatgaactcgatccacttctgatcggtgtagacgcttttttccaggtcctccagctcgatgcggatccggcggtagatgaaatcgctggaatgcttgcgcacgacattgtgcacgatcggcgccagcgacagctccttgatgatgtaatcattttccacattggcgctgcgggcatagaacagcgcctgttccacgaaacgctgcacatgatcgatctcctcgctgatggatgcgctcgcttcgctggggttgttgtctgcgatcagcttggctgcggccagcggcgtcttgatctcatgcacccacatctcgatgtagtctttgtattcgttttccgcgatgcggtagcgcttgacgttttcctgcatcgatcggccggcctcgtggatgatctcatataagacgcggccgtccgcaaaatgcggctggcggatgacatccgcgatcaagtatttctgatccagcgtcttcatcgtgtcatggatgctttggtaatagcccttgcggcgggtgtattccacgcacaagaaggtgattggcaggatccaatagaagatcatgagcagcgccagcaccgatgcgctgatatgcaaagagagcaggaacatcgtcagcagcaggcagatgatgagggccgtgagcagcacatacagcttgtcgctgagaaagtcactgattttcatagacgatatagccctgtccccgtctggtctcgatgaaatcgctcagccccacatattccagcttcttgcgcagacggttgatgttcacggtcagcgtgttgtcatcgacgaagacgtcgcagtcccacatgtgctgcatgagcttttccctggagacgatggtattgcggttctggaacaggcagtgcatgatgcgcagctcgttcttggtgagatccacgcttttgccgcggcaggtgatcgagctcttggagacgtccatgatcacttcgccaagccgcatgatgctggagtcggccgcttcatagacacgccgcagcacacgcgagatcctggcaagcaggatctgcagattgtatggcttggtcacatagtcatctgcccccaggttcatgctcagcagctcgtccatttccgaattgcggctggtgacgatgatgatgggcacattgctggtgcgccgcagctccttgcagataaaatgaccgtccacaaagggcagtcccagatcgagcaggatcaggtccggacgctttgccttgatctcttccatgatgtgttcgaagttggtgcagctgtcagccgcatagccgttcttgctgagaaaatcgcacagttccaggcggatcttatcattgtcttccacgacgagcacacgatacataatcatccctcatttccatttcattatatcggaaatcgcggagggaataaagtaacagaaacgcaaggttcaggctgcggttctgctggggcgggggtttttcatagaatgatacaggctgtccatactatcaggtgaaccagcgtgaaagtcgaggatgataggacaatgatcatgaatctgaatcaaaaggcgatgatcgccagagcaggcaatgaagcgaagatgatggggaatgactatatcggcagcgagcatgtgctgctggccttgctcaggcagggagaggcggcgctcgcacggcggctggctgcccagggcatttattattttcaggtcagggaggatgtcgccatcctcttcggcatgaaggaacagaagcaggaaagccaggaagtgacccagatcgtggatgtgatgctggcggaagcagatgaactgcatgaagaaaaacaggggacgctcagctttgaggactgtgtgggcagcgtgctgcctaagcatcccgcctctgtggccatggagctgctgaagcggtatcatgtcgatctggaggaagaagcgcagacacagggcatccgcgtcctcgatgagcaggaagcgctgcgctgcatgaacttcagcgacgcgcctgatctggtgcaccggcagcgggagatggagatgctcgtggagatccttttgcgcaaggaaaaggccaatccgctgctcatcggtgagcctggcgtaggcaagagcgctttggtcgaggcattggccgtgcggatccaacaaggagagatcccgcagcttgcccagcatttcatctatgagctggacctcaatgccctggtggccgggacgcgttatcgcggggatttcgaagagaagatcaagaacctgctcgcgctgtttcgcgcgcatcccaatgcgatcctcttcatcgatgagatccatcagatgatcggcgccggacgctctgagggaagcatcgatgtggccagcgtgatcaagccttgtctggctcggcgcaccctgcgctgcatcggcgccaccacgctggatgaatatgagcggcatatggaaggagaccgcgccttgcagcgccgctttcagtgcgtgctgctgcgcgagcctgatgtgcaggacaccgtggatatcctgcagaagcgccgtgaggaatacggccgctaccatgatgtggagctgggcgcggacctgatcccatcgctcgtagagctgagcgattattatctgccccatggtcatttccccgacaaggcgatcgatgtgatggatctgtgctgtgtgcggaccaagcgaaacaaagagacaacggtcagcgccgattgtgtgcgagaagtgatccgggagatggcgcatatcccgctggatccgcagcagcgcatggcgcgctgtgtgcaggacatgcaggaattcagccctctcccttcgtggaatgaggcgatccaaaaggagctgcatcggctgtgcgaagaacgctgcagccgttcgctgctgcgttgctgggccctttgcgcgccggaaaacgctgtccgtgagctgctggccatgatcagcgaggatttcttctgccgccgctcgctcatcagcgcggatgcgggactgctgtcctggcagaaggaggaggtggtgcgtcagctgcgccgcacgcccttcgccatcctcttcatccatgatctctcttccctcagcgtgcgggaaatggccctgctggccaatgagatcaacgcgggcgcgctgagcgggcaaggggaacaggcgctgctgcgccatgccctgctcgtcctgcacgatgagcaggaaagcgtcctgcgcagcttctgcgccagggtgaagacagatctgtatctgtgcggggaagaagcgccccgcgctcattcccaggcatgagccgggatgatttgcatttgtaaacagaggggattgtgatacaataaggctgactgaaacgggggtatctcaatgacacaggagaaggcaagaaatgtcgtgctgatcaccggcatgagcggtgcagggaagacaagcgccatgaacattctggaggatatgggctatcactgcatcgataactttccggtgcagctgctctcctcgctggggaagctgatccgcgggcaggatgacagccgttatgacaatatcgcgctggcgaccaatgccgtcgattatcctcagtttctcaattattttgaaaacagcaacatgaacgtgcgcgtggtgttcctggatgccagcaatgagcagctgctgctgcgctatcgctttacccggcggcatcacccgatgctgctgttttccaaggcgagcacgctggaagatgccatcgaagtcgagcgcgatatgttcgagcggctcaatgagcgcgccgtgctgcgcatcgatacgaccaagctgagcatgcaggagctgcgcaacatcctgtttgcccgtctttcgttcaaggcgaagacggagttcacggtcagcttcatgtcgttcggcttcaagcacggggtaccgatcgatgcggatatcatcactgacgttcgttttctccctaatccctattatgtggatgagctgaaaaacaagacaggagatgatcaggaagtgtacgactatgtcatgaagtttgacgagaccaaggaattctgccgccgtctgcatgactatatcgattttgtgctgaaagaatatgcgaaacagaagcgcagccacctgacgatcgcagtgggatgcacaggcgggcatcaccgcagcgtgaccatcgccaactggctgtatggattatacaaggaccgctatcagtgcttcctctcgcaccgggacagcaaggtgtaggccatgaagaacgtcgtgatcatcggcggaggcaccgggctctccgtcatgctgaggggcatgaaatcaattccggacatcgggctgaacgccatcgtgaccgtggcggatgacggcgggagcaccggacggctgcgggacagctatcagatcccggccatgggggacatccgcaatgtcatgtgcgccatggccgaggaggaaagcatcttcaccgaactgatgaactaccgcttcaaaggcggcggagacatcggcgggcacaatctgggcaatctgctgctgctggcgctctcggagacgaccggcagcttcatggaggcgatccgtaccttttcccgcgtcctgaaggtccgcggcaagatcctgccttccaccctggaggtggtgacgctgtatgccgtgatggaagacggcaccatcgtgcgcggggagaagaacatccccaagttccgcaaccacatcgaccgggtgttctatcagcggcatatccgggccacgcaggaagccctgcaggccatacgggatgcggacctcatcatctatggcatcggttcgctgtataccagcatcatgccgaatctcatcatcgatgagatccgcaacgagctcatcgccaacccgtgccgcaaggtctatttctgcaatgcgatgagccagccgggagagaccgacgagtattcggtggaggatcatgtggacgccatctgccgccatgcgtttgcggacgcggtggacatcgtcgtcaagcagaacaatacgttttccacggagacgctggaacgctatcgggcggaaggcagcgcgccggtggagctgaaggaagaacggcaccgctatctggtgctggaacgggatctgatgcaggagggaagcctgctgatccgccatgacccgcagaaggtgcgcgccgtggtggaagagatcctgcgcatgcagtaaggtgggggaacatgtcatttacagcggaagtcaagacgcagatctgcgcggccgaatggggcgaatgctgtgcgcgggcacagctgtccagcgtgatgaagatgtgctcgacgatgaacctgagcgcgcaggggatccatctgcgcgtgcagtgcgagcatgccaatacggccaagcgcatatggaagctgctcaaggagcgctaccaggtggagccgcagctgtcggtattgcgcaaggtgcgcctgaagaagaacaacatctatgtgatccgggtccatgagcgggccatggagatcttgaaggatctggagatctgcacggacaaaggactgcagccgcgccccagcgcgaagatggtgcgcaaggactgctgcgcgcaggcatatctcgccggcgcctttctggctggcgggagcgtcaatgcgccgaccacctcgaattatcatctggagatcagcacgagcgatcaggagctggcggaattcctctgccggctcatgaaccgcttttatctgccggccaagatcatccagcggcgggcccagcatgtcgtctatctgaaggcgagcgacaagatcgccgatttcctgcgcatgtgcaaggcagatgaagcattgctggaatttgaggataccaggatccagcgcgatttttacaattcgctgacgcgtttggacaactgtgagctggccaatgagatgaagagcatatccgcggccaggaagcagctggaggatatcgcctggatcgagaactatcgttcgctggacacgctgcccgaacggctccagcatgtcatcgaggtgcgccgggcttacccggaagcgagcatgaacgagctgtgcgagctgtgcgcagagcgcttcggggaaaatatctccaagtcgggcatgaagcatcgtctggccaagatccgcgagatcgccgcacagtatcgcagcgacgctgaataaagaatggaaagcagtgaagaatagagacgggtgataagatgaaactgatcatgatcctcgccgcttcgctgcttccttttttgcatgagacgcgctatccggcggaagtgaagggctgtgatgcacagggcgtcacgctcagcgctgaaggcgagctgtttcacgcggagctgttcaatgtgacttatgccgaggagggtggctggcagggtgcctgcgccatattggcagaagcg

SEQ ID NO: 2390 - DNA, 6044 bp, Unknown
  16S sequences of unknown bacteria
gggagggattccgccgtagtcggcattgtaggaaaatccaaaagtttagattttcccacaatgcttatcttttggtctttggttcggaatagtgtagtgctggcggtctatctcttgttttcggttgcttgcttccttaccgtacatgagcattgttccaggagttgattcataatccggtaaatttccagttttgctccgacatcaataccccgggtgggctcatcaaaaatcacgaccttggagttgcttgccagccactttgcaatgacaaccttctgctgatttccgccgctcaaatttcgcaccgctcgatgcaaatccggtgttttgatagacagcttttcaatatactgttcagcgatctgagaagcttttttccgactcaaaaacagtcctttgcgcaatgcgggcaagatgggcagtgcgatattatcccgaacgctcatgatcccaaccaggccttccagcttcctgtcttccgggatgagagcaatcccatttcgaatggcatctttggtagaccggattttaacagtctgcccctgaatttcgacctctccgctgtcaatcggtcgggctccaaatatggcttttgccatttccgtgcgtttagctccgactaacccaaaaatacccagcacctcaccgcgacggacttccaaattgatgtcaaaaagttccccctttcgattcagatgcttcaccttcaaaatggtatcccctggcagcgctttatggacaggatacttttcttccagttttcgccctaccatcaactgcaccagcgtatccatatcaattgtggagagctgacaggtctgcacaaagcatccgtcccgcatcaccgttacacggtccccgatctcaaaaatctcctccatgcgatgcgagatatagacaatgcaggttccctgactctttagctgacggatcagggaaaaaagggtctggatttcactttctcccaacgaggatgttggttcatccataactatgacccgtgcattagtgcttaatgccttggcaatctctaccatctgcttgtgggctacactcagctgattcaccggtagatttactggaatgtttgcttgcagtgtcccgtttaaaattcggtcggcttcttcctccattttctttcgattgatgagtccgggaatcccatggtgcaggaattcccgtcccataaaaatattttcggctactgttacattttcagccatcaacaattcctgatgaatcataacgatgccgttttgacgagctgaatgcggagaggtaatcttaaccggttttccgtctattgcaatactgccgctgtcagcctgataacttccgcataggattttcatgagggtggactttcctgcaccgttttctcccatcaaaacatggacttctcctgcattgagagagatttgggcatcttgcaatgccttgactcctggaaatgtcttatgaattccctccatccgcaccaatacggaattcttttgtgtatgcactgcaatcctcctctcctaccgttgttcctgcgagctccgaagggtatcgataacaacagcaatcacaatgactgctccaatagcaacatcctgccaaaaggaggatactttcataagattcaagctgttgttcagaatgcctgtaatcagaactccgcaaagaacaccggacgcctttcctcgtccaccagtcagagaaactccgccgattacggcagcaccaattgcctggaaatgatatccgctgcccaacgaggcatgtccggaaatcgttcgggaagccagcatcattccagccactccgactagtgcaccttcagctgcgaaagcgagcactttgtaaagcttcgcgttgattccactggctataacagcttcttcacgtccgccgatctcatacaagcgaagtccgaagcgagttttattcaggacaaaggaaatcaaaacaaacgccgctgccataatccagaacagatagggaatcccgcacaggctgcctgctccaatttgtaaaaaatctgcaggcaatccggcaacctgtgctccatccgtcagaatgtaggccgttcccgaaaaaaccatgccggtgccaagcgttactacaaatgggtgaatttcagactttacaacaattccgccattgatggcaccgcacacaattcccagcacaatggccgtcagcatccccagaagaacgctgtccgtcatcagtacaacactgcatccgatacaggaagtcaatccgatgatcgagccgagagaaagatcaatatttccggtcagaatcaccagtgtggtagcaattgccaaaacaccattaatggaaatctgtcgaatcacattggtcagattatcagttgtaaaaaaagtaggattttgaatctgcgtaaaaaacgccataaagagaatgactagtggaagaactccgaattttttcaaaactttcttcatatttcatactccttgtggcaacaggaccgttcgtccaagcgccccgccgcattttagccgctccagagcttcattgatgttctcaatcggcatcacatcaaacacatacggatcgatgatcccctgattgacaagcgtaattgcttcttttaaattatccggatttgaagcacgaacccctacaatctccttttcattcatcatgatatcctgatagttggcgtaaaaattcgtgtcaacataccctacaacaatgacacgtccgcccggacgcacaagatccaatgccgtttgaatcgaagatgcaattccgatattgtcaaaaactacatcgcacatttcgccgtccgttaaatctcgaattttctcaaccaggctttctctctttgaattcaagcagtaatgcgcaccaaatttagaggccagctcaagtttggaatcctgccttgaagtgcagtaaacctctgcgccgtaatgaatagcaagctgaatcccttgcaggcccaatcctccaattcccaaaaaacacatccggtcacccactctgcagctggcctgatccttaacggcatgtagcatgcagctcactgcatccggaataacagccgctttttcccatggcatcgttggtcctatgggatagagattcttctctggcacaaccacatactgcgcatgtgatccatcccgttcaaatccaattcgtctcaaattttggcacagattcgggcgtccggaacgacaatagcggcaaattccgcatgtaatgtcgatagaagaaacaactcgctcacctgtctgtagccgggtacatccctctccaacttcttccacgacccccgccatttcatgtcccggaatgtgcggaagaggtacagatttaatttttccttcctgaatatgaatatctgatccacacaatccggaagccatcacctttaccagtacttcctgcggcccaggcttgggcatcggaacatcttcaatcaccaacggctgataaaactgctttaaaactgccgctttcatatgtgctcccccatttctccgatcattcccatgtacagcagcggctgcaactctgtacaaaacagtgtctgaaatctcgtttgctgaaacgggaactaccccgatattctcggaatagctcccgtgtcataacatgaatggtgcttattcagggattacaataccagacaaatccagagttccgatatcagccgcagtgaccgcctgtaccggagcataaattttcgtctcataaggttctccgcggataatggaaagcatggtctgcagtccaatccgtccgatggtaacaggctgttgcgcacaagcagcgtcaatggttccctctgtaatcatcgtgcgcgtatccggattggaacagtcaatcgtgacaactttaatatctcgtccgctggcttcaatggcactggcaatcggaatcgcacatgtatcagaccaagagaacagtccatgtacatccggatatgtctgcaggtaatcctcaatggcgctggcagcctgtgccgcgtctgcagcagtaaagtcctcgtagataatattgatatctggatactgcgattcaatttgttcacggaatgcataaccccgggcggtcaacgcattgccggcgttggcgtttactaaaatcacattcccctgattgccaatcaattccgccagcagatctgcacacattgcacccatctcggtatcatcagaacgaacctgggcataaatgttttcacagttggacatgttgttgacattgattaccgggattccgttgtcaatggcttcctgctctgcagcaacaactgcatccgcatctgcagcagcgacaataattccgtcataaccagccgcaataaagtcttgaatttgattgatctgcgtctcgacattctcatatccgccagcatttagaatggtgacttctactccctgtaaagctgcctcatcttcaaacccccactgcatgttgacgaaatgtactgctttcaatgtaggaagcgtgacaccaattttgatggaatccttcccggaatcagaagcaccgcctccgtcttccgaggtgtttccaccgcacgcggaaaggaccaggatcatggaaagtgacaaaattaacgttgcaatcttttgcagtgcctctttcattgtagttcttcctccttgttttgcattctgttcccaaaactacagcacactcttacatcagtgcaatgacgcgagtcgggctcccttctccgccgacgatcttaaggggcaatgcgatggcaaagaattctttgcctactacccgactcagatttgtcaagtgctccacctgcaatgcaccctgtcccaaaacatgctcatgtgcaaggaaattttttcggaatgttttgaatcccttggcgccagcgtcctggaagaaatcatatccgagcattttggcccctttttcttttaccagccaatccgctgcggaagtgcttagtacgggagaattgttccagtattccaaagtcccgaacattctttcactccatccggtatacagaaacactaccatgccaggttgaattcgatcttcatatggcagcagcatttctacggtaacttcttcattttcttttgcctgagacacatctacacagattccctttccaataaaggtatccattgaaatttcatccagcgtcttgccatcggggtagatatggcgtggtgtatcaagatgcgttccagcatgaatcggtgtagaaaggtgcccaacctgaagtccctgttcctctgctctgctataaagtttgaattccacaggcggcagtgttgcccgcagtcccgttggaatatccatcccgcttgtgattggcaaagttagatcaattacttcacaatactcaaatttcatccattgtcattcccttcattgtttgattcacactgtacaaagaatgctccacctgaagatatgtcgattataattcaattgattttttattcaatacttccgtaaaatgatatgatgaattctgatattgttgttaatattgcacaatgttgctgtgtgggcaattcagactgcaacacatattatgcttggaaactatgaaatctttgggtttgagaaaataccccgtgaaagattccactcttgagttttataaaattcatccgctgaatcattgataaagcaactttgttatgaaagaatttgcgtatacagcctgtccattttctctcccaatacatgtgtttttaagcctgtacagtgctgtttgcatcaggcgtgcggcctggaaggtcaagctccttttatccaaaactaggaatcagaatgccgcctataatgaacggcgggataccggtttggtatcccgccgctgtgcgccgtatctttataaaatgatacagatcaagccgccgctgccctcgttgatgattcgagtgagggtttcctggagctttttccgggcatcgtcgggcatccgcttaagctttgcctgcagatcctcgctgaccagctcatggaagctgcggccaaagatattggactgccagatcttgctggtatccccctcgaactcctggagc

SEQ ID NO: 2391 - DNA, 10869 bp, Unknown
  16S sequences of unknown bacteria
cgcagatggaaattcaggcaagttatgtggtacagttatttgcagtatgatgtactagcttcgctacttgctcatgaacgcatccctctcaccctccgcttagtgctctgcgcacttgaggcggaggaatgcttatctgcgttcacacaacagaaaagacagctgccggaaacaagttcctgcagctgtcttctgtcgctctatacagcttgctgctttcgcaactattatttcagagtaacctttgcgccctctgcctcgagctttgtcttcagctcctcagcctcagccttggatgcgccctccttaactaccttcggagcgccgtcaactacttccttagcttccttcaggccaagaccagttgcctcacgaacaaccttgataaccttaaccttgttcgggccaacctcagtcagctctacatcgaactcagtcttctcttcagcttcctcagctgcgccagcacctgctgctgctactacaacgcctgctgctgcagatacgccaaactcttcctcacatgcctttaccagctcgttgagctcaagtacggataactctttgattgcttcaataaactcagctgttgtcaactttgccatttctttttcctcctgatatttttggtgaaatttcactgttttatgcggctatgccgctttgttccttaagtggaacacaaatgtctcccggcagcttcttactctgctgcgccttcggtcttggactctgcgatctgattgagtacgcgagcaagattcgtgatcggagactggatgcttccaagcagttttccgagaagttcttctcttgacggaacgtttgccagagcagcaacgcccttctcgtcatagtaattgccttctacaacaccagcgatcatcttcagtgtcggagctttcttcgcatacttggaaatgattcttgccggagcagtcgcatcatcttttgaaatagcgattgcattcggcccttccagatgcttggaaagcggctcgcagtctgtatccttgaatgcgaaattcatcattgtgttcttgtataccttgtaggtaataccagcctcacgcagctccttacgaagtgcggtgtcagcctccacagtaattccgcaatagctaaccagaacaacagcctgtgcgtctttgatgttctcagaaatctcagcaacaaccggtttcttcagttcaacttttgccatgaatggtgcacctccttatagatttgagtgtaccgccgtataacaggaatgataaaaacccctctgcgcacagaggggtagtcaaattcttccttagaatcttatactcctcggcaggcgttttctccttatgccttacggcacctgctgtcttcggcagtcatctaaaataagataacacacgaccatacttctgtcaagtgttttctctgtttattttaaaaaaagcgcaccgtagcgcatcctcgcagtgcgcctttgctttgcggaacgcttctgtaatgtaaaaagatccccgaagcgcgcaccttcggggatctggcattgcatattaattaagcaagcttaacaggattcagctttacgcccggtcccatcgtcggagcgatcgttacgctcttcagatactgaccctttacagctgccggcttcgccttgttaattgcttcaataagcgtctggaagttgtccgttaactgctcctcagtgaaagaagcttttccaattggcacatgaatgatgttggtcttgtccaatctgtattcaatcttaccagccttgatatcgttgacagccttcgttacatccatagtaacggtacctgccttcgggttcggcatcaggcccttcggtccaaggatacggcccagacgtcctacaacgcccatcatgtccggtgtagctactactacgtcgaaatcaagccatccctcgttctggatcttcggaatcagctcctcagctcctacgaactcagcgccagcagcctttgcttcgtcagcctttgcattcttagcgaatacaagtacgcgaacctgcttaccggtaccatgcggaagaacgacagcgccacggatctgctgatctgcatgacgtccgtcacagcctgttctgatatgaacttcgattgtctcatcaaacttagctactgctgcttttttaacaagtgcaacagcttcatttacatcgtagagcgctgcgcggtcgatcgcttttgcagcctcaacgtatttctttcctcttttcatattaaataacctcctggtggtattcgcgggaataaccctcccacttgttcaattcttactcttcaaccgtgatacccatgctgcgtgcggtacctgcgatcatgctcatagctgcctcgatgctgcctgcgttcaggtccggcatcttcatctctgcgatctctcttaccttgtccttggagatggtagctacctttgtcttgttcggaactccggaaccagacttcaggttgcaagccttcttcagcagaactgctgcaggcggagtctttgtgatgaagctgaagcttctgtctgcgtaaaccgtgataactaccggaatgatcaggtcgcccttatcagcggttcttgcattaaactcttttgtgaactgaacaatattaacaccatgctgaccaagagccggtccaactggtggtgctggtgttgctttgccagcaggaatctgtaatttaatataacctgttaccttttttgccatgtcaggcacctcctatgtggtaatgtcgggagtcctccctcccacgtccagcggccaatgccgtggataacgacttgttacatgatttggaatccgacgcgctcacgccttgcggatctcagaaaaactgatctctaccggtgtttcacgaccgaacagctcgacattgattgtaacgatctgcttgctctcgttgatagactggatcacaccgacggtatctttccatacgccgctgatcaccgtaaccatatctccctcggcaaactcgacggaaatgttgtctgcctggatacccaggttaaacatctctgtgtcagtaagcggtaccggcttggatcccggtccaacaaatcccgtgacacctcttgtgtttctgacaacataccaggtatcatcgttcataatcatgttgagaagcacatagcccggaaacatcttcttctgaactgttttcttgacaccgtttttcacttctacaacatcctgaagaggcacacgtacttccagtatctggtcttccagatgccggttctcgattgtcttctcgatgttggcctttaccttgttctcatacccggaataggtatgcactacataccagcatgcttctgccatacaatcacctttgccctcactcatttagaaactgatattcaccagaatgtcgatgccgtactggaaaataaaatccagaactgcaatcatcactccaagcacgatagaaacggcaacgacggcaccagtctgctttaccagcgacttgcggtccggccatatgatcttcttgaattcagctttcaggccgtcaaaccagctctttttagagctcttctctgctttctctgccataattcccacttcctttgcacgaatccatcgaaattatttcgtttctttgtgtaatgtgtgtctcttgcagaaacgacagtacttcttcgtttccattctgtccggatgagtcttcttatccttcgtcatgttgtaattacgctgcttacattctgtacatgccaatgtgattctaacgcgcacaacttccacctcgctttcctattttctttgtgtcaacagtaaaactgcgttttttgttttaggcacaaaaaaaaagcctgcttccatacgctcgttcaatataccacacgagcccctgtatcgtcaagctttttttctgttctgcaaatctataaataccgaatttcaaaccttgcctttccgctctccccgtactccatcaacgcatagctcggcctgcggccctcctggcgcgggaaggataagctgcccggattcagcacggtcagctccgggtcattttcatcaagcaatggtcgatgcgtatgcccgaacattgcgatatcacagccattcgcctttgcctcctctgccagatcccggataccgacgcttacatagtgataatgtccgtgtgtaatcaggatccggtggcatccaagctcgacaatctgcgcctttgcaagccttgagaaaaaatcacagtttccggccaccatataaaccggacaagtgacgagcatgggaatcgtatcctccccaccctccgagtccccgagatgaatcagcgcatccggcatgccgatctctgcaagaacccgctccagattctcttcccgcccgtgggtatcactcacaatcagtgctcttttcatccttttgcctccggttccttctctggttttgcaaataaaccctgcagttcttttcgcattgcccgcaacgcttttccgcgatggctcacttcatttttctgctccggtgtaatctccgccgatgtgcagccaaattccggaagataaaaaatcgggtcatatccaaagccgttctcaccacggatctcttgcgcaattatcccctccataacaccacgcgttgtaatcgtatggccgtccggaaatgcgcatgcgatcgcacagacaaaccgggccgtgcgcttctcttccggcaccccggctagcttctccacaagcgctgtgttcttgatcgtataacacgtatcctctcccataaaacgcgccgaataaatgcccggtgccccatcaagataatcaatctccagtccggagtcatccgcaagtacgagatcgccatctgcagtcagatcccggatcgcctctgccttaatcacagcattctcttcaaagctttttccattctccacgatatcagctgcaatgccagcctctttcattgagagtaccggaatgccgagttctccgagaatcatccgcacctctttcatctttccggcatttccggtcgcaaatatgattctatgctccatgtttccctccgttgattcttttgtctgtttttaacatattcaaatacttttcgtaaaatgcgtattacacagcagcgtgcaaattacagaaataatttttccgtcacaccctggtataagccttcagacagatattcgctccaaatgttttttctgtatgaatccagctttctccgtcgctgctgagatagccatatttcccatccgtcgtcaccgttgccgtatgcgcatccgaatgatattccgccgccaccggaaatcggctccccggcgtacggatctttaccatcacataaaatgcttcccctttcgaaagcgctattgccttttccagatccactgtataatagcctgcctcctgaacactcccggcctgcagcagcgttcgttcctcccggccatttgatccgtccggctggaaataaatctcataagttgtgtccgttcctgtcgcataaaagccgaccgccgccaaaagctctgcttcttctgcctcatagcggttggcaaaccagcacatttcttttccatatccgaggctgccttgccagccgcacgggtctgtctgataaatccggtcataattatctgtcggttcaattctcgtataggcaattgcctgcccggcaatcgtcgcatctgcatatgagacatagaaaagtccatcatttccaaaggagccgccccagctgttctgacacacccacgcaccatcctcttccggtatatcccggaataaaaaacgggaaaccgtatcatcccagccgaccagaatcacatcatggctcggatcttcggctgtcggatattcatacgcagaaaaatatgcgttgtaatatggttgatcctctgctgtcgtcgcacgactcatatataaggaagtctgcactgcgccgtacgtctgaatcgccttttttaatttttcccgtggcgcatcctcatacagccgcatttcctgcacatgtaccgccggaagcagtccatccggcgaatatgcgtccccatatgcatccgcttcctccggcaccggcccctgccagccggcaagataggccatcgccatccgataatctccgccgtcgtttaaagttacagaaaatgcattattcagcgccatgtgatccgcggaaaaaatcacatgcgttttcggcagcagcgatgcctccagcgcagacgtcgccgccagcgcccagcaggtgccatatccgccctggctcttgaccaccggccttcgtccatcctctgccgagcagtattttgatggcaatccctgcaaaagctctgaaatttcagcctgagccgcagcagaaggcaacacagccaacagcagccccgccaaaaaccatgcagaatatttttgtttcatgcctcaggctttctcctcatttctgcgcttcggcgggcgcggtcccaaaaactgataatagtaagtcttaatcataccattgtaaatcttccgattcttgtccgcctttttcccgatatatttttctgcctgatcgtaagaagtgatcacatattccgaccatgagtcaagccgtgaaaacgcccgcccgatctccgtatacagcgccggaagatttgcacgctcctcaattcgttctccatacggagggtttgtgataataaaaccgtattttttcggatggttcagctctgaaactcctcgctgctgaaaatgaatcagatgatccacacctgccagtctggcattttcccgcgctgccttgatcacctcgccatcgatatcatagccctgaatatccgtctcaacggtatcatcaacgagatcctgcgcttcctcgaccgcattgtaccagttcctgcgcggcacaagattcttccagttctctgcaaggaagctccggttcatacccggtgcaatattggctgccatcatggccgcctcgattggaaacgtgccgcttccgcaaaacggatcgaccagaatccggtctgccttccacggtgtcagcataatcagtgccgaagccagtgtctctgagatcggcgctttggctgtcagcttccgatatccccgcttgtgtaaggactctccagtcgtatccagtccgatcaccgcctcatccttcataaagcaaatccggatcggatagtgagcaccgtcctcacggaaccactctgtcccgtaaaccgtcttcaggcgttctacgatcgctttctttacaattgactggatatccgacgggctgaaaagcttactttttacggacgtcgccttcgtcacccagaattttgcatcctgcggcaaatagtcctcccacggcaatgtccgcgtccgctcaaaaagctcgtcaaacgtctccgcgtggatcgcaccgaccttcagcagaatacgttctgcactgcgcagaaacatattcgagaccgcaattgcctctgcgtccccgtagaacgtcacccgcccgtcttccacacagctgatctcatatccaagatcctgaatctcccgtttcagcaccgcctccagaccaaagtggcacggtgccatcagctccatctgcgcgctcatagctgcactccctttaccgcttcgccatcaaaggtgcagatccggaacagtccgtcctcaagtgtcgcataggtcggcggattgccttccttcgggattgacgtggaacccggattcaaaatcagaagcccgtctttttcctcagcccgaaggacatgcgtatgtccatgcagcagaacatcacccggcttcagcggcggaagatggttctcattgtatacatgtccgtgtgtcgcatagatcgcccgctctcccgcaaacagtatcatataatctgccaataccggaaactgcagcaccatctgatccacttctgcctcacagttgccgcggatggcatagatctcatttttcttttcgttcagcatgcggatcacttctttgggcgcatactccttcggaagatcatttctcggaccgtggtaaagaatgtctccgagcagaagcatcctctgcgccccctccttctcatatgcttccagcatttttctgcagtaatatgcagatccatgaatatctgatgcgattaaaagcttcatgttctcctccttttgtactctctcgttctttttatcttaatgcgtgcgctttgtttttgtcaatccttattctcgccccgtcacaatctgtgtcccgcggtacgcatgaaacccgcccacaacgcttttcacccgatatccctgctccgaaagtcttctcccgacagccatgctcatggctccacggtcgcagtaaagcacaatcgtcctttcgcgttccggccatccgtccgcgaactgccccatcggagcatttaccgccccgcgcatgtgccctgactgatattcttccgacgacctcagatcgaccacaagcgcattctcatcctgcgcgtatgcatccagcagttttgccggaactgtctccagcatatcttagcctccttacagccgggcattctctccccggtattatatagtattcgccatcctgcttacggtcattcacacgcgcaaactctgttctgctatacatctttttatcccgccgatctgctgacatatatatcgcggatgataaagcaaacaaagagaagcgaccggcaggggagctgtcggtcgcttcgaggggagtataaataattaataaggggtttgtaaaaaaaactatttgaagggtaagtttttttacactaggaattataatacagtttccagaaaattgcaacacataaattgcaagtatcatttgccgtatacttttccgaattcacggaatactactacggtaacggtaagcgaccggcattccggcgctcgccgaaaattattttcaggaggcaatcgctatgacaaaaaacgcaacttccaaaactacttccaaagcatccaattcaacctctgcaaggcagagcacctcagaacgcacgacatccgaaaagacgaatgccagccagtctctccacggtgccaaaagctacggaaagacaagagactgtcacaacacctgtgaagaagacgagcagtaaactgcaaaggattttaaaaatcgcagagcgtttttgtgttacaggacacaatttcctgtaacacaaagagggcggtatgctttcacataccgccctcttttatcgccttttatactgccatcagccgtagatctgctcctgcagcttctgcagcgtctcttcccagtacggaacaagcatatcctgaccatttacataaataacatcatacatatcgtcatacgggatccgtacctgctcaaacttatagtcaagcatctccggaagctctgtcaccatgctccatatctccgtctccggaatattcatcgtcacgtgctccagaatcgcctgcattttctctgtgagctgtgctacactcagctgcttcgcctctgccatcagctgagtcaatacatagcgctgacgctgtgtacgctcaaaatcagagttgccgacatagcggtttcgtgcataagcaaccgcctgtacaccatcacaatgtaccataccgccctctgccggaagctgatgctctgacggatcgatattcagctgacgctcgcacatatcattgatatatccatttgcgacctctgcctctttggccgtgatctccagatctacgccgccgatgatatcgatgatatccaccagagaccagaagtctaccgcaacataacggtctacctgaacacggaaggtatccgtcaccgtctggcagagcagcggacctgctccgtatgcataagccgcattcagcttcgcatagccaacaccgtcgatatcgacatacgtatcacgcatcagagaaatcatagacacatgatttttcgctttattaatagaaacaaggatcatcgcgtcagaattaccattccacgtcttatcctgacggtctactccgacgagcaatacattgtaaatatcatcatctgattttgtctccagcttcagattcttcatctgatcctgaatattgctcagctcatccttatctacagaacgtccggtacgctcttctgtgctgagagtctcttcgattgctgcatccggaagcgtctcaaccgtctttacgtcgtcatccgccacataattcacgctgctgtacagatcatgtccgagcttataaatgacaccaccgctgataaacacaattccgagcacaatacaaaagctgattgcaaagacttttttcatattcatccccggctttttatttcccgagccgtttctcccattcatcggatttgaatggtcctctctgtttcttggcatcctggattccctcctgcatttgttccttcttttcaaccttggatacattcatagagttcaccgactgcaaaatcttataccagccagcatactacttcctacaatgtacctgtatttccggtaaatgtcaaacgaattttttataaagtctggcacaccattttctgcttccgcacaattaaataccccgctgtaaacagcggagtattaagaccctgtcgaccggccttacagcagaactgtcaggatgcgccgcagggatgcctcgcagaaaaatatgccctttcaggcacggcttcaagcttactacgctatactaaaattgtcaatacaggactttcaggaatatccttagaaatttgcaggcatttcgccgtaaaaaaccagaaaaatagcagacctctgaaaataaaccggtctacaccacatggcaggaacactcatttccgggaaagaaaaaacgtgataactagcacttctgctaatcatcacgtcttatcctgtatgcggaagatgggacttgaacccacacgagcgcaatgctcacaagatcctta

SEQ ID NO: 2392 - DNA, 32759 bp, Unknown
  16S sequences of unknown bacteria
gcttatatatagcattttttcaataagcaaaaacagagagcttcatccccatacaactctcttacattttataaaagctgccgcaccgctgaatttcttcagctcatgcggcagctcctttttatgtcatacagacatctattgctatttaagcttttccgttagatccaagaacgttaacgatcttatgagcaaccatatctttaacagcctgacgagccggtttcagatactgtctcgggtcaaagtgatccggatgctcagccatgtattttctgatgttaccagtcatagcaagacggatatcggagtcgatgttgatcttacatacagcaagctcagctgcttttctcagctgctcttccggaataccaactgcatccggcatatttccgccgtactggttaaccatctttacgaactcctgcggtacagaagaagatccgtgaagaacgattgggaactccggcagtctcttcatgcactcttcaagtacgtcaaaacgcagtggtggcggaacaaggattccgtcagcatttcttgtacactgatccggagtgaatttgtaagcaccgtgagaggttccgattgcgattgcaagagagtcgcatccagttctgtcaacgaactcctcaacctcttccggacgagtgtagctctcatgaccagcttcaacaacaacttcatcctcgataccagccagagtaccaagctcagcctctactactacgccgtgagcatgtgcatactcaacaacctgttttgtcagagcgatgttgtcctcgaaagatttggaggaagcatcgatcataacggaagtaaatccgccatcgatacaggatttgcaaagctcgaagctgtcaccatgatccaggtgaagtgcgatcgggatctccgggttctcaataactgctgcctctaccagttttacaaggtaggtatggttagcataagctctggctcctttggatacctgaaggataaccgggctcttcagctctccagctgcttcagtgattccctgaacgatttccatgttgtttacgttgaacgcaccaactgcataaccgccatgataagcctttttaaacatctcagtggttgtaactaatgccattgttttttcttcctttctttgacatttttttgacacaaaagtgcctatatccgtatattactacatttctgtaaaatcaacaagcagattttctaaaattattcagattgtaccgcattctcctcgatcaggctgatcactttctcctggacaatttcttcacggatcatttcttcgctgtacagactcacaatatcatcggtattctcataattgtactgcttggccagttcattaagacgatcctcatattcctgatcactgacggtgattccttcctgctgtgcaatctcatgaaacaccagtgtcatctttacacggaactccgcggttgtacggaaaaattctctaagctgtgcctctgtggttctaagatatgtgctcaggtaatcgtccagttccatattggctgctgcagcatagctctcatattccgacatcatctgatctacgtacagatctttatcactctcttcgatctggaattcacttccattcagaacctcctggatcagatcatactcccagttggaagttgcatctgactgtgcagtactctccagatcattacggatggaattttccatgtcttcctgactctcataatcagtgttctgcttcacatactcgtcattccagacagaagtatcatatgcctgtactttgcttacatgaacttcaaaacgagcctcttttccagctacttcctcataatattcatccggaaataccacattgacttccacatcatcctctgcatttaccccgatcaactgatcttcaaatccaggaatgaaagttccgcttcccagctccagctgcgtgtctgttcctttcagattatcagagctctctccatccacatacccggtaaaatcaatggtaagcacatctccctcttctgccggacgatccacatctttcagctccagatactgtttctcgttatcccatacctctttggccacatcttcgtctgtcacttctgccgtatcacggctcacttccagacctttgtactgtccaagcgatataagcttgctgctcagatcttcatagagcaccggctcgtagctgaccgttgcttccgttgcttccgttgcttccgttgcttccgttgcttccgttgcttccgcttcttcctgtccgtcatctgtttttgcagtttcgtttttatttccgcagcctgacagagccagaactgcagctatacacattgcaagtattacttttttcttcattctttatacctcatttttcaaacatatatttactcattctatctgtcacaatgtcctttgtcaagctgacacaatccccgtttcttccttgcattttagctaaaacaatgctacaatgagacgagaaattgttgcaggagggaacgaaagacacaatggtatggaaagtattattggtcattgctgtcattctggttattgttctggttgctctgtattatttcggacgtaagctcgaaaaaagacaggccgaaggacaggcacagttagatgctgctgcccagacagtcagtatgttgatcattgacaagaaaaaacttcgcatgaaagaatccggtcttccgcagatggtgattgatcagacaccatggtatctgcgcagatccaagatgccgatcgtaaaggccaagattggtccgaagattatgacccttgtagctgacggagctgtatatgatctgcttccggtgaaaaaggaagttaaagtcgtagtcagcggcatctacatcaccgccattaagagtgccagaggcggacttgaaaagccacagccgaaaaaaggcttcttcaaaagacttttcaacaaataagacacgaaccctataagaaaggctgcaggagcttacgaaacgtaaacctgcagcctttcttttccttattatactttgaaccggtagcctactccccagattgtttcgatatactgaggcttggctgtattgaactcaatcttctcacggatcttcttaatatgcaccgttacggtcgcaatatctccaatagactccatatcccagatcttgctgaacagttcttcctttgtaaatacatgattcggattctgtgcaagaaatgtgagcagatcaaactctttagaggtgaatgctttctcttcgccattgacccacacccgtctggccgtcttatcaatcttgatgccgcggatctcaatgatctcattttcctgcacaccgcttcctaccagacgctcataccgggccatatgcgcctttacacgcgctaccagttcactgggactgaagggctttgtcatataatcgtctgctccaagaccaagacctcgaatcttgtcaatatcgtccttcttagctgataccatgatcaccggaatatttttctcctggcggatctggcgacagatctcgaatccatccattcctggcagcatcagatccagaatgatcaggtcaaaatcctctgccagtgctctggtaagtccggtatctcctcgctcttctatctccacggtgaagccgctcagttccagataatctttctcaagatctgcaatcgcctcttcatcttcaataatcaaaattttactcatttacgggtacctcctgaaattttctaagcacaaaatacatggtcgttcccaatccttcccggctggtcgcccacacttttccaccatggtcttccatgatcttgtgaacgattgacaggccaatgccgcttcctcctttggaagaatttctggatgtatctgtcctgtaaaaacggtcgaaaatgtacggcagatcttttgccgagattccgcgtccgttatcttcgatctcaacctggacaaaatcccccacatccaatacccggatctgaatggatttttccggcttatccatatatttcacagaatttcctacaatattattgactacacgtttgatctgctccgcatcggcgatcaccatcaccgtgtcatccaccttattctcatatttaaggtcgatctgctgctgactcagctccagaccaatatcctcaaagcagtcatcaaaataatccttcacgttgatcttattaaatgtatacggaatccggttcgtatcgatcttacaataaaatgtcagctcattgatcagccgatccatatcatttgccttattataaatggtccgcaaatatttctgctgcttttccggtgtgtctgccactccgtccagcaggccttccacatatcctttgaccgctgtgattggtgtcttcaggtcatgggaaatattactgatcagctctttattctgactgtcgaaagagactttttcttctgtagattccttcaatcggagacgcatctcctcaaagtctgcacacaactcaccgatctcatcgttgtcttcgatctccacctcaaaatccagattaccatcacggatattctgcgttgctttcttcaatgtctcaataggacttaaaatactccggtaaatccatgccatcagaaagctgcaggtcatagccatgatcaagatgaccgagatcagcatctcccctaaaaattccttcgtctgcggggtcaccacctctgcaggctgcaaactcataaaaccaacaaatacaatggaaatcaaaaatagcggcactgcgatcaccactgcaaatgtaacgatcaattttgtcttcagattcactgtttttcctccatatactgaaccagctaaaagaaattataccatatatcgtgagcattatttataaactttttgtaaaagagatgaatttatcagaaaccccttgacatttccagcattacagtgtaggttatagtccgtagaaaagtccatatagaagatttctcttattcagagcggtggagatacataggatctgtgaaacccggcaacccctgtatagcaggaaggtgctaacctgagcgagcattcgaacaataagaggatttgaaccataacttcaagtccgcttacaagagcggacttttctaatgtaatcatttcacacttacacatttttgaaaggagctactaatggcaaaagagaaaattcttttcacttctgaatctgtaactgaaggacatccggacaagatctgtgaccagatttccgatgctatccttgacgctcttatggcacaggaccccatgagccgtgttgcatgcgagacaagcacaaccaccggtctggtacttgttatgggtgagatcaccacccagggatatgtagatatccagaagatcgtccgtgacaccatccgcgagatcggatataccagaggaaaatatggctttgatgctgacaactgtgcagtgatcaccgcaatcgatgagcagtccacagacattgctatgggtgttgacaaggctctggaagctaaagagcatctgatggatgacagccagctggaagcaattggtgctggagaccagggtatgatgtttggttatgcaaccaacgagactccggagctgatgccgtatgccatctctctggctcacaaactggccaagagactgaccgacgttcgtaaagatggtactcttccgtatcttcgtccggacggaaagactcaggttactgttgaatatgatgagaacggcaaaccgatccgtctggaggcagttgttctgtccactcagcatagtgaagaagtatctcaggaacagatccatgaggatatcaagaaatatgtcttcgatccgatccttccagctgacatggtagatgcagacaccaagttcttcatcaacccgactggccgtttcgttatcggaggaccgcacggagacagtggtctgaccggacgtaagatcatcgtagacacctatggtggatatgcccgtcacggcggcggagcattctccggaaaagactgcaccaaggtagatcgttctgcagcttatgcagcacgttacgcagcaaagaacatcgttgcagcaggacttgctgacaagtgtgagatccagctctcctatgctatcggtgttgcaagaccgacttccgtcagagttgataccttcggaaccggcaagctgtccgatactgaactggtagagatcgttcgcgaaaacttcgatctgcgaccagcaggaatcatcaagatgcttgatctgcgccgtccgatctacaaacagaccgcagcttacggacactttggccgcaccgatgtagagcttccgtgggagaataccgacaaagctgaagacctgaagaaatatctgaaataaaaattatactgggattaggggatttcacatgaaaaaactatttaacagtctgccattccgtctattggccggtgttgttatcggaattctggtcggactcatggcaaacgaagcttttatgaacatcattgtcactgtaaaacagctgctcggtgaactgatcaccttctgtgttccgctgatcgtgatcggatttatcgcaccatccatcacgcgccttgggaaaaatgcttcccgcatgctgatggtcgcgctgatccttgcctacgtatcttctgtaggtgcagctttcgtgagcatggttgccggattcaatatcattccgcacctttccatcgtatccactgctgaaggattgaaggaactgccggaagtaatctttgaactgagtattccgcagatcatgagtgttatgagtgcactggtcttctctgttctggtcggccttgctgttacatggaccaaagcagaccgcactgctgaactgctggaagaattccagaagatcgtattagagatcgtgacccgcgtgatcattccgatcctgccggtatttatcgcctgcactttctgtgctctttcttatgaaggaaccattaccagacagcttccggtcttcctgaaagttatcatcatcgttatgatcggacattacctgtggatgactctgctgtatctgatcgccggtgcatattctggaaagaatccgctggaggttgtgaaacactatggtccggcttatattactgctgttggaaccatgtcttctgcagcaactcttgcagttgcccttcgctgtgcgggaaaatcttctgtattgagaaaagatatggttgactttggcattccgctgtttgcaaatgtgcatctgtgcggatctgttctgactgaagtattcttcgttatgacggtatctcagattctgtacggctctatgccgtcactgggaactatgatcctgttctgtgtactgcttggcatctttgccatcggagctccaggtgttccaggcggaacggttatggcctctctgggactgatcactggtatcctgttgttcaacgacaccggtaccgctctgatgctgaccatcttcgctctgcaggacagcttcggtactgcatgtaacgtgaccggagatggtgctctgaccctgatcctgaccggatacgcagaccaccatggcatcactgagaaatccaaaaacgagtaatctacataaaaatcccatacagtcagctcttttaatgctgtctgtatgggatttttttactgtatgattatttttgcatctccaaccgctgtatctctcatcggttgaaaccccttcgtttccatttcggaatgtaactttttctgatgtcatttatttttttctgtttgcatgaattttgcaatatattttctgttcccgtcaaccaactttcagacggaacttctgaatctctttttcacttgctaccttctcgatctttgcacccagaccacgcagcttttcatccagattctcatatccacgctcaatataatagatatcgtccacgatagtgatgccttctgcagccagtcctgcgatcaccagtgccgcacctgcacgcagatccggtgcgctgactcttgcacccgtgaacttctccacaccactgatcactgccacattaccttctaccttaatagaagctcccatacgtgccaactcatctacataacgaaatctattttcaaaaatactctctgtcacgatgctggttccctcagccagtgccagtgttaccgcaatctgcggctgcatatctgtcgggaatcccggatatggcatggtctttacgtgagttccctgcagcttgccgattgctctcacacgaactgcatcatcatactcggtgacctcacatccaagttctgtcagctttgcactggttgcttccagatgcttcgggatcacattatgaagtacaacatctccgccagtcactgctgcagcaaacataaaggttcctgcctcaatctgatccggaataatggaatattcggtcttgtgaagggattttacaccacggatacggatcacatctgtacccgctcccttgatacttgctcccatactgttcaggaagtttgccacatctaccacatgaggctcttttgccgcattttcaatgatcgtattgccatccgccatcgctgctgccatcataatattgatggttgcacctacactgaccatatcaagaaaaatgtgtgctccatgaagctcttcagcctctgcaatgataaatccatgctcaatcctggtcactgcacccatggccttaaagcctttcagatgctgatcgatcggacggcttccaatattacagcctcccggcagcggcacttccgcacgcttatattttccaagcagtgcacccagcagataataggatgcacggatcttcttcatgctttcattttctacaatacagttttccacaccagatccattgatctccaccgcatgacggtttacacgcttgacatgcgcaccgatttcatccagtgcttccaataatgcattgatatcacgcacatccggaagattatctatatatactgtctcatctgtcatacttgcagccgcaagaatagccagagccgcattctttgcgcctccgatctccacatctccagccaggggaataccgccttttataacatactgttccacgtttacacctcgttcacaacgattcaaaagtcattatctcattctattaacagattgctccgaaagagcttatcttattctcgttttcataaaacatgccgattcctgcatatctaagctattatagcttatagccaccgaaaaagcaactaacacaatgtcaaaaaatcattgactttagcgtccttcacaggtaattttttatttcaaagcattgcttgataatcactctctgtaaaacgatgataaatagtatgtcccatctccatatggatacaataataatattcgtctatggacggatctttgaagtggatcgcgtaatcaaaatcggatccctccggcatcttctcgcacacgtattcatggccatggttttcaaacacctggcagatctcttccaatgtgcatgcgtgatgctcctgaaataactgaatcaggtcttttagaaatgcaggtgtctccacttgctcatgcacccactgggaaccttccggcggaatgctgatctccacacggcccgcatggctgtgaaaatgaagttctccaagagatgacttctcttcaaatgctttccgcagaagtgtcagcatctcctgctcatcctttgcattacttccaaggatcgtattcagggaatccaccggatagtagagacgaacggtctcttttgcatatcccagcttcagctgtgcctctttcacctgatctgtcatattttttaaaagtttttctctattcatcgacttcatactcctgtcttccgctggtttaattatgaaggatggaggagtaaatgtcaaatactacgtccggatcagagggttttattgaggacatccatcgtccctctgatggtgccgggctccgtcatatgaaatggatccagaaggctgtccatttgctctttatccaacaggttttcctgcagaatcagatcccggacggaggcaccggtctttatggccttctttgcaatatcggcagctttctgatagccgacatacgggcagatggctgtgatgatgcccacactgttttcaaccagatagcggcagcgtgtctcatttgccgtaatgcctgtaacacagttttccacaaaagtatgcaccgcataagccaatgtatcaatcgactgaaacatacaataaaacacgataggttcaaatgcattcagttccagctgccctgcctctgctgccatagtaatcgtcacatcgttgccgatgatattaaaagcgacctgattaactacttcaggaataacaggatttatttttccaggcataatggacgacccgttttgttttgcaggaagattaatctctgccagaccagcccgtggtccagaagacatcagacgcaagtcatttgcaatttttgaaagtgtcacagcacatgctttcacggcaccagataccgctacaaagacatccagattctgcgtagcatcgatcaggtcatatgcctgcgccagatccatatcggatacttcagacagaattggaacaatccgatgcaggtaagcctcatctgcattcagaccggttcccactgcggttcctcccagatttaatgtacgcatttctcccatggccttttccatccggtgaatatcccgcatgatggcaacagaatatgcacgaaattcctgtcccagacgaataggaaccgcatcctgaagctgcgtacgacccattttaatgacatcgttgaattcctctgcttttttgcacaaagcaccgtgcagctgtaaaagttcatgtttcagatttttcagaagacgtaacgaagtcatcttgcctgccgtaggaatcacatcgtttgtcgattgactgcagtttacatcatcatttggattgatgatgctgtaatcacctttgtttccacccaggagttcaatggcgcgattggcaatgacttcattggcattcatattaagggatgttccagcaccaccctggatcgggtccacgataaaatcttcccggaatttacctgccagaatctcatcgcaagcctgcacaatcgcctgagcttttctcttttccagcattccaacttcacagttggtgatagcggcagctttcttaatataagccagactgttaatgatctctggatgcattctcagtccggtaatatgaaaattctctgcggcacgcagggactgcacaccataataaacatcacctggaatatcccttgttccaatggaatccttttcaatcctatagtcttcaacttttgtttctttcattgccaatgcctctctttattttaaaaatttattcctgcactggaagaatccttccttattgcattcagtatacctacgtgctactatataatcaaatacatatatttatatagaatatatagctttcaaactatactttaggagcgtgataaagatgtttcaaggaatggaatatgtttacgaggtatataaagaacgaagtttttccaaggcagccgcaaacctgtttatttcccagccatctttaagtgccaatgtaaaacggatcgagaaaaaaattggttatccaatctttgaccggagcacaaaaccattgggacttacggaatgtggacggcattatattgatgctgtggaacacattatgcaggtagaaaacggatttcatgattttgtaaatgattggagcaatctgaaaaccggacagttgatcttaggcggcagcagcttcttttcctcctgggtgcttcctccactgatcggagaattttcaagaaaatatcctttggtcaagccccttttactggaagaaaacacggcaacattggctcaatatcttcaaagcggacgtatggattttttattggacaattgtgaacttgatccttctatttttgaccgctatgtctatcagaaggagcatctgttgctggctgttcctgaatatctgcctgtgaatgaatccttacgtgcgtatcaggttccaacttccagtataaagaacagaacctttttaaagatgaatatccctgcagtttctttacaggctttcaccaatgagacatttatttttatgaagcaggaaaatgacacaggaaagcgagctgcacgcatatgtcaggaacatcattttcacccgcgagtcctgtttgaattagaccagcaaatgacttcatacaatgtcacctgttcaggcatgggaatttcctttataggtgatctgctgatctccctggttccgccgaatccgaatgtcgtttattatcgactggatgaaaaagacagcttgcgtaatatttatttctactggaaaaaaggacgttacataagccataccatgagtgcatttttagatttattatcctcttttgataatttgatctgatttttgtaacatatgctacatctgatttctttttatgtggtataatacagacaaatgaaaacgcacagccggaaaggagctattcttatgaaaatcacaaacgatatcagatatgtaggtgtcaatgaccatcaggtcgatctgtttgagggacagtatgttgtacctaatggcatgtcctataattcttatgtgatccttgatgaaaaagtcgctgttatggataccgtcgatgctcatttcacccatgagtggctggacaacatcacatccgtacttggtgaccgtcatccggattatctgatcatccagcatatggagccggaccacgcagcaaatatcgccaacttcatggacgtatatagagatactaccatcgtatccagcaaaaaagcatttgctatgatggcacagttcttcggaaccgattacccggatcgccagattattgtaaaagaaggagattctttaactcttggcaagcatactctggcgtttgtggaagctccgatggtacactggccggaagtaatcgttacttatgatacctgtgacaaagtactgttctctgcagacggatttggaaaattcggtgctcttgatgtggaggagccgtgggatgatgagtcccgtcgttacttcatcggtatcgttggaaaatacggcaaacaggtgcagaatctgctgaaaaaagcagcaactctggatattcagactatctgtcctctgcacggaccagtactgactgaaaaccttggacattacttaagcctgtacaatacctggtcctcctatcagccggaatctgagggaatcgtaatcgcttacacttctgtatatggtcacaccaagcaggccgtggaagcactggctgaccagttccgttccaatggatgcccgaaagttgttgttcatgatctggcaagatgcgacatgtctctggcaatcgcagatgccttccgttacaacaagctggtactggcaaccacgacctacaacgcagacctttatccgttcatgcgcgattacatccatcgcctgaccgagcgcaatttccagaaccgtaaagttgccctgattgaaaatggatcctgggctccgctggctgcaaaagttatgaaaaatatgtttgaaggcagcaaacagatcgcctgggcaaacaccaccgttcatatcaaatctgctctcagcgacgaaagccgcgcagagctgaacgcactggtagaagaattctgtcaggattatattgctcagcacagtgagactgccaacaaaaatgacttaagtgctctgttcaacattggttacggactctatgtggtaacctccaacgatggacgccgtgacaatggtctgatcgtaaacaccgtatctcaggtaaccaatactccgaaccggatcgcagtgaccatcaacaaggcaaactactcccaccatgtgatcaagcagactggtatcatgaacctgaactgcctgtccacggaagcaccgtttgacatcttccagacctttggattccagagcggaagaaccgttgataagtttgcaggtgctggcatccagccgctgtactctgacaacggacttgctttcctgccaaaatacattaactccttcatgtcgctgaaagtagagcagtacattgacatggacacccacggaatgttcatctgcagcattaccgagtcccgcgtgatctccaaagtcgagaccatgacctacaactactatcagaacaatgtaaaaccaaagccggcaacggaaggcaagaaaggattcgtatgcaaggtgtgcggatatatttacgagggtgatgagcttccggaagatttcatctgcccgctctgcaaacatggtgtggctgactttgaaccgattgagggctagatctatcctgttgtaattttttcagattttgcccgtataattttctcatctttgtgcagtattttctgtattaagtgttataatgcagttgtaacaaataaaagacctacttaacggacacattttcatatgcctgctaagctgatcagttttttggaggaatagataaatggatactttaaaagctgaaaagagaagcatggaaacaaaagcaaaaagactgagaagagaaggatatgtaaccggtaatgtcttcggacatgacatcgaaggttccattcctgttaagatcacaaaggccgaagctgatcgtcttctgaagaagaaaaagaaaggcagtcagattatgctggatctggaaggacagcaatacgatgtactgatcaaggagatcgactttaatactctgaagggtcaggcaatcgagatggatttccaggcactggtcaaaggtgaaaaagttcactctgttgcagaggtcgtacttgtaaaccatgagaaagtccagtccggtgtagttgaacagaagctggaagagatcgcatataaagcactgccggaagctctggttgagaccgttgaagttgatttgagcggactcaaagccggtgatgttgttaaggttaaagatcttgcaatcgctgctgataaagatgtggtacttgttaccgatccggaagcagtcgttgtaactgtaaccgttccgcataacgctccgattccggagaccgatgcagaggaagctgaagaggctgaaaaataaatatggtctgaagttgaagaggctgtcgcgattgcgacagcctcttttgggttggtattaaatatagtattgggctaatattgtaaatattttagcttatctgcatatccattttttataaatttttctatatgttcctgaaagactgatccctacagcaattccaagtgcatacttcaatgtcagaactccctgcgcaattgcttcatgcatattttcctgtacaatcgcactcatggtatagtacaatcctccacctggaattaatggaaatacaagaagtgttatataaatgccaggcatgctctttcgtttttttgacataaattctgcatatatttctataaatacagaggctgctacgcaggaaataaacatataaccagtctcatataacagcaatctgtaaataatccagacaatttcactgcccacacatatatccaaaattaattttttttgcaatctaaatacaaaagaaaaacctaaaacaccaaagaaaattcctgtcaattcctgtgccatcttcatatgccagtcaaccatatggcagccataaacccacaagccagggccccagcccaccaaatactttctatcaatcttagcaggcctgaaattgtatctcccacaatcatatctcgcatagcactggtgattgtcaatcccgggatcaataacatgatatcacctatcatgattttatctgccgcaaaaccaggaatttcttgtgtaatcaggcaaatcccgattccacttaaaaaggaaatcgtcaggttaaaaacaacctgattcaaacaccagacagacaactttttctgaaagaaacatataaatataccaaaagcagcagaaacaatcgcatcttttatgtttccaccaaaaaacacagtaaaaccagctgcacccaacatacttccaggatattcaaaaggattttctttcaccttatccaattctgccagttctgaccagagctgttccattgacagatttccttcgcagacttgtttcatcagtcttcctattcgctctcgcgattccaaattatttcctgtatgtctgtatattctccgcgtatgagttaccagctggccatcggccagctccagtgtcacagaaatagaagaggtgatcacaaatacattagtatgcagaattccgtatgcatggccaagccgctgcagcatatcctctatccggctcacctcagcgcccgcaaccagcatacgttctcccacatccaacatcagacaaggcaatagctttaccgttttatcggacgtctcacattccatttttaccatttatctaattgagtgttattccattgtattgacgcaatgcaagttccttgtctctgtaaatcgctccgcccatgactgctgcgtaaatatttctatcttccagttctttccatatttcgtaggttacatttccatccagccacaccggaaccccataggtatccgcgatttcttccgctgtcttttccatggaatattgaaatctgcgctccgggtctccgacccggtttgtaaccacgactacctgtccggaaagctttagcaactttttcaacgtttccggatcccgatccagatccagattggaaatggagatacctgtcggaatgccctccgccagatacgcttccagcacctcacagggatgttccagatgatttaaggccagaaagacaatatctgccttacattttttcacccgttccagatactttaacggctccagcacgctcagatgaagcgaccgatacgcgtccttccatttttcgcagacttcctggcataccttcattcccattgtaatattgggaacaatggtgccgtcttcaatatcaatatgaatctgcccgaaatggcgggccgcaaaaaccgtttcttcttccagatgtaacaagtccgaggatgcaatcgaaggactaatcagcactatttatcacctctcgctgcctttgcgcgctccatcagtgcctttacacgctccggatctaccgcgttaaagaactttccatcgtattttacgctggttgccacaattgctccgtctgccacagagagaatctcttctacagtctctgcctttacgccgttggaagcaaataccggtgtgtccgtcacctctttgatggtacttacctgctctacatcaatagaagagcccggcgtagtactatataccagcatggtatccggattcaggttaaaggccagtgtcttggcaacctctttaagcggacgctctgccagctgtctggttccctccggaataactgctgtcattgttttgcagttcatcaggccaagctccgcgcgatgacgctcaatcgcccccggatccagattgctgattccatacactcctgcatgtgctccatgcaaaatttcacggataaaatctgcctccactgctgcggcaagatcaaagcccttcatagcatcagaagctacgcagacacccattggtactttgatttctgacttcaattccccaataatacgagccatgcatgcaattgttaccggctttacatctgatgtatagggaatgctgaactcattgcagaacagaattccgtcaattccgccctcctgatatgccttcagatccgcacgagctgcttccaggactccctgaacgcctgtagcagcatcaaacttcggatctgtcgggagcgcatgcatatgcagcacaccaataatcggcttatctgttccaaaaacttctttcatccacataattaattttctcctccatctgtcagaaatttttcttttaaaagagtttccagttccgtcagggacgccgcgtccatctccttcagtgcgttgtcatccttcaaataccggattactcttgctataatttcaacatgctcactatcatccagcaaagcaagattcagcacgtatttcacttctacctgaacatctggatcatccattcggcaaaacattactggatgttgcagacgcaacgcacaaatagcctgttctttcacatggtcttttgttgtatgcggaatagctaccggacagttttctgtcagtcctgtcgggtattcttcttcacgctttttacagcactcataaaaatcatcctttacgcagccttcctccagaagtctgtttgctgtcaactgcagagcttcctgccagctttctgcctttccttctatcacaaacaacttactcatttactatgatccctttctgctccgaactgtcattttttacttttgttgtctgagtcattctgatcttttttctttttatctgctgcagaagctccgctttatcttcttctgaaaagatattcggtatctgagccacacatcgtttcactcctttataataaaacttaatcgctgtctccgggctccattccacccgttccagtttttgaaacaaaatgtgtttttcattgagaaggccatcatgaaattctatctcctgccctgtgacaatcagtctgcaaaaacggggacgaaaaagattacacacagcaagtcccgccacaaaaacatatatcaggatatcatacagcggattcgcgtaatgccagggttttaccaccagaaccgcggcaaacaccagcacatagaaaatacccaccgccttatatgtgcgctttttcttttcgctcatctgataaattttcatctgaccttctcctttttttacgttattaccaaactttcaggaactttccgagtattcctaccagcacgcagttaaactcggctgcattacttccagaaaccatcgtagcagttgaggaaataaatccggctccaaacgcaagttccgttacaatcggagccatccaggtattgatataggttttgtatacaacaaccgcaatggaagctatcagagctttgaacatatcgccgttcgcatacattgcgcaggcacaggtgatatagaccatagaacccagagttgacagcgggaacatatgtacacctggcaggaatgcaatcaggatggcaatcggaatcataatacctaccagctggatacccatctcatcgcccaggcagagtgcctcatccataccgatgtaaatctcgtaatcgtcgcccagcttcttcttgaagtactttctggcatccttggacagcggcagaagtccttccatcagaagtcctactaccttcggcatcagaataatagctgctgccagagttacggaaagtgtcagtgttccggaaacgctctgcttggtcagtacagacagaatcagacctaccgtaaatgccataatagaggactcaccaaaggaaccaaacttctcagaaaaccagtttacattcagatgaatcttattgataccgggaatcttatccagaaccttgcataccacccagtcaatagccagaatataaatcatatcatggttacagcaggtagtacccggaagattataaaccttctgccattttgccgcaattttatctgcaaataccagtacaaccacaacggtaagaagtccgaatacggtcgcaatgatgtaagccggtacctttgccattcccgcaatggtcaatacatagtacagcatagacgcgcccagtaccatatggaaatagttccacacatcaatatccatggtcttggtgaaccgtaccttaatcaggacatagttcagaatcattcccaacggcacaatcaaaagagcaaacgatgtggaccatgcaactgcggccaaaccttcccatccaatatctacgattgtgaatccagctccatctccatactgcgcataataatcaatcgccggctgcagaccggaaatcagcatgttcaaaataacattgataccaaggaatccagcgcctacacgaagaccatttcttaaagcatcaaacggtttctgtttgaagataattccaaggattaaaattgtaaacggcaagaacactccgccacccaaatccattacaaactggacaattgcattaataatactcattctttttccccctactctgcactcaatgctttcagtttttctacaatcagttcaatcgtttcatcttctccgatgcctgtgatcaaaccattaactccgacgatttctgttccgacttcttttgaaaactttgttgttgtaaaacagatatcgaaatctttggcaatggcctccacatcctgcagcggggattttgaaatacttaccggaatcttatgctccttcgcgattttcgcaatctccgtcgccgcaaaggtggatgtggcaatacctcctccgcaggcaaccagaactctcagctctttcataatcattctctcctttcttctgttattttccgcgtttcagcttatgcctattataagcacatgaatatccaataaaaagtcaaaaacttttcggtttcgtgaaatgatttgtacttgcatttcatgtattcctttattatcttattaatatacaaggaggcaaaattatggattcacttacaaatactatgttaaagcagattattcagctgaataaatcctttatcccggctgaagatcttatctcttttctgtctgtaagcgatcggactgtttataattactggaaaaaaatcgaaaaatttcttcaggattatcatattgaacattttctttcctatgacgggaaaggttttgtattctccagaaataacaggcaatgcaagacgattgcaactattatttcccatatggatttctatgaatatcacctgaactctgaagaacgtccttgggtaatccttgtctatctctgtgcagcaaacgaacctatcacaatcaaaaacctggaagatatcctgtccatgagccgcaccaccataatcaatgccttacattccgttcgcggtcttattgaggaaactgacttggtctttgaggaaaacactcattatggagtttccctaaccggtactgaatacgaacgtcgtgaactgattttccgaactgcagaagccttgcatgtcatggatgactggcatctgaaagaacaatctttcaatcctttcgtcaacctgttttcagaactttttcatatgaatcgctacgaaaacaaagtacgtaccgccattcggcatatgacagatgaactgaacctgcagctcagcgacagaaaattttatcgcttgcagtttatcctctgtgttcttcttgaccggattgaaaactatcccgtatttatccctaacgagatagaagagcctgtccagcaaaaaatgctggctggcacgctgcttcaacagttcaaaaatcatatcacaccagacatccaggagacctgctatctggcctgcagacttcagcagcttcacatctctaatctggatatttccggtgagatcaatgaaacatatattaatatggtggttatccacctgttgcaatgtctggaagtacactataaaactactctcactacggattccatgctgacacagtatctctgcgcccacattaccgcttgttatcggcgtttaaaacagtcagagcatatcagcaatcctcttctgacagatatgcagcaaaactatagaaaggacttcgatatcttaaaagaacatatttttattctggaaaattctctgaatattgcgttgaacaacgatgaaatcgcctatattctgatgcatatccttgcagccttggaacgtcagaaaaccgattcctatattccggttcttgtagtcgcctgcaattccggtatggccaccggaaatcttctggcagcattgattcgaaaacattttcatgtacggattgctgccatatgtcagatgcagaatctagaagaaacggtagcagcccatcatgccgatctggttgtcgctactatttcaactacgtttcatgctgtgcgcacgctggtcgtaaacgcaatccccactaaggaggatctgacagatttacagaatgccattacccttctgcaggagactcatatgaatacctcttttccagaacagactttcttagaagtcaaagactgcgctgattctgtacctttatcttcactgattgatgaggattccatccttcttgacagcagtgctggcacttggaaagaagcaattatcgcagccggtgagttgcttctctggaaacgatgcattacggttaattatctgaatagcatgctaaatctgattaaccagtacggaccatacattgtcatcacaaaaggaattgccttggctcatgctactccatcagacggtcatctaaaagctggtttttccatggtgcgtctaaaaaaacctgttatttttggtcatgctgacaacgatcctgtatctgtagtcttcagttttactgtaccggataaacctgcctacacctccaccatcctccatttcatgcatgcgatccgaaaccctgattttctcactcgcattatgaaatgtaagactcccgatgaaacgttgaatgaaatccttacctgctgtcaggattcctgaactcaaaaaggtacttggatccgactgtcaactgctctaatcctgcccactggtcgttagacctattttcagtggaatcttaaaaggcagtactttgaaatcaaagcttctggagaagtatgttttgtaattgtacttaaaaaggtgatactgctaaatcacttattttatgatttagcagcatcatcttttccttgctcactaactcaagcgataaaattgtttcaagtttttccgtcaatatactaatttcgcgatcatcaaataacaatgaaaatacataggattctttgtaatcataataagacctccatgtatcgcaatactttcggtttcacccggagttgttctgcatactgcatcaatctgtgaatattcttatctttggatgcagcataacgtttcatggcatcccttataatctgaacatcactgccactgccgcgtaaaatatcgcacaacgtccgttccagatcatatacatatatgggatttcctgatgaggattttatttcaatttttccaaattcataattttccggcaccactcgtatcacgcatagattttcctgcttttgtcacttcttctgccgtaatcgtaccatctatggattctttcagtaattgttcaattcgttctttctgcgtcactttttcatccccagccttatatcaacccatgttccacacagtaataatagattccatcttccgccacatgtccgcaatggtctgtggcaattgctttcaatttttctgatgcattttccatggcaacgcccgtgcccactgccaggaacatctcaacgtcattatttccatccccgaatgccagtgcctgagatcggtcaaacccataatacttcaacacctttgcaatacccgttcctttcccgccggtggcagggataatatcaactgccctgtcccaccaggaagtgatcttggctccatgaacaccatccaggatcgttgaaaaatccgactctctgcagctcatcagcagctgataaacagttccctgtgatacacgatcaaagtcatctgaaataatcaccgtctgcttgccaaatgcataatactgatccagatcctcatcggttccattggagatcaactgatctttggtggcaaccgataccgggcgtcccagcacctccgcattctgaatcattttctgcacatctgcctgctccagcggattgctgtagatgatctccttctggttgaagcagtaggatccattgtatgtaaggatcgcatcaaactcaaccccttcaaaagtcggcactgccataggcgctcttcctgtagcaatacagatgataatccctttttcctttaaacgtctcaatgtctccagcatcttcggtgtgactttttttgtatctacgtcgatcaatgttccgtctatgtcaaaaaatatgattttaatatttttcatgttcatctcccgttgttcctgttttcatatgttaatgttattttattataaaaaattctgctttactgatataattgcgccagttattataagaatcgcgactttcatttaaaactgaggcagctgctgatctgctgtatgttcaccgatcagcttctccatccagaccatgtcataccatctgtgaaacttatagccacattggtggaactgccccaccatacggtatcccagatgggcatggaactccacactgttccgggtcaggtattcatcctcctgcgccggataggcaatgcaggcattcatattcaaaaagcctcgattcctcagttcttcttccagtgcttcatgaagttttttaccaatccccatgcgttttttattctgatccacatagatggaagtctccaccgcccagtcataggccgggcgatcatggaacggtcccacgtaagcatagcctactggctcttcaccctgttccgccaccaaataaggatactttttcagcgtattgtgaatccgttcacggaattcctccacggtcggaacttcatactcaaatgtgatggctgtctgctccacataaggcgcatagattgccaataatttttctgcatcttctggcttcgcaggacgaatcctgatctttaaatccattttactcatccttttctgttcaatttatcagtcttactgagatctccgtaacatattgatcgatttccttttcagtcagtccatccaccaggtatcgttccagatacattccatcaacacctaaattttgttcctgctgatattcctttagtcttttatatgcttccccaatatttctccaatgacccacatggtaagctgtcagataatctcccgccttaagaatctgacacgaaagttttcttggacgcttgtccaacagaagcacggcattgtcatatttatgataagctccgcattctacattttctgcatgctgcatatatgctacttcataatcactgcagaactgtgggtttacatcgagaaactgtgtgagcagctcattttcttttttataaatcgcttcttctgtcccctccggaacctcacgatatacataataacgttctgaaagcttttgaacatgcacaagattccaatccatctgataggccaactgcattttctgccgatgttttctgatccattctttcatgtttctcagtttcacaagttccttctgaatctgctgttccctgtcctgaaatatctgcatcatcttgtccagactgcgctcttctaatgtgaattttatttctttcaaaggcatccccagatccctgagcagcagaatcgtattcaatacttccatctgataaatcgcatagtagcgataaccgttttccttcacgatctccggctgaaataatccaatttcgtcataatgaaaaagtgtctctttggtgatacccatcaatctggcaagttcacccgtcgtcatatacattttctgttccatatccagatatccttcaattttttcttgactatagggttaccctatacaatatactatccactgttgacttagcatcaagtagtttccgaaaggagtttatcatatgagtacatccatcaaccgcaatttttccccttgggatctgttaaaattcgcggcaccttctatcatcatgatggtatttatgtccctgtatactattgtggacggtatgttcatctcccgctttgtagggagcaatgctctgtcctctcttaacattgtatttccggtgatcaatgttgcaattgccatctccaccatgctcggtaccggtggcaatgcgatcatcagcaaatatttaggcgaatgcagagacgaagatgccaggaaagctctgacccagttcactgtcctgtgtcttggcttcagctttcttctgatgctgctgtccctgccaaaccttacactgatctcccgttttcttggttccagtgaaattctgctggaagactgccggatctatcttggtgtgtccatgctctttgcaccggctgccatgctgcagggattatttcagtcctactttgtgacggctggaaaacccagccttgggctttggcttatggtcggtgccggtattttcaacgtggtttttgattatgtactgatcgttccctgtcagatggggatcgcaggtgctgcccttgccaccggaatcggtcagtgtatcccggcacttttcggactttttttcttcctgtgttccaaagacgagctgcatttttgcaagtttacttttcatatgaaagaaatattatctgcctgctacaatggttcgtcggaaatggtctctcagctggccaatgcgatcattacttatctgttcaacatcatcatgatgcagctggtaggtgaacatggtgttgctgccatcactattttactctatggacagtttctgttcaatgcattttatcttggatttaccatcgggatcagtccgatcgtcggattccagtatggtgccggagacaaacagaagcttcgcaatatttaccatacctctttcttatttgttgctgtctcttcggtgttcatggcggtgatcgccattgttctgtctccgaccattgttacgatctttactgatgatccggcaacttatgaactggctgctgcaggcttccgtctgttcgccatcaatttcctgttcagcggcatcagcattacatcttctggattctttacagccctgtccaacggaaccatctccgccgtgatctctttttgcaggaccttaggatttatcgttctgtcgcttctgatcctgccgaagtttttagggatcacaggcgcgtggatcgccattccagtggcagagttctgtaccctgctggtaaccggtgtcatgcactttttgtacttctggaaaccgggcattcgaaactatctgtggtgatccgcatgattgccatcagaatcgcatactgttataatgaatggtgccgagagcaatcgccctgcggcatcatcttttttcaaaaggagctgattttctatgagcattatgaatacatataccgggaagaaatttgatcctcttcagatgaagcctgaagatgtggatctggtagatattgcccacgcattaagccttctgtgccggggtggcggacacattgaccacttctataccgttgctcttcattccattaactgcgccaacgaagcaaaggcccgcggctgggaacgaaaactcattcttgcatgtctcttgcatgatgccagcgaggcttatattgcagatattatccgcccggtaaagccgtatcttaccaattatctggagattgaagatcagatcatgtctgtgatctggcagcattttcagcttgaactgacaccggaagaacataaaaaatggaagcagatcgatgacgagatcctggattccgagttaaaagaaatgttttccggagaagcagaaaggattcctgttccactcagatccacgccggatttcagcgaacgtccacatggggaagtggaagaagaatttatcagaattgctgaagaactgctgaattgatccccccgaaccgcccaaaaaaccaggacatcactgccctggtttttgtttcaatgtttatttatcctcatcaagaaatgcgagtaaagatgactctttcggaacagatcatcctgaaatctccacagtaagaataaaatcaccacaacagccacaacaattccaatgagcagccactgcatagaggaaagcatgctgatattaaagcagcggatattgatccacatctgattgatgttggcatttccttcatcatcaaaatacagcataactgcgcttcgatcgatctcttcttgggacggatactgggcagataactggcgatgagcctgctccgctggagcggtgattacataatcttcattctcgttatccccaacaaagaaataacccagcggatattcaatggtatcttcctcatcatcctctgcaccataagtccagtccgcatattcaaagatcagcggactgtctccgcctgcaatagccgatgtatagccgatgtaatacatatttctgactgcgctgtccgggcgggacaggaagttgataaatgcctccgccgcctgtttcttggcagcgtcttccccgatgccgctcttcagcatcacccagccatcaaaccacaggttggtacactcctccggcacggcccagtccagataaaaatcgtcatcctctgcctgatccatggtatacacgccatctcctgaccactgcaggttggcaactactttcccggtgatcatatctgcttttccactgtcagtctcgaaggaatacacattctgacgaatttctttcagcttctgttctgactcatcaatggtctccttacgggtgtcattcataatcgcggacaactgttcgtgataatcacttctgtttctgagtccggtactgttcagcagatttttattgagaattgccagcgttgggaagtaagcatctcgcacattatccttgatggttacctgacggtagaatttctcattttccagaatactccaggtagaagcctcctcttccgtcacctcctccgggttgtacaccataccggtgattccccacatataaccagccgcataatcagaccacggctctccatcgatctcattttcatgaaacacaccgtcaatataaggagacacaccctttacatagtaattattttcattggagtcatcaaaaaactcatcggataagggctccagcttattttctttcataagcttcatgatcatgtagtccgacgggcacaccagatcatactcatttccaagatttaactggctgtacagctcttcattggttccgaaggtagaatactctactttcacaggaactccataagtctcgtaataccactcttcaaaatcggataccagtgaattttctccgaagatatcttcgcttggaagatcgatcagttcatcatcctcccagccgccttcatcaatgtattcctcccagttgcatacccggagaacaacaggtttttccatatcttttgcagctgccattgtggtcagcggagctgcaaacgttccaacgattacggaaagccccgtccccactgcgaacgcacggaccgtcagattcttataacgtctatctctcattttccgcacctgcctttctgtcagccagaagattccatgcaagcacgcctgctacgatcactacaaagatcagtgtcgacaatgcccacagtgcagtcttgatctctgtgtgagcacccttggtggcatttaccacataagtactgatcgtatcgaaggtagatggcttggtataagtcgtaataaaataatcatccagtgacagggtcacggacaacataaatccggacacgatccccgggatcagctgtgggatcactactttacgaagggccaggccggcgcttgcgcccagatccagagccgcctcatagatgctgttatccatctgcttcagcttcggaagcacagacagatatacaaagggcgcttccagtaccacatgacccacgatcagcggaaagaaggaatccttgctcagtcccagcactacgatcaacagtacacagatagagaatccggtcactacttccgcattgacaaccgggatctgattggcaaaatccataaatccgcgagggccttttttactgtaaaatgctccgatggctccgatggttcccaggatcgttgcgattagcgcagagccaaatgccagcgcaaacgttccgccgatcatgctcagcagttcgccggtcgtaaacaatgttttataattctgcagcgaaaaatgcccactggttccgatggttgctgtatcggtaaagctgtatactgccaggataacaaccggcagatacataaataacagcaccagtgccagccaggaggaacgtactatttttttcatcataagaatgccccccgtgtcgtctcttcttcactgaatccattagtcgcccacgtcaccaggaaaatgatggccagaagcacaatggagatcatagaaccgctgttccagtcgtatgcatggaaatagcttccaatcagacttcccataatataggtgctgttgtacagcatatccagaatgacatagttggtcatggacggcaggaataccatggtgacaccactgatcagtcccggcatactaagaggtaatgttaccttcataaatgtaatcaccggactggctcccagatccgcagccgcctccagatagcttttatccagcttctctaatgtggtgtacagcggaaggatcataaacggcaggaaatcataggtcataccaagcactgtattcaaaaacggatgatatgccaggtttccttccaccatggtcagcacttcttttaatgcgaccacacgaagggtaaaattaatccacatgggtgcgataaaaagtaccaacagtacattctttttcttgatatcgctgcgtgccagaatgtaagctaccggataggctaccagtgtacagcaggcagtcacagtcatcgccgtcacaaggctgtataccagtgtaccaatggtattttcactggtgaaaaagtttacaaaattctgaaccgtaaactgtccctgcccattggtaaatgcataataaagtaccaccagaagcggtgcgatgacaaaacatatcaggaacactgcataggggataccaagctgttttcttgaaaaacgcatcagtcacactcctttcagttttcatctgccagagaaagttcaatgctgtccttcggaatcagcagtctgacatagtcattttcattccacagatattcatcatgaagatggaaatcaaactcatccttcgttctgacaatgtaatgataatggtcacctttataaataagagaaataatatttccgcagatgccctctccattctctgtatcatcactcattgtgatagattcaaccggaactttcacttttaccttcacgccagctgtctggatctcatctccggatgcatccaccagaacaccttctgcattgatggtagatcccggatacagtctggttacatcacagtcgtactcgccgcctgcaaattccaccatgtaattcttggtcagttcgccttcataaatattctggttcgtatctgccaggattacatggataccatccggctccagacacatcccgatggtttctccaactttagctcctctggttccctggatcaccacttcattgtctccggattctacaatgatctcataatgcattcccttaaagatcacagactgcaccacgccggtgattgttcctttttccggttctgtcatgatcacgtcctccggccggacgatcacatcaaccttagcccctgtcggcagatcatccagacactcaaactcggcaccacagaaattaacttttctgataccgctcatatgtccggtgtaaatattgctctcgccgataaagtctgccacgaatacagtattgggctcgttgtagatctcttccggtgtaccgatctgctggatctttccgtcagacataacgaccaccttgtctgacatggtcagagcctcttcctgatcatgagtcacatagataaaggtgattcccagttccttatgcatagccttcaattccagctgcatctcttttctcatcttcagatccaaagctcccagcggctcgtcaagcagaaggatctccggctcattgacaatagcacgggcaatggcaatacgctgctgctgaccgccggacagagttgcaatgctcctcttctcaaagccttccaggtcaacgatctggagtgcatgacttaccttctcacggatctcttccctggtcagcttctcctgacgggtcagagtctcccccgctgcattctgataagtaacggtcttagttttcagcttcagtccaaacgcaatattgtcaaatatattcagatgtggaaataacgcgtatcgctgaaataccgtattgatcggccgcttattaggcggcagctgactgatctcttttccattcaaaagtatctgtccctctgtcggaatatcaaatccggcgatcattcgcaatgttgtggtctttccgcatccggaaggacccagaaatgtcacaaactctccctttttcacctggagattaaagtcctttaccgcttcaaaattatcctcaaagcgcttcttgatccctttcagttcaataatgttttcaactgacatcatgtggcacccaaatcctttcatttgttatttacagtgatatttgcacacaataaaagcagagatatcaagatgacttttcgtttcttgacgtctctgccttttcgttcctatgccagtatcactaccacaaatcctagcggaaaatgataaaaatgtcaataaaatattactgattttgcaaggattttacgtgaagttcaggttgcttaaacatttctgtttttcgtcaaaaattcctgttttatattttcaattttcagttttcatgttttctgactttttaagatttcacagaaagttcacaaaaaattagcactcacctcttgacattgctagtaataggtgttatagtacggacagaacaaaggaagagggataaaaagaataaacttaaatcccgaacttgaaaggagatatgacttatgttgatgcctagcatttttacaaatacttattttaatgatttctttgaggatccgttta

SEQ ID NO: 2393 - DNA, 4835 bp, Unknown
  16S sequences of unknown bacteria
aaggctggggtaccttggcattcgctatacggtgaccggaaagctgaattttgacgtcgaggtcgacatcccggggaaattcagcgtgtacaattcactgactgcgatcgcaatctgccggcatttcaacgtagagacggagatgatccagaaagcgctgaaggcggcaaacgtaaaaggccgggtcgagaaagtaaaggtatcagacgattttacgctgatgatcgactatgcgcataatgcgatggcgctggaaagccttctgacgacgttaaaggaatatcatccaaagcggctcgtctgcctgtttggatgtggcggcaaccgctcaaagctgcgccgctatgagatgggtgaggtgtcgggacggtttgcggattttacgatcatcacgtcggacaatccgcgctatgagaagccggacgacatcatcgcagacattgtggtcggcatgaaaaagacggacgggaaatatgtgacgatcccgaatcgaaaagaggcagttgcctatgcaatccatcacgggcagccgggcgacgtcattattttagccggaaagggtcatgagacctaccaggagattgagggtaaaaagtatccgatggatgagcgtgtgctgatccgggagatacttgaagaagatcaggaaaaagccggtcggtagagcatgagggaacagaaaaatttatatgcggatatcgtcatcgatatctcgcacagccgtctggatcagagctttcagtaccggataccggagcggctacaggaagaactggagccgggaaatgtcgtgctcgtcccgtttgggcgtggcgatcatccgaaaaaagggtatgtgcttcggatcacagaccatgcagcctgtgcaccggagaagatcaaggatattctgcaggtcgagacacagctggcagggacggaatcgaagctgacggcgctggcgctctggatgcgggatcgatacggatcaacggcagtgcaggcactgcgcacggcacttccgtttcgggagcaggcaccgccgaagaaaaagcggcagcttgtgcttactgtttcgagggagaaggccaccgggcagctggcagtattccgacagaaacatcaggtcgcccgcgcacggcttctggaggcgctgatcgagacaccggttctgccgatggagcttgtgaccggcagcctgaaggtgactccatccgtatggcgcccgatggaagagatgggactgctgacctgcgagacggagcagatctaccggatgcctgcggtgctcaaggagctgcaaagtcagatgcagcagccttccgatccgaacgaatcagagcaaaatacgcttcatctgaatccatcccagcaatatgcagtcgatacgatctgtacaaactgggaaaaacaggcggggcgttacctgcttttcggggtgaccgggagcgggaaaacagccgtttatatggagttgatcgcacatgcgttgtcgaggggagagcaggcgattctgctgatcccggagatctcgctgacgtaccagaatgtgatccggttctatcatcggtttggtgaccggatctcgattctgcattcgcggctgtcacaggcagagcgctacgatcagtttgaacgggcaagaagcggggaggtcgacgtgatgatcgggccacggtctgcgttatttacaccgtttcagaggcttggcattatcattattgatgaggagcatgagccttcctataaaagtgagactgttccgcgctatcatgcgagggaggtggcacaaaagagagcggggcttgagggtgcgcagcttgtactcggctcggcaacgccgtcactggaggcttattcacaggcggaggccggcatttaccggctgctttctctgccggagcgtgcggtcggaggcagtctcccggtggttcatacagtcgatctgcggcaggaattaaagaccgggaaccgctcgattttaagcggactgctacaggaaaagctgacgaaggtgctggaggagcacaggcaggcgatgttgtttctgaaccgacgtgggtattccggattcgtatcctgccggtcgtgcggcgaggtaatgcgctgcccgcactgtgatgtgtcgctttctttgcatcggggcggcaggctggtctgccattattgtggttatgagacactgactgtgcggacctgcccgaaatgcggctccccgtttatcggaggctttcgggcgggtacacagcaaatagaggaaattgtaaaaaaagcatttccacaggcacggatcctgcggatggatgcggatacgacaaaggggaaggacggacatgcggagattctgcgggcattcggaaagcatgaggccgatattctgatcggtacgcagatgattgtaaagggacatgattttccgggcgttactctggtcggcatcctggcggcagatttatcgctgcatgtcagcgattaccgggcggcggagcggacatttcagctgttgacgcaggcagccgggagggccgggagagggctggatccaggagaggtcgtcatccagacctacgatccggagcattatgcgatcacctgtgccgccagacaggattacaccggattttatacacaggagatggcgtatcgtcggatggcgggctatccgcctgcgggcaaccttatggcggttcattgtgccgcggcagatccggacaggctttccgtggccatagagtatctggcgaaatttgtgcggcaggctgccggaaaatatcaggcgcaggtcattggtccggcagatgagccggttgcaaagatcaacgatatctatcgaaaggcaatttatataaagcacgatgagataaaaaagctgaccgcagtgaaaaatcttaccgagcaatatgtggagataaatacaggatttaaagatatccgaatacagtatgaagtaaactagtttcgggcagaaaatacaaagaaaggaaatagcaaattattttgctatttcctggatttgtattttgagatgggcggaacgccccaaattataaagtaaataaacaggaggaacaataaaatggcattaagacagatcagaattatgggtgatgagaagctggagaaggtatgcagaccggtgaaggagatcacagaccgggaacgggagctggtgcgcgacatgcttgatacgatgtatgatgcgaatggcgtcggacttgcggctccacaggtcggcattttaaaaagaattgtagttattgatatcggagaaggtccggttgtcatgattaatccggagattctcgagacatccggcgagcagaccgggcaggaaggatgcttaagccttccgggacaggccggtatcgtgacccgaccgaattacgtaaaggtgcgagcaacggatgaaaacggggaagaatatgagctggagggaacggagttgatggcacgtgcgatctgccatgagtgcgatcatctcgacggtattatgtatgtgacccgtgtggaaggtaatctgttcgatgtatccgatcagccggaagaaattgaggacgaggaatagcctcaggcaagaaaaaaagcaggagtgataagcatgataaaaaacgtagtatttatgggaacgccggattttgcggtcggtactttagaggcactcatcaattcaaaatatgaagtatccgcggtctttacccagccggacaagccaaagggacgcggaaaggcagttcagatgacgccggtaaaagaaatcgcgatggaacatgagattccggtatatcagccggtaaagatccgcgaggagcagtggatcgaggtgttaaaggatctggcgccggatgtgattgtcgttgtggcatttggtcagatcattccaaaagcgattctggagctgccaaagtatggctgtatcaatgttcatgcgtctctgctccctgcataccggggggctgctccgattcagtgggcggttattaacggtgatgagaagagtggtgtgacgacgatgcggatggatacaggactggataccggcgacatgatcctgaaggaggaagtgaccttagacaaaaaagagaccggcggaagcctgtttgataagctgagcgaggtcggggcaagactgctgatccggacactggaggaactcgaggacggaacggctcaatttgaaaaacagccggcggagagcacaaccgaatatgcggagatgctcacgaaaaagtccggcaatatcgactggaacaagagcgcggctgagattgaatgcctgattcgcggcatgaatccgtggccaagcgcgtatacggcgtggcgtggaaagactttgaaaatatgggcggcttctgtttattcgaaaaaggaaattgatgagatggcggtaccggggacggttgtcggtgtgacgaagcaggcactgctcgtacagaccggcgatggcgtgctcgcactggaggagctgcagccggagggcaagaagcgcatgccggtcgacgctttcctgcgcgggtatccgatggaagcaggagagatgatataaccgaatcaagcaagtcccctgcttcaattgcgcaaagcaataagcagtgggttgggacttgcttgtatcaggagtggtgcaagccactcctgataagctgcgaagcagcattcggttatgagcaagtagcgaagcggattgcgaatatccgcttgatggtggagagatgcgtaataatataattatagaaaaagagtgctgccgatagacggttagtccgatatatgatgtgacaaaaattgccgcctagtttaccagtgatatgataccctcaagtaggacacaaaaatataaaaacctacttgggggtatt

SEQ ID NO: 2394 - DNA, 9683 bp, Unknown
  16S sequences of unknown bacteria
accccctgcttgtaaggcaggtgctctcccagctgagctaaccttccgtactgtcctgccgcaatctttcgacctcagcgacgagtgttattatacaggcacgcagctaaaaagtcaagctttttttccaagttttttgtttttattttttctcctccaggctgcgccggagtgcgccgatctcctggggtgagaagtgatagaccttgtcacagaattggcatgtcacctccattggctcgccctcctcttcgatgctccgcagctcctcacgccccaagctgatgagggccgtacggacccgctccgcgctgcagtagcagcgatagcacaccgggtcctcttccaggaattccactgtaaagtccgccagaacggcgctgagcagcttctggggcgtcataccgccctccattgccggggtcacggcacccagcgccttgatgcccgcttcaatgcggccaatcacatcctccggcgcgccgggcaacagctggatcagatagccgcccgccaccttgaccgactggtcccggtcgatcaggacccccagggcgcaggctgtcgggatctgctcgctcgtggcgaaatacgctgtgatatcctccgcgatctcgccggagaccagcgggatcgtcccggtgtagggtgccttcatctgcaggtcacgaatgaccgtcagtgtccccgttttgccgacggcagcgccgacgtccagtttgcccttgtatttctccagcagggtgatatgcgggttctgcacatagccccggacattgccctctgcgtcagaaactgccataaccgttcccaacgggccgccgcctcgaaactgcagtgtgacagagccgttcgggaccttctgtgtatttccaatcagcgacgccgcgctcagcacccggcccagggccgccgtcgccgtcggtgtcgtctgatgcatttgccgggcctgctctaccagccccgtcgaacaaatggcggctgccttgacaaagccgtctgccgtgatggcgcggacgatataatctctcatgctacgcttccttcctcgctgtgaaatagattcgctgctcctgctggcgcggcgggatcatctgcccgtcagcataggcgcggatggccgtaaagcccgccgcacgcagggcctgctccagctccgccggggtataggcgtactgctgatgctcctcaaagctgcgcacccagacctcgccccggcgctcaaacagatcgacgccgtaatagcagatgcgcgcctgctcgtcaaactccgtccgccagacgcagtagtcgtcctccgtctcgtccagaaatacctggccatccagcgcccgcagcttttccggcgtgttgatatcgaaaataaacatgccacccggcttcaggcattcggccacatggcgcatcatgccggcgcagtccgccgggtccaggatgtaattgacactgtccagcatacaaacaatccagtccaccggctccggcagctccagtttgcacatatcctggcagacgaaatacggtggattctccatctgcatggccttctccgccgcctgggtcagcatctcctccgagaggtctacgccatagacccggtagccctgggctgctaggcggacagacagcgaccctgtcccgcaagccaagtcgaccaccgtctccgggtgcagaccggcatccgccaaaagctgctgcataaatcggagggcatcgtcataggcaatatcgtaggtcagtgcgtcataggccgacgccaatgcttcgtaggccatcacgcatcctcctccaactgggcaaagaccttgtcataggtccccgtcccgcccagcaggctccggttcacgcggctgatcgtcgcggagctggcgccggtacgctcgagaatatcattgtatttcatccccttgtgcagcagccaggcgacttcaaagcgctgctccatggcctgcagctcctgcggggtgcaaaggtccataaaaaactgatagcactcctgtttattttgcagcgacagcaccgcgtcatagagccggtgcgacgggtcggagcgcttgttgcgattgttcatattggcctcctccttcggcattccgccgggcgaaaaacgaaaaagcagctgcagcaaaccgccaaaattcgctgcagccactttttattccgcgcgatcagtcgcggttgaagatcttaaagatctcgtcgatatcgttgacatcctccgtggcgacggagacgctacccttggccttttcgcccgcgctggtgaatgcgccggtaccgggcttcgcctcttctgcctgtgcaggcgcttccccggcatttttgccgtcgaagccggtggcgatgaccgtcacgcgcatttcgtcctcaaactcatccaggaaggacgcaccgaagataatattcgcctcagggttggccgcttccatgacgatattggccgccgtctcgacatcgtccaggcccatatccatcgcgccggtgacgctgatgaggacacccgtcgcgccgttgatggaagtctccaacagcggcgaggaaactgccgccatggccgcctgctctgccttgtcccggccactggcgacacccatacccatatgggcccggcccgcgtccttcatgacagacgagacgtctgcaaagtccagattgatgatgacccgctcagagtagccgacaagctcagaaatagacgtcaccgcctgcttcaggacatcgtctgcgatgccgaaggcgttggcaaaggtgatcttctggtcggtgacatatttcagccggtcattcgggatgatgataagagaatcgaccttgtcgctcagggctgcgattccggcttctgcctgacgcatcctgttcgcgccttcaaagcggaagggctttgtcacaacaccaacggtcagaatgccggactcatgagccaggtctgcaatgattggggccgcgcccgtgcccgtgccgccgcccataccggccgtgataaagaccatgtccgcaccctccaggcacttggagatagctgcccgggactcctcggcagatttcttgccgatgtccggcttggagccggcacccatgccgccggtcagcttttcaccgatctgaagcttgttggggcacttggacttgttaaggtcctgcttatcggtattgacagcgacaaaatccacaccggtgatgccgcttgcgatcattctgttaacaacattatttccggcgccgccgacgccaataaccttaatatttacaactttttcttcaaacgcttcggacatatgctttcctcctatgtattgatcttctatctatcacatgcaaagccaaattgccgccgaataatctataaaaggggataaaacagcttgcgcagaattatacgcttttattctatcgtgaaatttccccaaggtcaatagaaattcgaaattttcacaaaataagttgctctccgcgacgatttagctttcaaacgggataaaccgggcagttttctcctcctggaaggtcagatccaacacaccggattcataatcatcgagctgcgccacggcggcaagcatatactcgaccttgtagctgagatccaccgccgcaccaaagtccacctcatactgcgttccataaaaaaccttgatatcgtgcaaagacgcgacattgatctgcgtgaccccagccgcaccgctgctctccagtgcctgcaggatctccagcgccgtctgcagccgctcctcgggcgtcgcgtcgtccgtttcctccgtattggccgccgtagcctctccgccggatgtcgtatcgccgttctgatcgccggaggtcgcatcgccgttctcactgccggacgctgtatcgccggtctgctggtccgtcttggctgctgcgctgctggcagagatggtagcgcccgctttgggcgggtcaacctggaagcccgtcagctgcagatacccggcggcggccttgccagtcgtctcttccacgacgcggccgctgctgttgatcagccagtacgtcccgtctgaagccgttacggcataggccgtatccaactccttgacctcgatcctgaccacattggggaaggcaacgccgatgcggacctggtcgatatacggcagcgccgcgatgatcttcccagcggctgcgctcttatttaccagcagcagcgcatcgcccttttcgatcccggacgcatccaggacctcctgctgggtgtatttctcgttgccggtgacagaaatagtattgacccggaagaaaacgataaagcacaggatcaccgccgccgccagtgccagtgtcgtaatcaggcggacgcggaagcgatggtcaaacaggcggccataggccggcttcttcgccgggcggcgtgcctgccgctgggccggatgcgtgttgcggcggtgttctaccgtctgaccttccggccggggcgcgcgtcggtctgccgggcggggccgctgccgggccagacgctttgcccggtctgtacccgcttcccgggcggggttactttccgccggtcgtttctgccgggaccgatccggacgctgccggtccggacggcgctgtgcatccgtgcgccggcgctgcgtatgatcccggggtgccgggcttctttcctgtctcggttcgttgtgctccatgaatcctcattcctccggctcctggttttcccggcgacaggccgggaaaccggatttctatgtagtttcgttccaagcgtccccctgggatgtcttgtcttgcaggcgaacctggccgcccaattgacgcaggctccaatccaactgctcatagccgcgcagcagatgggatatcccggtcagccgtgtcctgccctcggcgctcagggctgcgacaatgatcgctgccgcgccccgcaggtccttcgcctcggcatcgcagccgtgcagcgatgccacaccccggatgcgggcaatgcggttggccacctggatatccgcacccatggcctggagcgccgctacatgctgaaagcgattttcaaagacctgctcctccaggaccgtgatgccatcagcccgcagcagcgccgccatcaaaagcgcctgggcgtccgtcgggaagcccgggtagggcgccgtctgcaccgggcgaatggcatgcagcggcccagcacgcagatacagcatctccgggccggtatcgatccgggccccggcctgctgcagcgcctgcaccacggcatacaggtgcgcgacccgcacaccccgcagccgaacgctgccgccggtggccgcagcagcagccagaaacgtcgccgcttcgatgcggtccggcataatggtgtagctcgcatcgtgggttgggcggctgccagtgatctgcagcaccgctgtcccagcgcccatgacgctcgcgcccatagccgtcaaaaagcccgccagatcctcgatctccggctccttggccgcattatagatcgtgacggtcccatggcagttgagggctgccagcatgatattctccgtcgcaccgacactgggataggtcagtgtcaccgtggccccgtgcaaggggtccgccgcgacatacagctgcggcggcgcttgcgttacctctgcgcccatggcctccatcgcggccaggtgcagattgaccggcctgccgcccaacggacagccgccgggggcatagaccgccgcctcgccgcagcgggcaagcagcgcgcccaaaaacaggatgctcgagcgcatgctctgcatgagccgctgcgggatatcgcaccggcacagcgggtggctgtcgactataatcgtatcgccatgccagttgacccggcagcccagataagtcaaaatttccaacgtattggccacatcctgcagccgggggcaatggtgcagcacatactgcccctgccgggctgccgtcgccgccagaatgggcagtaccgcgttcttcgcgccgtgtacccacacctcgccgcgcagcggtgtgccgccttctacgataatgctctgcaaataatcgcctccgcacagatgagtttccccatcctatgcgcaggccccggtcaccgtgcccgggccagttctaaaatgatttgataaatgcgctccgccgaatcgacgacggccatagaaagcaacgcctgccgcatcttgccgcgccggtctggatcggccaacagcgcctcggtcttctcatagagcgtcttgccgtcgcagtcgcgctccagcagaacctccgccgcgccccgcttttccagaatgcgagcgtttttttcctggtgattgtccgtcgcgttgggcgacggcacaataatgcacggcgtacccgccgcagccacctcgttcagggtggacgagccgccccggcagatgatgacatccgctgcggccatcaggtccggcatattgtaaatatactcgcgcatgtcgatattcggatgctgcgtcagatcgacacccagctgccggacgtattccggcatccagcgccaaccgtaggaccctgtggcatggatatgctgccacgggtcgtgggccgactccagcttgaaaaactctgcaatttttttattcatctcccgggcacccaggctgccccagcaggagacgaccaggggccgttcatccaaccccagggcctgccgggcgtcgcgccgcttacggtagataaattcctcccgcaccggcatcccgacgacccgcacccggtcggcattggcgtaacacgccttgctctcctcgaagcagaccatgatccggtctacccggtcggcgaccatccgggtcgtcagtcccgggacagcgttggactcgtgcaccgccgtggggatatgcagcttcgcgccctgcttgagagctgggaagctggcatagccgccggtcccgacgatcacatccggccggaatttgcgcaggatctttttgacccggcgcatggccccagcgatattggccgccgtcttgacattatggccaatggccgcaggcgtcaggcggcgctggaaattggagatcttcagcgtctccaagcagaaaccctcccggcggaccagggtctcctccatcccgccgacggcaccgataaagaggatctcgcagtccggctgccggctctgcagcagctttgccacagcgatggccgggttaatgtgcccgccggtcccgccgcatgtgaagatcactcgcattttgcttcctcttttctgcaggctttgcattttttgcccgccttgcctgccgcagggcgatgttgttctcattctgccgggacaccccgaggatgattcccatctctgccaggttgacccagagcgccgtgccgccgtaggagaagaacggcaggctgatgcctgtcgccggcaggaagttggagacgacgccgatgttcaaaaacacctgcagcgccagcagggtgatgagccccgcgacggtcagcgcgccaaatcggtctctggcgtgcatggcgatccaatacccgcggacaatcaaaaggacgaacagcgtaatgatgaccatcgcgccgataaagcccagctcctcgcaggcgatggcgaaaatatagtcgttatgctcctccggcagatacaaatatttctggcggctcttgccgaagcccaggcccgtcaggccgccggagccgatggcatagcgggactgaatgatctggtagcccttatccgaggcgtcctgttccgggtggagccaggcggtgatccggttggcggagtagcccttggtggcaagatacaccaccagcagcagcgcaacaagaacgccgcccaagatcagccattttttatccgtaccgcccaggtacatcatgataacgccgacgcccaggatgatcatcgtcgccgaaaggtgcggctccaggtacagcagcaacgcgatcacgcccatgataagaacatagggcacgacaccgtagcgcagggtctgcatccggtctttccacatggacatcatcgccgcaaacgtcagcaccatgccgacctttgcaagctcagacggctgaaagctgacaaagcccaggttgatccagcgcgtcgcgcccttttcttctgtgcccaccagcggcaccgcgatcagaaacaggatggcccccgccaagatcagaaacgacgccgcccgccatgcctgataattgatccggctgacgaccagcatgattataatcccggagacagcaaagcccgcctggcggacaaaataatacgccgcgttgcccttatcgacatacgctcttgcatagctggcggaaaacagcacgatcacgccgatggccaccagcagtaccgttaagatcagaaagggagtatctgccaggccgcgctcatccacctcaattttctcccgcggcgcgctctgcaccgcaggttcactttttacgaccgaaatcgccggtttaccgcgcttcaatggcaatactcctttctgccgtcaaacgatcaaaaccgcccggagacaccccaccaggccagggcgcacataagcaccgtgaccgtgacaaacaccgtgaagatcttgacctcactccagccgcacatctcaaaatgatggtggatcggtgtcatcttaaaaatccgcttcccgtgggtcagcttgaaataggtcacctgcatcatgacagagactgtctcgatgatatagataaggcccaccaggatcagcaccagcggcatatccagagcgaacgccatcccacagaccgccgcccccaggaaaagggagccagtatcgcccataaagaccttagccggatggaagttatagcataagaatgcacccaagccgcccaaaaggcaagcgggaaataatgccagcgacatccgccccgccgccacactgacgatgagaaagaacagcatgaccggcatcgtcacgcccgtcgccaggccgtcgatgccgtcggtcagattgaccgcgttcacgcagccgacgatgacaaacactgcaaagaggatatagaccaccggcgcgatatagaccgtcttattggcaaagggcaggtaaagatcccacgtcaggttacccatttttgccaggacgaacagatacaccgccgaggccaccagctgcagcgccagcttttgcagtgccgtcaggcccagattacgcttgtacttgaccttgaaaaagtcgtcaataaagccgatggcgccaaataccagtgcaaaggccagcaccagcaggtgcgtataatccccctcctggttgccgatgcctgcaaatacacacaccagcatcgccgtgataaagatgatcccaccgatggtcggcgtgccgtttttgctgctgtgccacttcggcccgatctcccggatcgactggcccgctttcagggcgtgcagcatggggatatagaccttccccaaaataagccctacgataaacgcgcagagaatcgttacaatgatccgtaccatgcgctctcctcctgtactctctgatcccacgcttgtcggcatacgccgggcaggcgtttcgtcttacttcttttcctgctggaaaaacatctccagcgcctgttccatccgcatcccgcggctgcccttgaacagcagcacatcgccgggcttggcgaatcgcttcaaggcgtctgccagctcctcatgggtcttatacgttgtgacccgcttctgattcatgccgccggtgaccgcgccgctgatatagcggccggccattttcccgtaggtaaacagcgcg

SEQ ID NO: 2395 - DNA, 32642 bp, Unknown
  16S sequences of unknown bacteria
aaaaaaatttgtctgccggcgcgtttgtgttttttgattttgactaaatttgtgctgtgaatggtatttcaaaattttccttttaaattatagatttgatattcagtgctgctgtaatttgtttcatagtatgttttttctgcttcgcggcaaaatatttacagacaaaaaattatcgtgattatgaattaaatatagtatgagaaaaaggagatattagtatgtcagtaaatttaaaaggaagaagttttttgacgctgatggattttacgcctgaagagataagatatctgctcgacctcgccaaggacctcaaagccaaaaaacgagcgggcatcaagggcagatgtctcgaaggaaaaaacatcgtactgctttttgaaaaaacatcgacaagaacgagatgtgcgttcgaggttgcctgtcacgatgaaggcgggcacgtcacattccttgactcgggttcatcgcaaatgggcaagaaagagtcacttgaagatacagcgaaagtactcggcagattctttgacggtatcgagtacagaggatatgatcaaaagacggtggaggatctcgctaaatacgccggcgtgcctgtctggaacggtctcactgatgcagaccacccgacgcagatacttgcggatatcctgacgatagaggagcatgtggcaaagccgctttcgcagattaaggtagtattctgcggtgatgtcagaaacaatatgtcgtacgcgtggatgtacggctgtgcaaaaatgggaatgcactttgtgggctacggtccggaagagcttatcaaggaaatcgacagcgacacgcttacaaaggtgacggaaatagcgtcacagacaggcgcgtccatcgacttttcaaatgataaaaagtggctcaaaggagcggacgtcatatattcggatatctgggcctcgatgggtgaggaagatcagataccggaaagagtcgataagcttgagatgtacagagtgacgacggatctcataaaagagacggaaaatgatgatgtcatattcctgcactgcctgccatcattccacgatttcgagacaaaaatggcaaaggagcagaaagaaaagggctacgatatcagggaagtcacagacgaggtcttcagatcgaagcattcaaaagtattcgatgaagcggaaaacaggatgcacactataaaggctgttatggtagcgacaatcggataatcagaaatgaagataaacttaaagataaagtaaggaaataagaaattaaaaatctgaacgacacacatgaaattaaaaattaaaataacaaataaagcaaatagataaaaagaaaggaaaacgagtatgttaaaatttgaactatgcagagcgtgcggcgcaggagcattgttttacgaaatgcttttgccggacggggcagcaggagggtcgggctttggaagcggcagcagaagaagcggacctgtatgcggaggtacgcataaaagttttgcagaacagtatgagactgaggatacgagcaaatatgctgatcactacggcggcggggtacaccgaaatgatacctgcggctgtgcgaagggtgaaacggataatttaatggacgataatggtactgcttatacggaaagagtcgtaaaaagctcttgctgcaggcaggaaagtaaaaaaaaacgccgttgacaagtatgaataacgcggagacatcatttgcatctgcctccggcacagcgaaaaatatgtgcgaagccaaaagcggaagctgcggtatccacaattattcggaaatcggaaagctaagaagggtgcttctccacaggataggagaggaaatagaagggcttgtgcccgataactttgaaagacttctctttgatgacataccttaccttaaggttgcgcaggaagagcatgattgctttgcaaatctgctgcgtgaaaacggagtcgaggtcatctactatgtagacgagactgaaaaagcgctcgcagataaagacgtgcgcgaggacttcatcagacacattaccgaagaaagccatatatattcggaaggtataagagaagccatctgtgcttatctctcggaaatgccgacgagaaaaatgatagaaaaaattattgcgggcgtaaaaaagagcgacatacaaaatgtaaaatcgaagtcgcttgccgactatattacatcggactatccttactatatggatccgatgccgaatctctattttacaagagatccgggcgcctgcgtcggcaacggcataaacattcatcatatgagcacggcagcgagaagacgtgaatcgctcctgctcgaatatatgtttaaatataacaaagattttgcgcctgacggcacaaatatctggtacgattatgattttgcccatgaaatagaaggcggagatgtactcgtgctttcatcggaaattgttgctataggatattcgcagcgtacttctgtagccgcaatagagaaatttgcggaaaacgcacttaaaaattcaacatttaagaaagttcttgtattcgatataccgaaatgcagggcattcatgcaccttgatactgtatttacaatggttgattacgataaatttaccattcacccggaaatagaagggcctttgcaaatttttgaaataacgctggataaggatggtaaggcacattttacgagcatgcaggatgagcttgttaatatcctcaaaaaagaactttctctgcctgctgttgagcttataagatgcggaggtgacgacaagatggccgcacagcgcgagcagtggaacgacggttcgaatacacttgccatagcaccgggagtggtagtcacttatgaacgcaaccatgtgacaaatgatctgctcgataaaaagggcgtcaaggtactcacgataccatcgtcggaactttcgaggggaagaggcggcccgcgctgtatgtcgtgcccggtgaacagggaggatttgtaatgtataaagaaatggaaaaagaaaaactttgtcataagacagcagccggagcagccaaggaagcagtgacagaaagcacagctaaaaacacggaggctaaagattcggtgagcggcaagccagagcgcatagtaattgcactcggcggcaatgctcttcaatctggagaaagcggcgccacggcggaagagcagctctccgtcgtcagagaaacatgtgagcacattgcggaaatcagcagccgcggttacgaaataggcatagtgcatggaaacggaccgcaggtgggaaggatacttctcgcttcggaaactgcaaaaaatgtaacgccggcaatgccgtttgatgtctgcggcgcgatgtcgcagggctatattgggtatcatctgcagcaagcgctgcgccacgcactcgatgagaaaaaacgaaatgtacctgtggtgacgcttaccacacagatggtggtagataaaaacgatcccgcctttgccaatccgacaaagccaataggaccgttttacagcagggaagaagcggaaaagcttgaaaaagaaaaatcatatactatgaaagaagacgccgggcgtggatacagaagagtagtgccttcacctgtgccgatggaaatagtggaaatagattcggtgcgccgcctttgggattccacagttactatatcgtgcggaggaggagggatacctgttatagagaaaaatgacggcagcctcgaaggagtagccgcggtgatagataaggactttgccgctgaactgcttgcagaacaggtggacgccgatgtgcttatgatcttgacggaggtcgagaaagtggcgataaattacggcaagccggatcaggaagacttgacagatatgactgcggatatggctcgtgaatatgaaagcgaaggacagtttgcgccgggaagtatgctgccgaaagtccaggcggcaataaaattcgtgtcgcagcgtccgggaaaaaagagcataatcacatcgcttgacaaagctatagacgcgctcgaaggcaagacgggaacgacgataacattttcgtaaagaataaagagcaaaatatagaatttaaaaaataatgcctgaaagaaaaggcagtgtgataaatggtaaaaccatatattgcagagacaaagtccggaaaaatttaaaaactatccggactttgtttttaaagtaatttttagacaaagaatacaaaatgtataattgtacaaaaccatgaattatcagaataatttaaaaatcgaacttgacgcatatgtagaataagtagtataatacaaacgataaaatatatttgtgtattttattacggaattttttatcttatgttttacttagtagaaggaggagaaaaatgggcaagaaaatccctttgtggcaagtattgattgtgcttttgttcgcaattctttgctttacccacggctccggcgtactgggcagagcgttcggtgacgcctttgcgtgctcttacggcgagcttcacattccgctcgtagtagccgcagtcttcgctgctattgtagcagcattaaacggttggaagtggtcgtttatcgaaaacggtatagttgcatgtatcaatcgtgcaatggcagcacttcttatacttatgacagtaggtatccttatgggtgcgtggatcgcagccggtgtagtacctgctatgatttactacggacttgctattcttaagccgagcattttccttatcgcagcttgtctgctttgcttcatctgcgcgatggcgacaggttcatcctggacgactgtaggaactatcggcgtagctcttgtaggtatcggtacagcgctcggtcttaatattgcaatgtgcggcggcgctatggtggccggtgcgtatgctggagacaagatgtcgccgatgtcggatacgacaaacctttcgccggcaatggcaggtacagacctctttactcatatcaagcatatgatgtggactgtaacaccttcatttattatagctcttatcgtttacggcattatgggctttatgagctcgggcggagaagctgatatgtcgatggcggcagaacttcaggcatctattaaggaatgcttcgatatcaacctcgcacttcttattccgccgtgcatcgttatcgcaatggtaatctttaagattccggctcttccgggactcttcggaggtatcgcggttgcgatggttctcggttcgatattccagggtattcaccttggggactggtacggatatctccactacggctttgcatttgcggatcctgacgctgtagatccgttccttgtagatcttttgacaagaggcggtcttgacggtatgatgtggaccatctcaatgggatttgcggctcttgctttcggcggcattatggaagcaacaggaatgcttgaaactctcgtagatgtaatgagcaggctggcaaagggtgcaaagggtcttatgcttacgacaatcgtaacgacaatacttactcttatgatctgctgcgaccagtatatggcgctcctgctccctggtgcaatgttcagagaaaagttcgaggatatgaggctggcaccggagaatctttcgcgaatactcgaagacgcaggtactgttgtatcgccgatcatcccttggacaacatgtgcaatgacaatgtcatcgtttatgggcattccggcaatttcatatgcaccgtatgcgatactctgttgggtaaatccgttcgtatcggctttctatgctatcacaggaatttctgttaataagctttcggacgaagaatatgagagaattctcgccaacagagagaagacaaggcaggaagctcttgaagctcttaaggcataatgttgatgacgttgaacttattaacataaaacgaataaaagccgagtgcagtcttttgcattcggtttttatctttaaaataaagtatctttttatatcataatatggcataatgtgataaaatatatttatatttaattagaaaaagaaaagttaagcgtagtctaaaaggaaaacaagtttttcgtaaaaaggagcgtgaattaaaatgaaagaatatcagctttttatagacggtaagtggacagccggagccgaagataggtggatagaagtggaaaatccggcgaccaaagaaattataggaaaagtaccgcgcggaaacgcggaggatgtggacagggccgttgctgcggcaagagcggcagcggaaagctgggcggcaaaagcgccgcacgagcgcgctgaatttttacgcaaactttcagaagtgatagaaaagcgcaaggatgaattttgcacgactatttcaagtgagcttggcataccgctcaagtacgcgtttgattatcatgtaagcggagcgataagggaggcaaaatattttgccgatatgtgtgaaaattttgaatatgagcagaaaacagattgcggaatgataagaagagaacctttcggagtggtagcgggtattacaccttggaactatccgctcgatcaggcgacattcaaactgtttgcggcgatggcggccggcaacaccgtagtgcttaagccgagccagaacgcgccgctctgctgctgcattctggcagaggcaattgaagaagctggatttccaaacggagtctttaatctcgtaacgggcgcaggcggcgaagtgggaaatgccattgcgctgcacgagggtatcgacgctctttcatttacgggctcgacaagcggaggaatagaagtaggaaagctcgcgctcagcacagtaaagaaaattacacttgaactgggaggcaaatcgcctcttgtggtgcttgagggtgcagaccttgaggcggcggtagctgatgcatgcagctcagcgtttatgaatacggggcagacatgctgcgcatatacgagaatgctgataccggaagctaaaaaagatgagattgaggcgctgctcaaggcagaggccgaaaaatatattacaggcgacccgcttgaccctgagactgaagtaggtccgcttatttccgagaaagcgtttaacaaggtaaaaggatatattgaaaagggtatagctgaaaatgcaaggctcatagcaggcggcgtacctgaaaactgtgataaaggctattatgtaaaccctactattttctctgatgtatcaaacgatatgacgatagcgagggaagaaatattcggaccggtgctggccgttattccttacaagaccgaggaggaggctcttgcgattgcaaacgatacgaattacggactttacggtgctgtgtacggtgagccggcggcggcactcgaatttgccaagaagataaaagcgggcggcgtgcatgtaaacggcgctggcggcggagttgatatgccttttggcggttacaagcagtcgggaataggaagagaagggggcacctttggctttgaagattttctggagataaaggctctttgttattagaattgtattaaaggaacggtgagaatagatttatggcaataataaaatccctgagcgatcaagtttatgagtatgtttttcataggataaaaattggaaaaatcgccgtcggagataaaatagacgaagccgaactcataaaagaacttggtatcagcagaacaccgataagagaagcgctgatacagatgacgtcggacaatctcctcgaaaatgttccgcgcaagggctttttcgtgaaaagtgtagatgaggtggagatgcaggaatgctttgcagttatagcgcagcttgacgcttacgctatggagctggcaatgcctaacatagaaaaggatcatatttcgagaatgacaactgctgttgacaagatgagcttggctataagtaaggccgacgaagatatgtattacgactgggaagaggagtttcacactgtatacagggaagtatgcggcaataaggtgctcacaaatatgatcagggagttgacgaggaaggcttttcgctccgaagcatttacaaaaaatacggcgactaaaaaagactactgggaaattgtaaacggcgaccacgcggcacttgtagaagccgtggaaagacgcgatatagaggcggctaagagatgcctgcgcaaacactggaccgagtaagcaaggcatcgggcaaggcggcgttacgcctgccttgagcaatttattttcgaggtattgacaaatgaaaagtatgagtgacgcaataaataattcaagaaagatcgtcatcaagataggcagcaatgtgctttccgatgacaacggcacggttaacagagagattttacataatatagctgaacaggttgtacagcttatggaaatgggcaaacaggttgtaatagtgtcatcaggcgcgggcatatgcggtgtaggtgctatcaacaaatggagcagacgaggagacgtcaactacaagcaggcgctgtgcgctatcgggcaggtagaactgatgatggcatacaaagaatatttcggcgattacaatattcatgtggggcaaatactgcttacagccgaagatttcagcgatgcgagcagaacgttgtacataagaaacgcattgttcaccctcgtagatgagggcgttgttccgataataaatgaaaacgacagtgtatgcgtggatgagataaacagcatcggtgataacgatacgctttcggcgctcacaacaaatttatggtcggcggacgtgctcataattctctccgacattgacggagtctttgacaaagaccctaagacgcataaggatgcaaagctgattacggaaatacacgatatcgacgagacgatgaagagcatagacaccgacggcaaaagctcgttcggcactggcggcgtagtgtgcaagatagaagcggcgcgcaccgtaaataattacggcattccgatgctgctcttaaacggaaagaaaaagaatataattattgacgcgcttgcggggaacggtgcaggtacgctgtttacaaaataatggcgatagccggattgcggaaccgaattacggaagcagtgatgtgataagacgcgaaagggcagacggaaatttcatattaaaggcggaggaatgggtatggaacttaaatacggatttataggcgcaggcaatatgggcggcgcaatacttcgcggagcgctcgcaggaggagcgctggcggcagaggaaactgcggtattcggcgtgcagaaggataagcttgcgcatacagctgcagagctaaaaatagcgccgtatactgatgtacaggaaatagtgcgcgactgcaaaatactaatttttggttttaagccgcagaaattcgatgaagtagtgccgaaaatcgctgaggtatatacaaacgataaagtagtggtttcaatggccgcgggcataagcatagcttatcttgaagattatctcggcgaaggtgccaaaatcgtgcgtattatgccaaatacaccggcgcttgtgggcgcaggtatgacatccgtcagcagaaacggaaatgtgacagacactgagcttgcagatgtgaagcgtatatttgacgcgctcggacgcgcagcagaagtgccggaagatatgatacatgcagtaataggcgtttcgggcagcagccctgcttttacatatatgtatatagatgcgctggcaaaggaggcgcagagcggcggtatggagagcgcaaaggctcttgaatttgcggcgcaggctgtgctgggggcagcaaaaatggtgctcgagacgggactttcgccggagcagctcagaataaatgtctgttcgccgggcggtacgactatagaaggcgtggaaaagctgcgtgagctcaaatttgaagagactatacgtgcaggtgcaagggccgctgtagaaaagtcgaaaacaatgactaagtagagactgaatgttatcaaagaagcagaagcgaaattgcagagtttgagccgtgaattttgggagatgataaatatatgacatttaaagaagagacgataagaagcgaaagggtatatgaaggcagagtgataaatttgaggcgcgatgaggtgatgaccgtgagcggcaaaccttcagtgcgcgaaatagtggagcacggcggcggtgttgcgctcgtggctgtaaccgacgagggcaagataataatggaacggcagttcagaaagccgctggagcgtgatgtgcttgaaatacctgcgggaaagcttgaggcaggcgaagacccgctcgaagctgcaggacgcgagctggccgaagagacggggtacagagctgaaaacatagagtacctaacgcgttattatccgtccgtaggctattgtcaggagtcgctttatatgtatctctgcacaggcctcacaaagggcgagacctgccctgacgatgatgaagctatagacatatacgagtacagctttgaggaactctgcgacatgatagacagaggagagcttgaggatggcaaaagcatagcagcgctttttgctgcatcgcttagaatcgcaaaaaagggaaaataaaggcttctatgaggcaggcggcgatcacgagcagcgccagcacaatatatacagcgatatagagatccgttccaaaagcattggagcggatactttttttatagcgtttgctttttgcagaaagtaccgaaaccccatagctttgcgcggctgcggctgctattataaaagtcggtataagcaagagattttgaggcagcatagacgaaagaagcagcggcacgccgccaacggaaaaagtttcgagcacgagccctgcggaaaatccgagagccattcccttgtatataagaactatatgcgcggccggaaaacctatcgcagaaagtcctgagagcatcatcaggacgagcagaaatatattgagtgaggcgcttgaaagaaaagggttgccgtagtttgcggcgctcacgccatctgtgaaaagatattgattgaggaactgtgcggcgtcgagcttaccttcctgatccatagaaagctcaagaaaaacaccggcggaaataccgatgagaaacagaaatgaagatataaagagatttgttttgctgccgagcgcggcttctcctatttgcataagtttacgttttttcattttgtacctctctgaagtcttattttgcaggcggcatactgactgcctgcgaataatgcacttgtcaatggcgctgcgcggaatttcgaaactgtaattatttgccgctccgccgagcttttgcagcgagcaaaaatctgtgaatgccgctcgcattatgtaaagcattttgtacaagtatatgcgagcaggctctgttttaggactgttcaaaaaaggacttttttcgacaacatattattgtaaacctgactgttttctgttatactcgtagttacggaggcggagtcggcaatgtatatggaagaatataaagactatttgataaatgtaaaaaagatatctcagaatacgcttgctgcgtatataggagatatagaggaattttccgcgtttcttaaggagaaaggtgtcaactcgcctgccgacgccaaaaacacggaagtggtatcgtaccttctcaagctcagagaggacggaaaatcggctgcgactgtgaacagaaagcttgcctcagtgagaatgttctataaatatctcactgagaaaaaagtcatttctgacaatcctgcagcaagcataaaatctgttaaaatagagaaaaagggtatagagtatctgacgatagaagaagtggacagactgctttcgctgccagacgattcactcaaaggaaagcgcgataaagcgattctcgaagtgctttatgcaacaggcataagagtgagcgagcttgtggatgtgaagctatacgatgttaatataagaatgggatttatttcctgcacgggcgagcgcagcaaggcgcgcatcattccgctcggaagaccggcccgcgcagcgcttgaagaatatatatacgatgtcagaaaagctttcgtacgcggaaataaaaaggaagaaaccttatttgcaaactaccacggaggcaaacttacgaggcagggactctggaaaataataaaagactacgctcaaaaagcggacatcgggagtaagataacgccgcagactctcagaaattcgtttgccgtgcatatggtgcagaacggcgcggacttaaaatcgcttcaggagctgctcgggcatgaggatatttccgcaacccagatatatctgtcagtgacgaaaaatagaataaaggatgtgtatgacaggacgcatccgcgcgcataatgagcataataacgaattaaagccggacggggtttcgtaaagacaactgtccggcctttgtttttttgtatttatgctgtgcggcgaataatacaagtttacaagttttcagaataatgatataatatagaaaatacattatgggaggtcttagatatgaaaggctatacaggtgatactataagaaatgtcgcacttctcggccacggcggctgcggaaaaacaacattccttgaggcagcactcctcgcaacaggcgttataaacagactcggaaaggttgaagacggtaataccgtatctgactatgacaaaatggagattgaaaagggatattcgatttcactttcgattgttcccgttgaatataacaaagtaaaaatcaatttccttgacacaccgggatttttcgattttataggtgaagttgattctgctatgagagcagtagacgcggcaatgatacttgtagatgcatcgtcagggattcaggtaggtactgaaaaagcctggaattcttgcaagcagtacaatatgcctaaaatgtttgtaatcactaagactgataaggaaaatgtgaatgtggatcagacaatagctgatcttaaaaataaatttggaacatcggttgttactcttgatgacagagaagcattaaatgaagctattgccgagactgacgaagagctcatggaaaagtatttcggcggcgaagaatttactgacgaagaattttcaaagggtcttttaaacggcattgcagaaggttcaatagtacctgttctcacttgctgctcgctgaaaaatgaaggcgtaaccgaagttctcgatgcagccgttaaatatctgccaaaggcaagcagccacgcgccgtacacgacggttgacggtaaggaaattgcagcggatccaaacggcaagccagttggatatgtattcaagactatcgcggatcctttcctcggcaaaataagcttggtgaaagtgatttccggtaaacttacaaacggtatggagctttacaattccagagccgagaaatcagaaaaaatcgcctcgatgttctttatgagaggcaagagtcagggagaatgcccgtcagcggaagcgggcgatatcgtagctatcgcaaaacttcagtttgcacagacaggtgatactctttcggataaggcaacagcggcagagctgccgagagtagactttccgtcgccttcgctctatatcgcagtagagcctaagacaaagggagatgatgaaaaggtcggcacaggactcaataagctgatggaagaagatccgtcattcaagctcgagagaaattcggagaccaaacaaacccttctcggagggcagggagaaattcagcttggcataatcacagcaaagctcaaggataaattcggtgttgaagtgcagacagtcccgcagaaaattgcttacagggaaacaataaaaggttcgtccgatgtacagggtaaacataaaaagcagtcgggcggtgcaggccagtatggagatgtacatatcagattttcgccgtcacagcaagaatttgaattttcggaagaacttttcggaggctcaattcctaagaattatgttcctgctgttgaaaagggattgctcgaatgtatgaacaagggtcctctggcaggttgcaaggtagtaaatgtaaaagcagtgctttacgacggatcctaccatgatgttgattccaacgaaatggcatttaagattgcggcttcgcttgcctttaagaaaggtatcgtggaagctaagccttgcttgcttgaacctgtaatgcaccttgagatactcattccggatgagtatatgggcgacgtaatgggcgatatgaacaagcgccgcggcaagatcctcggtatggagccgcagctcggaggcggacagaagctgatcgctgaagcaccgcaggcagagctcttcgactatgccatcgtgctccgctctatgactcaggcaagaggaagttttacaatggcttttgaaagatacgaagaagtgccggcacagcttgcggaaaagatcatagcagcgcataaggaagaggaagaagcatagaaactgatataagaaataaaagaagaccgagccggctgcgaggctcggtctttttatatatgcgagatggcttcgtacaggctgcggacaccgataatcttgatactgcgcggaatatcactgcctttttctgcaagctttgcagcgttgcgctgaggcattagtacgcgtgtaaaacccatgcgcgccgcttcttttatgattttatcggcgttttttatagtgcgcagttctcctgtgagccctatttcaccaagaaagagcgtcttggggtctataggaatgcgcttgtatgcagaatatacagccatcgcgacagcaaggtcaattgaagtgtcctcaggcctaagaccgccgacaatatttacatatatatcgtgatttataagcgatataccggcttttctgtcgagtacggcaagtatcatattgaggcgtgtattgtcaacaccaattgcagtgcgccttgcgaagccgacattagctggcgccgccagagcctgaatctcgagcaacagaggccgggtgccttcatatacggccgttactgcggcgccttctaaggccaaatccataccttcgagaaagctttcagaaaggttgggtacttctatcagtccttcttctgccatttcaaaagcaccgatctcactcgtagtgccgaacctgttcttatgagagcgcagtatgcgcagatcctgactgcgttcacccgtaaaattgagtacacaatccacaagatgttctacgattttagggccggcaagttcgccgctctttgtaacatgagctactatgaaaataggaacgcctgttactttgccgacgcgcatcagaatattgccgcaggcacgcacctgagatacgctgccgggcgcggaatccatatcggccgtatacatagtctgaatagagtcgatgatgacaaatacgggtgcgagcgctttgcatatttcctcaacgttttccatattggtttcggaaagtatgaaaagattgccaagatcctgcccgccgcatacgcggtcagcgcgcattttaatctgctcttcagattcctcgccggagacatagagtaccttgccgtatcgtctggcgatattggcggcagcctgtattatgattgttgattttcctatgccgggctctcccgagatcagggtcagggagcctttgacaagaccgccgcccaatacgcggttcagctctccgatttctgtgtcgaggcgcgtgtacgcttcaccgctgatttccgtaagcggcagcgcctttgcatgcccggcggcgcggcctccgctcgttcttgctccgtgcgcgccgccaataccgctcatactgcggctgcgcttatcgtcttcgtttacatctattattttttcttcgaccattgtattccaagcgccgcagatgcattggcccatccatttaggactttcgtatccgcattcctgacatacaaatacggtctttgctttttttgccataagcatttcctccgcattttgctgcaaatttattatgcggcagtgataacttcattgcctctgtatttttatttattgatgtttttttctgcatttcgcagatcgcttttctgagcgatattaagctcaaaccagaaagtgcttccttgtccgagtttgctgtttactccgaaatcggcgttatgaagagagagtatgcttttgacaatagaaagtccgagaccgctgccgcttgttgcgcgtacatgatttgtgctggccttgtaatatcggtcccagatgttgtcaagctccgacggctctattcccattccatgatctgtcacctcaaagcgcattttgccgtggtgttttttgatgctgatatagacggtacgatccgtaccgcagtattttacggcgttattgatgaggttggagatgacctgttttatctttgcttcgtcggcatagacattgattacctccggacagtcgagaagcagtgtgtagccctcctgttctacaaatacatcataagaccggagaatagattcggtgacttcctttatcgagaataccgtcttggtaagcgcgctgacacccgactgcacttttgacatagtgagcatatcggaaacaagtacattgagcctgtccgcctcgtctattattacttgcagatgcgcatttcgtttttcgggattgtcgccggagaggtcgcgtatcatttctgcataggattttaccattgtgagaggcgtcctcagatcatgcgagacattggcaatcaggtctcgctgcatattgtcggcgcgttcgagctgcatagaagtgtacgtaagtgtgtctgccaggtttattatttccgaataatgttctccgcggaagcgtatgccgtactcgccctttgcaagcctcttagccgtttggcttatatttgaaagcggaatggatacccggcgcgagagatatatgccgagcattgccgcaaacagaagcgagataacggttacatatgtgagctgcacgcgcagtattgtgaccgtagattctactggataaagcggcgaaaaaatatagagcattacttcgcttcccgcagtacggtcgagatacgtgccatacgcaagggtgttatagttggtaccgcttacaggtattctgatagctacactcggtgcggtgctttctgaaagagatttctttaaagcgccgatttcctttacataggcgctcaggctggcgtgagagctgccgtatgtcataggctcgaagatgacagagccgcccgatgtttctatgtgaatataaaggtcattgcttgaagaaagctcagatacgtattcgacaaaatcctcgttgccatagtgtgtcataatctgatgggcgattttattagtgtctttaatcttcatttcctcatagtaattattgagaaaaaatatctgtagaaaccagagcactatcataagtgcgagcgcaaagaggatgaagtggagtccgagtttaaatttaagactgtgaaagtcgggctttatcctgctgagaaagccttcgaaattagttttcgacttcaaatttgtaacctacccctctgagtgtaactatgtaatctctgtaaggaccgagattatttctgagattttttatatgagtatctatggtgcggtcatcaccgaagaaatcgtagccccagatgtcctgcagcagcttgtcgcgggaaagcgcaaggtttctgttcttgacaaggtaaaacaggagctcatactctttcggcgtaagctctaccttttcgccgtctatagtaactgtgcgcgcaggcatattgatgacgagtccgccaaaggaaagctcatcagaatcgctgggagctgaggccttattccttgaaattactgcgtttacgcgtgcaataagctctttgggactgaaaggttttacgacataatcgtctattcccagctcaaaaccaaacagcttgtcgtattcctcaccgcgggcagagagcataataataggaatatctttgattttttttatctctttgcaggctgaaaagccgtcgagcttcggcatcatcacatccataattatcaaatcgtaatcattgagctttacaagaccgatagcgctcataccatctgcggcttcgtccgtttcaaagccgttgaactcggcgtactcgcgtataacttcgcggattttttgttcatcgtccactataagcagtttgtacataacaacatctccttataataaaatacttttatggtaatatcaagctaatatttgtataataataccataatattaacgcaaaagtgtgtagcttttgtgattattactataattatatcatatccgcggttttctgaaaatattttgtgatggtttgttttactgatttggcagtcttcttaaagatagcacggctgtcataataccgctgaacgcaaccggaagatagtagccgatgagtcgacacaggattacggacggcaaaataaaagtgctgccgaatacctgagcatatacagtcgaaatcgctgcttcggagatgccgacaccgccgggcgtaggtacagcatcggcaataatgatgactgagccctgaagtgcgagcagatcgaggatattaaagccgtatagtccgaaggcctgaaatacaaaaaacggcactgaaaatattattaagacttgaagaaacgtaacaggctgtatgcgcaggaatatcgaaagattttcttttatataggccgcgctctcacggtagtgttcgctgtagcttaaaagtgcgctttcgattttgtgaggacgttttatgaacttgattttagtaaatatctttgtcagaaagcatccgagcgctgctatcatatggggccgaaatatgagcgcgagaaaaaagaaaaggagcgctgcgtgaattaaaaagcctgcgatgagcagcgccttgaatgcgccgaccatttctcctatgagacgccatctgaatgcgagtgcggcggtgtaaatgccgattattcccgcgtgatagctcatattatacataaggagcgctactgaggcactgccgacaggtatgccgtcctttgacatatagtagagctgcgcgggttgcccgcccgaggcgcttggcgttaccgatgtgaaatagtggccggcaaaggcatagcgcatacaggaacgaagcggcctgtcgtgatgaagtacttttaggagcacttttagattaaagccttcacatgatactgcgaaaagcataagtacgataccgaaaagcaagatcacggtattggtgcctgatgccgcggagatgatgtcgtgcgggcttgactcgcgcagcagaaacgtgaaaactgtaaatataagaagtaaatataagaaggtattttttatgcagcttttaaggttcataagataagccccctttctcgtgcttcttcaaacgaaaggaatttgtagccgcaggatttgcggttgtcgatgtattccgacaacgcttcaatcatccgtgcgggagcatcaggcgcgccgccggtgccttcgcctgaatcgtgcaggcagataagactgccgtttatggtacgtgtaaagagcttgtatttgagatcatgcacagtgcttgctgcgcgccagtcctgaaccattgtactccaaaaacacagcttgagacctaaacgttttactgcacgcagataaaacggcgtaagcataccccatggagggcggaaatacgagatggtgacgccttgctgtgcgagaagcttgatgccgcgccttaaatattcttccgcgcggcgcgtacctatataaaagaacttgcggtgatcgggagaatggtattcaattctgtgtccctcttctttcatacgtctgatgatttcggggtgctgcgccgctttttcagccaccacaaaaaatacagcctgtacatttttttcgcgcagcaggtcaagaagtgcatccgtatagcggctgtcgggaccatcgtcgaaggagagaagtatttcgcgggtgcggaatttgcgcgccactttcttcttgtttatttctttatatataaatccgaatatactaaacacattctcgtctcactttcttttcgttttcaaatgaagaaatgtagtgcgcaagcgcgccgggagcaaagctgcgcttcatatttctcatattgttttttatcgcttgctgtctcttgctgtcgcgcacggctctttcaatggtgtcaataccctcttcaaagcttgtatcgagcagcactccgagtccgttgcgcccgataaagtcgctgtttgccgcttcctgacagagcgcgggctttgcaaggataagaggcgtgcaggcatttacggcttcgaaggttgtgataccgccgggttttgtgaggagccagtctgaatttttgatgtaattttcaatgtcgtctgtaaacggcataaaatttatgttatcgtactttcccgtaaatctattcaggagcgctttgtttttaccagtgataacggtggtgctgagtccgtttatgcgggcgaggcggtcgtaaaaacttttttcctttggaagcagaccgaggccgccgcccatcacaagcaggtgtttatcaccgttgtcttcgcacggctcggaaacgctgtatacgcctgcacaggcgttaggatttatactgctgtgcgcttttgcaccataaagatgcggatcgcagctgccttgcgcatagtcataaaagccgaaagagctcttatctttatactcagcgcatattttagtatcatatgccaaggaagcgcgcggattgcaaaatccgctgcgtacaggtataccggtcaccgcaattttattttcgggaatgcctatgtttataaggtcgcgctttgtctcttctgctgccgcaaggtagagatccacatttttgtctacccattttccgtgaatgccgatgtccgtgatacaggttataaatggtgtatcgcaagcgtatttttcgatgtagcgtcctatgtgtttgttgcagccggaatatgtggatattattatatctgcatctgtattttgcacggcttttttgatagccttcataaatatcgagccgcaggatgcttttcttgcgctctgcggattttctatctccgtacaaagcttgtatatgtggttataaataccgcagccgcgggctataagcgcgctgtaggcgtcgtacataagccgtgcctttttccccaagagcatattcataaaatcacagataatgatattatcgcccggtctttgaagctggagctgttcctttatagcttcggcggcatagtagtggcccatgccgaatctgctcgtcataattaaaatattcatcccaattccccccctatttatgcgatacatagttgtcttttaaattacataaacagtgtagcttctaaatctttcttagaaatgtaaaaaatattaagaaatgattaaaggattataaacttttgttaatatttgagttttttgatataaaaagggcttgcgggggttgcagtaaatggtatagagcggaaatttaccgtaaaccaaacatagcgccgaaagattgactttcctgccgaaagggtatactattagtactataaaatggagaaaatcatagtattatggcagatcacatcgtcacggacaatcaaataagcgatacagacttaaagctcgataagttggcgcgtgatgtactgaatctttcaagaaacacgcttattgtcaatttgcgttttatggatgaggcgctgagtcggctgacgccggcagcgcgggaagggagtctttcaacggatggcgagcatcttttttacgatgctcgttttgtgctgcgcagatatatgtcagaaagggaattgccggtgagagactatctgcatacggtgctgcactgcgttctccgccacaattttgaagcaacgccgatggaagcgcgatattggaatcttgcctgcgatatggcggcagaaaacatcgtaagtgagcttaatcttaaatctgtagctgctgccagacaagcggcacaaaaggaagagcttgcaataatgaaaagcaaagtagtgcagctgaccgcagaaaaaatttatcatcaactgcgcagggaaaagctgccgcctgaagaaatagagcggctttcggcattatttatggcagacgatcacgggctgtggtatgatgaagaagcctcgccaagcgaaagcaaggaggagagcgagactgatgcgcctgaggaacagaaaaatcctgaaaaccaagaaaattctgatgaacaggaaaagccttcgcaggaagaagaggagaaaacgccgcaggaggaagaaggcagcagacagcaaagcaaaccgcagactgaaaaagatacttcgcgcgaagagatagaggccgcgtggaaggagattgccgagcatatgcaggttgatatggaaactttttccaaggcaagaggggatacgagcgcaaatttgctgcaaaatcttcgtgctgttaatcgcagaaagtacgactatacgacatttttgcagaaattttctgtaatgggcgaggcgatgaaaatcaatgatgacgagtttgattacattttctatacctacgggcttaaactttatgaaaaaatgccgctgattgagccgcttgaatataaagaggagaaacgaattcgtgaatttgtaattgctattgatacttcgggctcggtacaaggagagatggtgcagaaatttattgagaaaacatacaatattctcaaacagtcggagagtttttttaaaaaaattaacctgcatatcattcaatgcgatgctgaaattcaggaagatgccaaaatcacaagccaggaagaattagacgaatatataaaaaatttaaagctgcgcgggtttggcggcactgatttccgcccggtttttaattatgtggaagagctgcgcaaagaaaaggaatttaccgatttgaagggactgatttattttacggacggagacggcaccttcccgaagcagatgcctgattaccagactgcgtttgtctttttggaaaacgggaatgagccgccgcaggtgccgccgtgggctgttagcttagtactgcaagcaaatgaaatttaaagaaaatggcaaagaaatacaagcggtaaatggtaaatgaagaaaggattgcataatgaatattaaagaagcaaaagagcagataaaaaatgctatgactgcatactttaccaaagatgaacttggagagtacgtcattccgattgagaagcagcgcccggtatttttgatggggcctccgggaatcggtaagactgctattatggaacaggtggcgagtgaactcggcgtgggccttgtttcctactctatgacgcaccatacgaggcaaagtgcccttggacttcctttcattacgcataaaaaatatggaggtgcggaatatgatgtatccgaatatactatgtcggagattatcgcttcggtttacgatatgatggaggatacaggagtcagcgagggaattctatttttagatgagatcaactgtgtgtcggagacactggcgccggtgatgctccaatttttgcagtataaagtattcggcaggcatcgcgtgccggacggctggattgtggtgacagcgggcaatcctccggagtacaataattctgtgcgcgaattcgatattgtcacctgggatcgtttgaagcgtattgatgtggaggcggattttgatgtgtggaaagagtatgcgcacgataaggcggtgcatccgtccgtattaacctatctggaagctaagaaaagccatttttataagattgagatgacagtggacggcaagagctttgtgaccgcacgcggctgggatgacttgagccagatgattaagctttatgagcagaatgatcttgcagtagaccaaaagctgatcgggcagtatttgcaaaatgaagagatcgccaggaattttgcggtttactatgatcttttccgcaagtataaaagtgattatcaagtggacagtattttgtcgggtacggcagagagcaccatcaagacacgtgctaaggaagcgaggtttgacgagcggctggcggtgcttgggctcattttggacgccattctctctgagctgcgtgaggttatgcagacggaaaatgtgatgaaagagctcttgactttgctccgcgagtttaaagcggcagctcttaattcatcgcgggaagaagcgcaggaattcctgaataagcagatagaaacactgcgcaaacagcttgcggcaggtaaggattccggcagtattaacgatgaaagaagacgggagcttatgttgacagcgcgtattttagaggagatgagcgcgaaaattgcagataagactgacggcaatgctgcttttgaaacggtcaaggaaatttatgacggccgtctgcaggcgatgaaaaaagcagcggcggaagcgggaacgcgtctttctaatgtatttcttttctgtgaagaggttttttccggcgggcaggaaatggtgattttggtgacggagcttacaatcagcgcggcaggagcaggttttatcagccgttatggttgcaaggagtattttagacacaacaaagagcttcttttccatgagcgccggcaggaaattttgcgagaaatacaggagctgaatttagaataagtaaggatatgagaagatataagaggcaggaatatataaaatgagttatacaaatgaagatatattctgcgcagtcagggacggtgatttggaaaaagtcagacgaatggttaaagatggcgtggagctttcgcaggtgcctgagcgcgaagtaattcgttcaagccggggatatgtctttgagatcgatccggcagaaagaacggaaacaaatcatttgcgccaaggctttaattttgaaacccattctacggcgaggactgagatggtgttcacggaatcgctgctcgactgcgccgtgcaggcagggagtacatcgcttgttgagtacctgcttgagcataactgcgatgctgtaaaaagccgtgcgctttatcttgcgacagcggcagagaatactgaaatgataaaaattctcattgcggccaaagcagaaccgtgcaggcaggtatacaataaatttccgcagcataaagaaggtttctggtatgaaggcgttaaattgcagtctccgcttgaacttgcggcggaaacctcgcaggaagaagcggccgcgctgtttctcggcgataaagaagcattgacagaagacaatgtatcggcggcgtttatgattgccgcagctgttggaaatgaagctattctccgcagttttcttgactgcagggaatttttcggtgaaaatgtcttttccaaggcggccgaaaaaatcatcagtaagtcacagcctgcgctgagccggctttttcttacctgcggagccgatgttgaccctctctcgcgctgtcttgcatacgctatgaggactgccgatacggaagcggtcaggctgataatggcgcagggaatccgtcccaaaagcacgatggaatggaagactgttaaaagcgcaagcaagtttgttatttgggggcgcatcatggcagacaagcgcaaatcccctgaaaatttccagtatcataaatttgaaaacaacttttttgatgacgattataaatatatatcgtggacgaagagcggcggcagcgatcagttcagaggcggtgtaaacaccttttctggttattatggcacggcagaacaggcacctgctgcaaagcgcatagagatgattcatgttttggcggaagaaaagcttttggacgctgaggacttttcatatctctactaccttgccgttgctggggacgatatttctcttgcggaggagcttgaaaaaatgggagctgccgttacggattttgagccttatgcgcaaagagcggagcgcggcaagactgtaaagtctatttctgatttggcgcatcctgcgatgagcaaagagaaagctgcttttatatgccgccatcttagtgcaggcgaagagatgattctcagagacaattattttgatccggaagcggacaggacggaaatgctgcttaccgtcctcgattacagcgcgcaggtgaaaatttctgattctgaaaaagcgcttgcttatttctatgcaaaggattctcttgcaggtatggaaaaaatggcaaaaatgggtgcgctgacattaaaaaatactgctgaatatataagaaaatcggcggaagaaggtaaaacagagctgaccgcatggcttatggactatcgcaataagaattttgcacaggctgaaatcgatgaagaggctgagcgcgatatatgggagctttaaaaacacaataaaacgagagatgcatagatctatgcgcttctcgttttttgtcgttttattgatattacatttatcgttttgcgctttgcttaactgttagagatgccaggtgaaaaaatgataataccataatttctcataatgtatgctgctatagagaattatgagtcttcggtatttttacgcagagaaaatataaagctgtgattttactgaaaatgcaccgaaaattcagagttaacacacatatcaaaggctgaggcggcttgacataaaaaggtaaagtagagtatactgatagtatagactgggggagtttcgaatgttttccattggagataaaattttttaccctatgcatggagtgggcgtcattgagggtatagaaaagaaaactgtcctcgaagaggaaagagagtattatatcattcggatcgcgtgcaagggtatgaacattatggtacctgtatattcgtgcgaggatattggaatgcgttatatctccgacccgtctacggttgcagaagtgataaagctgctttctgcgccttcaacgcctatgtctgccaactggaacaagagaaatcggcaaaatacggacaagctcaagacaggcgatatatttgattgtgccgaggtggtgagaaatcttatgcggcaggacagggcgaaaaagctatcgaccggagaaaagaggttgcttgacaatgccaaaaaggtgcttgcaagcgaaattatgtcggtaaacggcatatcaatgaaagcagccttgaaaatcatagatgagagtgtatagttttttcttgtctatgaaaggaagctttgcttttcagcacggaagccagactgtgcattcggtcttatttaaatttgaaagggggtgagaagatgataaagaagcttttcagaattgctatgacactgcttggcgttgctgtcggatacggagtattcttattggcgggattcttcgtagaattggaagggattatgggaaggacgctgtccgaaacggaaatgatgtggatagcggctgcgtttgaaattatttttgcaataatatttttcaagctgacgccggttgttacaaagcaggggaaaaaagctgcggctaatattgaaaacgagttgaaaggcgtatcgggcagcgatatggtgacaggtacagttggccttatcgcggggctcatcatcgcgtatcttttgtctcaggtgtatgctacattccagattacctggcttactgttacccttacgattgtcacatatatgatactcggatatttaggcatagtggtggcgacgaaaaagggtgcggacatcataaaaaacataaacaacgcgagaaaagtgcagcttgtaggaggcaaaggcaaaaacaagggtatggaagctgcgccgaaaatactcgatacgtcggtgataatagacggcagaatttctgacataatgcgtacgggttttatagaaggaagaataataattcctgagtttgtactcgttgagctcagacacattgccgattcgtcggattcgctcaaaagacagcgcggaagacgaggactcgatatcctgaacaagatacaggcggattacggtatagaaatatacaatactacggcggaaaaagcgctcgaggaaatacccgaagtcgatgtcaagctccttaagcttgcgcagataatgaacggtaaggttgttacaaacgattttaatttgaataaagtggcggcgataaagggtgtgccggtgctgaatataaatgagcttgcaaataccttaaagcctgtggtgcttccgggtgagaagatgcagctttttctggtcaaagaaggaaaagagcagaatcaggctgtcgcttatctcgatgacggcacaatgatagttgtggaagagggaaggaaatacatcggtcagactatagatgctgtcgttacaagtgtactgcagacagcggcagggcgtatgatatttgccaaacctaagaaataaaaaattgtcaattattataaatttataaaagcaggaggctgttatgtatagtggcaaaactgtcggtgtgataattgcagcggctggaagcggcacgcgcatggagcaggcagcaggacttccaaagcagtttatgcttatagacggcgtgccgatggtgagaaaaactgcggaagtgtttgcgcggaatgcatatgtggatgatatatgtatagctgtaaatggggcgtatgcaaaagaatatgaagaagcgctttcaggcttgcccaagatacgctgtaccgcagtgggcggtaaggagcgccagaactctgtaggcgaagcgcttaggcgcttagctgaggtgagcaagtttgattatgtaatgatacacgatgctgcaaggccgtatgtgacaaacgcggtcattgaggaatcgctcgcggcggcgctcagacacggggcggcagtggcggcagtgcccgtaaaggatacgataaggcagggcggaattacacttgagcgcgataatcttttctgtattcagacaccgcagacatttgagcgcagaataatcatagaggcgtacgagagagcatgctctgacggatatatcggtacggacgacggcagccttgtagagaggctcgggcggcctgttgccatatcgcagggtgactatgcgaacataaaaattacgacgaaagaggatttgcctatgaaattcagagtgggcacaggctatgatgtgcacagacttgaagcgggaagaccgcttattctcggaggagtcagggtgcctcacgataaaggacttctcggccattcggacgccgatgtgctggtgcatgcggtaatggacgcgctgcttggcgcgatagcggcaggtgatataggaaaacattttcccgataccgatccgcgctacaagggtatatcgagcataaagctgctggtttatgtaggaaatcttatccgcgagagcggctatgccgtgacaaacgtagatgcgacggtcatagcggaaaaaccgaaaatatcagcttatacagatgaaatgcgcgctaatatagcggaggctcttcgcatagatatacagagtgtaagcgttaaagctacgactacggagaaactcggctttacgggcagagaagaggggattgcagtacaggcggcggtgacggtcataggaagctgagtgatgaggcaggctgcggcggtgttctgtctgtacctgtagatttattcttagaatacgatataaattttatttataataaggagaactttagcaatgagactttcaaagatgcacataaagacgcttcgtgaagttccgaacgaagcggaaatagcgagccatatcctgcttttgaggacaggtatgataagaaaactcgtatcgggcgtgtatggatttatgccgcttggatggcgatcggtgcgcaaaatagaggatatagcgagagaagagatggacgcgacgggtgcgcaggagatatatatgtcagcagtgcagccggcggagctttggcaagagtcggggagatggtatgcatatggacctgagctctggagactcaaggacagaaatggcagggatttttgcctcgggcctactcacgaggaaattttcacagatattataagaaatgatgtaagctcctacaggcagctgccgctcaatctctatcagatacagaataagtacagagatgaggcaagaccgcgtttcggacttatgagaagccgtgaattcataatgaaagacgcgtattcgttcgataaggattatgatggtcttgatgtaagctataataaaatgtacgatgcatatacaaatatattcaatcgctgcggtctttctttcaggccggtagcggctgattcaggcgctattggcggcagcggctcgcatgagttcacagctttcgccgaggtaggagaatctgaaatagcatactgcgagcactgcgatatggcggcaacgatagagagagctgatgtcaaggatgatcctgctgataatgcggagatgcttcctatggaagaggtaaatactccgaacaccaagacgattgaagaggtggccaatttcctcgggctggacaagaaacagacgataaaagcgcttcttttcgttaagtatgacgagctcggaaacgagaatggatatgtggcggcgtttgtaagaggcgaccgagagcttaatatgatcaagcttgtgaacgctcttgatatacctgaacacgcgatcgcttttgccgacgaagaaaaaatgtcagaagcaacaggctgcgtaggcggatttaccggacctgtggggcttcacgactgtataatagttgtagacagtgagcttactgctatgaaaaatctctgtgcgggtgcgtgtaaaaaggattatcatataaagaatgtaaattatggcagagattatacgggcgatatagtgtgtgatataaaaacgcttaaagagggagatccatgccctgtatgcggtgcgcctgtaaagcatacacgcggcatagaggtaggacaggtgtttaaactcggtacgaaatattctgagccgatgggggcatactataaggatgaaaatcaggaagatcagcttatagttatgggttgctacggtattggcgtgacgaggacactggctgcaatagttgaacagcatcacgatgataacggcatcatctggcctatgtcggtggcgccttatcatgctattgtaacgctcataaaacctgatgacagcgtgcaggcagaagctgcggagagaatatacagtgagctggcaagagcgggggttgaagttctgctcgacgacagggatgaaagaccgggggttaagttcaaggatgcggatcttctcggtattcctgtaagaattacggtaggacgcggcgcagctgacggaatggttgaatataagctgagacgcgatgctgaaaaggcggatatgacgatttccgatgcgattgcggcagcaattaaaattgtaaatgaggaaagaagcggaagatagatgaaagaacttctcaggatgtttgcggctttttttaaaataggtttgtttaccttcggcggcggactggcgatgctgccgctgatacaaaaagccgctgtggacgattacaaatggctgacggaagaagaaatggtcgactgcgtggctgtggcgcaggcaatgcctggtgtcatagcgataaatacggcaacttatgtcggaaacagaaaaaggggcttcgccggagccctttttgctacgcttggggtaattttgccgtcgttcataattataataattgcagtgctgtttctcggcgctataggtgaaaatatatatgttaagggtgcatttacagctgtgacagcgtcttcgtgcgcgctcattatgtattcggcgtatacgctttcgcggcaggtggtgaaaggaccgttcacagcggtactggcggcgcttggctttgtgcttgtcgcttttttcgatgttaatgcagcgcttgttattgttgcaggcgcgcttgcaggcagtgtgtacagcgcagtaaaggggcgtcgggcagcaaacgcagcagtggaggctgcttctgcggatattgatgcggatgcagataatgcttctgatagtgtttctgaagatgacaataagatgagcgatgaggaaaaggatgacaagtaatggcgatatatttgactctttttacaatgttttttaaaatcggaatattcagctttggcggcgggctggcgatgctgcctttgatatttcagacggtggaaaaatcgggttttatgacggccgatgtgcttgcagacctcgtaccgctttcgcaggtaacaccgggacctgttgccgtaaatgcggcgacatatgttggatttgatgcgggaggggtgctcggtgcgatgtgttcgactataggtgtggcgctgccttcgttcatacttattatatcggtatcgtcttttttaaataagtttcatgaaagccgcgtcgtgacggggatttttgcaggcataaggccgatcactgccggactcatagcctctgctgtagttgtaatcggcaagaccgtgcttgtaaccggcaatcatataaatgctgtgccggctgtgatattcgtagtatcgttcgtgcttgcagcaaagttcaagctgagcccgatcaagataacgctgataatggcagtcgtgggagtgtttgcctgctcatagagaaaggcggcggtatttttggtcggaggacagcacaggctgtgaacaggcggagaatattaaggcagttttggcaagaaaaatgtcgaaaagtgacgattattgttgagagatgaatgcaattctggtagtaaacttgaaatatattccttgcagaaagcagccttgcatgatataattatttcatataaaattattaaggaggcttgacaaagatgatgaagcagggcataatcttagcaagcaagcaagcaa

SEQ ID NO: 2396 - DNA, 3531 bp, Unknown
  16S sequences of unknown bacteria
ccgccgaaggcaatgagcatcagtgctgccagcccggtcagatgcggccatacgagcagcaggctctgtccgagacttaagtatccgctaatcgcgccgaccagctgattaacggtcaccgcattgacggaacgaaccgtcggattcatgatcgtcgagactgcctcactgtagagataatacggcgaaatccggttcaggttcagattcagtgtataattgttcaggctgttgatcattgcatgataatcatctcccaccggatacacaccgtttgcaataatgcttgccaccaggctcatgaagatcgagaagaaaatccatacagagatcgatgccagtgcggaggtcgctgcatgtcggcacacgacggaaaacagaatcgaaagtgccagccaaaacgcaacataaattactgtaaaaatcagaaaaatcagaatccggagtacctcctccgtatccggtaccagtccggtcactgccattccgactgctccaagtgcaatgcccatcgagaaaatgacaattgcaatcaccgccgtaccggcgagaaactttccaatgataatcgaatcacggtagatcggctgcgcgaccagacggtttaaggtaccgttggcccgctcactgtttaccgcatcaaacccgagtgccagtccgacgattggcccgagaagggcgatgaaggacatgaacgacgggatcgagcttccactcgacgtatacagcttcaggaagatgaaattgctgtcctgtgagatcgcatcggaaagcccggagatcgcgccatacaggcttgcaaagctcgtcgccccgatcagaatcaacagaatgagaaagcgcttgctggtcaggtgatccgccagctccttacggatcagcgcatttcttcctgtgctgcctttaattgctgccggatttatgcttccagctatattttttctttgttttagactcattgctttcatcattctgccctgccttttcaaaataacgtctgtaaatctcatccagatcgccgccgcgctgatgcagatgcatcacggtatagtcatgctctccaaggaatttggtcagctgtggacggatatccttcttagaggtgatcataaaccggcgtccttccttttcgatcttcagaattccctgctgagcagacagcattccaagaatctggtcgtcacacggctctacatctacctcaagcagataggtgccgttcttctggatctgtgcttccagttctgccaaagtaccacatgcaatcaggctgccctgtacatagatgccgacccggtcgcacacctgctgaatctgctgcagctgatgagaagatatcaataccgtacgcccatcctttacggaaagctcccggatcaggttcagcagctcgcgcataccttccgggtcaatgccaagcgtcggctcatccatgatgatgacctgcggatccttcatcagcacatccgcaatgccgagtctctgccgcatacctttggagtacgttgctgtcttccggtctgcagcatctgtcatgccgacccgatccagcaagtagtcaatccgctcctccagctcctttccatgcatcccgttcagtcttccggtaaacctcagattctgtctgcctgtcatatcaccataaaagccgacattatccggaagatacccgaccatggattttacctccagcggatttcgcgtgcagtcacagcctgcaatctccgctgtgcctgccgttggctctgtcagaccgagcagcatcaggatcgttgtcgtctttcctgcgccgttcggtccgagcagtccgaagacttctcctttgtgaatggagagattcagatcgtttacagcgattttcgatccgtatcgcttcgtcagatgagaagtctgaataatattctccattttttcagccatgtttaccgtctcccgaattttttaaagatcattccaagtactgctaccagaactacaataattgcgattgccgcaatgccccatgttgtagaggtctttaccgatacacggagatctgcggaagaggatgcctcatcgttcttgatgctgatcgaagtcacatagtcgcccgtgataacgtcctgtgccggcttgattgtcgcagtaatctccttggttgcgcccgcttccagcgtatcaatcgtagattcactgaaggtgacctcccagtctgtcggtgcggaagacgtgaggttcagatttgtcagatcgacatttccgttgtttgtcacgctcaaggtcaccgtcgactccttatctgcataggcatccagactcaggcgtccgtccggtgtagaaagtgatacatcataagtacctgtgatggaaacggaaagatcctcagaaagattatcttctgaagaaatggccgttaccggaatggagtaatctcctttctccacatcatccggcggtgtcacagtcacggtcacaccctggctctgtcctgcatctacggtcaggcttgctacattcgtggtctctccggaaggagtaaaggtcgcctgccagccggtcggtacatctgccgccagtgcataagactgctcggtcgcccggttattcacgatcgtcgtatcaaaggtaaaggtcgtcccggatgcaccctgctgctccggatactcggaagtaaaggtgctctgcagcgcctcctccttgctgacggtgacagcaagctctaatgtatcgcttgcaccctttccgccatcggcctgcaattcaatcgtgtaagtaccatcctccgcatcctccggtactgtcagagaaaaatctgtttctgtcttgtcatctgtcgtggcatctccatcgacatgcactctcgtgatctggctgtttccgcccttaaaatatccgctccagttatccggcagtgactttacagacagatccgcatcataggactctccctctgcgcaggaaaaatcaagatcaaaattgacattatcgcctgccttcacagtcacgcccggatatgcggtgctcatgtcgagcccctcccctgctgcatacgcaggagctgccccaagcagcatcgctgcgagcattgaagcggccgtcagccctgctcctgtctttctcatcattccatttacgcctttcatcattcagaactccttccatgatttctcgagaccgatcagtatatatggccccggatccgcacccacaggtgctttctgtctgcatcagttgtggcaaaatacctcgatttcagactctgaaaatgattctagccggagattgtgttccttttttgatgaaattgtgttgctcctgtggaagaattgtgaaaaaagtgtgttaaaaagcaggcaaaaaaagctgcagaaaaaaatttttctgcagctcatcgctcatcttggtttacttactctgcgtcgtctgtattcagccctgtgataaattcatccagagaagaagtatttacagtataactcggcttctctgccgtcgtcgtatcctcagactgaagtccgtgatagactgataccccgacccatgcgaccagcg

SEQ ID NO: 2397 - DNA, 8473 bp, Unknown
  16S sequences of unknown bacteria
tttcaaagggtttttccctccccgcttacaaacaaggaggaaaaaactatggcagatctgaagatgctggctattgatctcggggcttcgagtgggcgcgggatcatcgggcggtttgacggtgagaggttgacgctggaggagaatcatcggtttccgagtgatccggtgactgttgcggggacgttttcatgggatattctcaggatattctttgagatcaagcaggctatcaataagtgcgcgctttcggcggataaggatatttcgactatcggtattgatacctggggcgtggattacggactgctcgataagaacgggaagctgattaagaatccggtgcattaccgggatactaggacggtcgggatacaggattacgcggagcggtttatgccgaggaagaggctgtatgagattacgggtatacagttctgtgatttcaatacggtgtggcagctctgcgcggagattagggataatccggagcttgtcgggattgccgataagatgctgaatattccggatcttctgaattatttcctgaccgggaagatgcagagtgagtatactattgcttctaccggcgcgctgcttgacgcgaggaccggggattggtcgcgggagataattgacgcgttcgggattccggagaggttgtttgctccgattgtcaagccggggacggttgtcggaccgctgcttgattcgatcaaggaggaggtcggggatatccgcgcgaatgtggtaaatgtggcgtcgcatgacacggcttcggctgtcgtcgcggtgccggctgtcagggggcaggatttcatattcatttcgtccggaacatggtcgcttatgggtactgagacaatgtcgcctattatcacggataagtcgtttaagtataatttcacgaacgagggtggattcggcggttcgatacggttccttaagaacatcatgggtctgtggctcgagcaggagtcccgccgtcagtggaagcgcgagggtaaggcgttctcgttcgacgagctgtcgaatgccgctatggcgtcgaagccttgccagtgcataatcaaccccgacgacccggcgttcggtgttccgggcaaccttccgaaggctatgcgtgagtattgcgagagaaccggacagcatattccggagaacgagggcgagattgtccgcgcgatattcgattcgctcgcgctcagatacaggtgggcggtcgaggctatcgacgatatgagggggacgagaatcccgttcatcaatatcgtcggaggcggaaccaaggaggagccgctgtcccagctctgcgccgacgcgtgcgcgcgaccggttctcgcgggaccggtcgaggctaccgctatcggaaatctcgcggtgcaggcgatatcctgcggcgagataaaggatctcgccgaggcgcgtgaggttgtccgcaattccttcgatgtgaagagctacgagccgcacggagacaaggatatgtgggacgacgcttacgggcgcttcaggaagctcatcggcgaataatatatcagcatgggaaaacataacgagaccgagaggtatttctcaaaaaagagcacgatagtcgccggaagcgcttcggacgagaatacctgcatacgccgcttcgacgacacgggcgtttatttcagaaatttcacatgtgacagcgggcgcggcggggagccggtcgagatactccagatcacggatatgcacttcaatctctgtgacgcggaggatctccgagaccccgagctcgccctgacgcataagtgccggaagtggaacgcggaaggcgtgtcggcgatatctgcggagaaggcgatggatttatcgaagtatttcgataagacaattatcaccggcgacactatggattatctatcgcacggcgcggcggagatgcttcgtgagtatatctgggacgtcgatccggacgcgctcgtgaccctcggcgggcatgagctgacaaaagagatggagaccggcgagcctgacaggacgccgctctccgaacggctcgcgtatcttgagaagatatggcggcacgatatgcactatcattccgaggtgatcggcgggaaggttctcgccgtcgcgctcgacaacagtcagtcgaagtatcttgaccgccagataccgcttctcagagaggacatcgacagggcgaggaaggacggactcgtgattctgatcttcgagcacgagccgctgtccactggattcccggaggacgcttctgtgaaggcgataaagagatatgacccagagagcgtcaattattattccggctccctcatcggttcggcggagagaaacgacgacccggcgacacgggagatctatgacgtgatcacccacagcgcggacgtgatacgcggaattttctgcgggcatgagcatagcgcgttcttcacgaagatcagagcctttacgccggacgggaaagagaccttcatccctcagccggtgctcgagggcaatgtttatgacggtcaggccggacacgtcatgcgaattacagtacattaatttcaattttcaaggagaaataacatgagcagcacaacaaaggcatacgagctcgcgaaggagctctacgcgtcgataggagtcgacaccgacaaagcgattgagagacttgagaagatcccggtatccatgcactgctggcagggcgacgacgtccgcggcttcgagaacccggacggcgacctcaccggcggtatccagacgaccggcaactaccccggaagagccaccaccatcgatgaactgagagccgacttcgaaaaagccatctccctcatccccggcaagaagagaatgaacctccacgcgatctatctcgacgcgcagggcgaaaaggtcgaccgcgaccagatcgaaccgaagcacttcgcgtcctgggtcgactgggcgaagaagaccggcgtcatgctcgacttcaacccgacctgcttctctcacccgctgagcgcttccggcttcactctttcgagtgccgacgagggtatccgcgcgttctggatcgagcactgcaagcgctccagaataatcgctgagtattttggacgtgagctcggcgaaactgcctgcaccaaccactggatcccagatggcttcaaggacattccggttgaccgctacgcgtggagggagcgccttatcgattcctacgataagatattcgctggtcaggatacaaaactcaacctgaactcggtcgaaagcaaagtcttcggaatcggcgcagagtcctgcaccatcggctccctcgaaatgtgcctcggctacgccgttaagaacaacatcatgctcaccctcgacaccggtcacttccacccgaccgaagtcgtctccgacaagatttcgtccgcgctcctcttcctgaacgacgtaatgctccacgtctcccgcccggtacgctgggactcagaccacgtagtcatcttcgacgacgaactcaaatacatctctcaggaaatcatccgcggcaacttcgaaaagcgcgtccacatcggactcgacttctttgacgcctccatcaaccgcatcgccgcgtgggtaatcggcaccagaaacatgcagaaagccctcatgtacgccctcctcgagccgaccgaaaaactcaaaaagctcgaagtcgaaggcgactacacctcaagactcgccctcctcgaagaatacaaatcctacccgtttgcggcagtatgggactactactgcgaaaagaacaacgttccggtccgcgacgcttggctcgccgaagtcaagaaatacgaagccgacgtgctcagcaagagataaagattcgcagggggaggaaaacctctttgaaaagaggttttcctccccctgcaccccctcttttccagaaactttacaaaaaacgtccgggaaacgacacggacgttttttgtcgttcacggtgtattgacaacaagaggcgaatgtgatataatattatcaaaataccggaagatgcgaaaggattggacacttcatgaaaaaagatgacgacgaagacaaagtctgcgaatactgccggagagccatacgcgtcgccgacaccggcgatatgctctgcgaaaaacgcggagtcgtccccggcggcttctcctgccgcagattcgtctacgacccactcaaacgcgtcccgcgcagaatgaaaatactcattcccgacgagatcataaccgatatatgaaaggagccccgccatatgcttgaagtcgtctcaacagacacaatgcgccgcagcgacgccgcaatgagcgaaaaaggcgtaaactcaaaggaactcatgtgccgcgccggtcaagccatctttgaaaccgtcagaaagctgaacctctggaagccgcccgtggcggtcatttgcggacccggaaacaacggcggcgacggatacgcgctcgcctccctcctgaacctcgccgacatcgactgcgtcatattcgccctgtcagacaaggtcacggagacaagcagaccttttctcgacgcggcgatcggtctcggaacgaaaatgacgcggaataccgacgagctgacgcccggacgcttcgggactgtcgtcgactgcatattcggcaccggcttcaaaggcgcgccgaaggaaccgtatctcacagcgatcagaaagataaacgaaagcggcgcttatataatctcggtcgacatcaacagcggtctcggaggagacagcggcatcgcggacggcgaggtggtccgctccgatctcacggtgtcgataggctgccgcaagagcggtctgtacatgaactatgccaaggactatataaaaaagctcgtgaactgcgacattggaatagacctcctcgacgaaccggcaaggcttgtcgacgccccggcgataaagcggctttttgtcagggaagagcacaacacgaacaaaggcgatttcggctacgtcgccctgatcggcggctcgcccgaatacagcggcgccgccaagctcgcgaacctgtcgctgtccgccctgcgctccggcgccggggtggcgaagctcgcggttccgaagagtctttcggatgccgtactgccgtatattctcgagagcacacttttcccgcttgatgacagagacgggaaatatgtcttcaacgaggacaccgccacaaagctcctttcgcacacgagggcggcggcgataggcatgggtatgggtcggagcgacgaggtcgcgaagctcatagactacgcgctgacaaaatatgacggacggctcatcatcgacgccgacggactgaacactctcgcggggatggacagggaaaagctgaaaaacgccgcctgccgcgtcatccttaccccgcatccgaaggagttcgagcggatttccgggataaagtttgaggagttctgctatgacattcctggagcggcgaaacgcttcgcggaagagaacaatgtcattcttctgctcaagggcgcggctaccgttatcaccgacggaaagtcaacctatatcgtcgaccgcggctgcacgggaatgtcgaccgcggggagcggggatgtgctctcgggcatactcgccggtatctgcggatatgtgaaggacgaggacctgacgctcggcgtcgcggcgggagcgtatctgaacggccgcgcgggagagctcgctcaggagaatatatccgcggtatcgatgctgtccggcgacaccgtagcgcatattccggacgccgtgcgggagatactcgcggcgggggacgagaccgcatccgaaccccgatggggcgaaatatgatctgaaaacatgaccgttatcctgtggacagttgtctgtgaaaatgtaaagtggagttttccgggcgctgtcaattccgggattacggtcattttttccctgtattacgggcttttcgcgatttgacatcgattttacatagtgagcctttttcattttacacgcctacggtatgatatagatgtaccacagataaggcaaataaaaaatcagaaaatgaaggagatacttcaatatgaaaatcagaaacataatcgcgctcgcactcatggcgtctgtcacggcgctctccgccataggctgctcggagaagaccaccggaaccgtctcgaccgacggctcgacgtcgatggaaaaggtcatcggcgctctcggcgagtctttcatggaacagaacaagggagtgacctttacatataacccgaccggctccggttccggaatctccgccgtgtccgagggacgctgcgacataggtctctcgagccgcgcgctcaaggacgacgagaaggctggaggcctcaccgagactgtcctcgcttacgacggcatcgcgatcatcgtcaacaatgaaaacaaggtcgaggatctcacccttgaccagatagcgaagatctacaccggtgagatcaccgactggtccgaggtcggcggcggctccggcgagatcgttctcatcggacgtgaagccggaagcggcacgcgtgacggcttcgagtcgatcacgaacaccaaggactcctgcaagtatcgtcaggagcttacttccaccggcgacgtcatcacgaccgtttcacagaacccgaacgcgataggctacgcgtctctcgcggctgtcaaggacaccgtcaaagcgctcaaggtcggcggcgtgactcctgctgaggcaaccgtcaaggacggcagctacgttgtccagcgtccgttcgtgcttgtcacgaagaccggaaccacgctctctgacgcggctcagaagttcttcgactacgctacctcgaaggacgcggccggcataatctccgcggctggcgctgttgcggctaacggctgatggaaaaacaaatttcggaaaagtccggaaagatactgcccgggaccgccgtgaccgggcggtcccggtcttttgtcagtgaaaacgagaccggcgggagcggtgaggaagagttgaagatgacgactgtaagtgaaaacaaaaaagacggacgacgcggcgtcgaccgcaaaaggctgtttgaggatatcatccacggaatatttctcgtgctcgggctcataaccgtcggatgcgtgctgcttatcacggtttatctcgtgatctcaggaataccggcgatacacgagatcgggcttgtgaaattcttgttcggaaagaaatgggcgtcgaccgcggcggagccctcgttcggcatactgccgttcatcctcacgagtatatggggaaccggcggagcgatacttatcggcgttccgataggcttcttcgcggcggtctatctcgcaaaattcgcgcccgcgaaggtcaggagcgtaatggagtcggcggtcagcctgctcgccggtataccttcggtcgtttacggccttgtcggaatgcttatcctcgttccggggataagaaagctattcggagtgccggacggcgcgagccttctcgcggctgtcatagtcctcgcgataatgatacttccgtccatcatcaaggtgtcgatgaccgcgctcgacgcggtaccgaaggaatacgaggacgcgtcgctcgcgctcggcgcgacgcctgtcgagacctgcttcagggtatcggtcccggcggcgaagagcggcatcgcggcggcggtcgtcatgggcgtcggacgcgcgatcggcgaggcgatggcggtcatgatggtctccggcaacgtgccgaatatgccgtcgctcttcgggagcgtcagattcctgacgaccgcggtggcgagcgagatgtcgtattcgggcggtctccagagacaggcgctgttctcgatagcgctcgtgctgttcctcttcataatgcttataaacgccgcgctgaacttcttcctgaagcgcgggaaccgttcttaaaagggggaattcatatgctgagagcaaaactttcaaaacgccgtcgcgcttatatgacggcgatgaacatacttatgcgcgcggcggcgctcatctgcgcctctcttgtcgttttcatgatcggttacgtcatgtacaagggactgccgaacatcacgtggaagctcctgtccacaaaaccgagttatcttaccggcgacatcggcatacttccggatatactcaatacgctgtatatcgtgataacgtcccttgtgatagtccttccgctcggcgtcggggcggcggtctacctcactgagtacgcgaagaacaagaagctcgtcgccgtgatagaatacgcggcggagacgctctccggcattccgtcgataatctacggtcttgtcggaatgctgttcttctgccagtttctcgggatggcgacctctctcatggcgggcgcgctgacgctcgtcataatgaacctcccgactataatgcggacgactgaggagagcctcaagaccgttccgcagagctaccgtgagggcgctttcggtctcggcgccgggaagtggagagttatacgcactgtcgtgctcccgggctgcgtcgacggtatcg

SEQ ID NO: 2398 - DNA, 30640 bp, Unknown
  16S sequences of unknown bacteria
atgaattctgttattgataatttttctttttcttttatgtaataagatccgaagatcgccggcgcaagtacaagaacagaggatttaactccgaaattaaatcttgtaaaaagcaggcacatggtcacaacacctaagttaaaagccagcagtgtaaaaccgaaaaatttgattttaagtttttcctcattgccgttaagatatgtttcaacaatgccggtgacaaactgccttatattgtttgtgcaaaagatagttgaactgccgtagccgtatgccccgtggaaacaacaccactgaaaagacattgcaaaaaatgtggggtacaaacctacggtaggcggcaatgtgtccggcaaaagccaaagcaaaattgcgcaggcacaagttatttttaaagataacatttttgtgctgattattgtatgtttgggcaaccataccgcaagggtaataccaagggaatatatcaataagcctaatatctttaacatcattgtaaagatattccccttaaaaaagtttgcgaaaatgcttatcatattggctgttcccgcattgccgaaactgccggcaaagctgaataccgtatatgtacccataaagccgccgatatacgtcatacagtagtgaatacgcgcgtctaaatccccggcggtaagtgttttgtttttcatattttcctctccaagtaaatcacatatttaaaataaaatccaaagtgtattttacacctaaatcggctttgagtaaacataaattttcaaaaacaaaacagcctcaaagggctgttttaaaattatgatattactttttctgccttttttgcccttttaggcaaagaggaaaaatcatattccgatataataaggcttacaaaaatcaatgttccccctacaagggtggctttcgtcagcggctcaaagcccaatgatatactgaaaattgtgccgaaaaccccttcaagggtcataatcaaactggcagtggaagcaggtatgtgcctttgagcttcaacttgcaaagactgtgcgataaagtttgaaagtattacaagatacgcaaggggcaaaatgccgcttttccaatgaactgtagaaagccccaaaccgccctcaaagaacattgcgtaaattccgccgcctataaacaggcacacagccaaaaggaatgaagtctgtgaaaaatgggcgtctttcggctggcgtgaaagcataatcaccgacataccaaagaaaaacgaacctataatggtgtatgtgtcccctatatccaaagtcaggttatttgagaaaaaacttgtcattacagccatgccgtaagcacagatgaaaacagcaattatattttgctttttcggctttattccgtacattgcccaaactataaaaggcaccattacaacgcttattgtggataaaaaggaagacttcgccggggttgtataagctgcgccgatagcctgaaacaaaaatcccaaaaagttgaaaacccctgcggaaagcccgattacaaatgtctttttgctcatggcaaaaacctgtttcgagaagaaaatcagcataagcagtgcgtaaaaaaagccacggtacatattcagctgtcccccggcaaggcctgcatttaccgcaagttttatggcgatgcagccgccgccccacattatagaaaccaaaaacaacaaaagtgcagccttatttttgctcatagtttatacctccgttttgaaaattcatctttttcggtaatattcacttaaaaaaaataccgcaaaacaatctcttacggcattaagccgacacctgcgagaatgtctacgatacatcaccgaaccttatcacggtgacaaggtctgtgttaaattacagctgtattgtacaggatagaaaggtaaaagtcaatagcggaaaagcgctttaacaggcagataatttaaaacaaacagccgacccctaagggccggccgtcagctgtatttattaagaggagaaaaagttttttaattcttgtgctacggttatagtttacaaaaactttgtgtgtaatttgggggtaaataattaacctttttttaacaaaaccggctatttatgaattggcggttaaataattttgacattatgtttttttatgataaaattaaatacaaacagccgggggattaactttaaattaaagcaagccggccgtaaattaaacacaggcggaaaagcgaatgataaaacttattttatgggatattgacggcacattgctggattttgaagctgcggaaaaagcggcaataaaaaatctttttataaaattcggctttggtgaatgtaccgatgaaatgctccgggtgtactccggtataaacagaaaatattggcaggcattggaaaaaggagaaatgacaaaagccgaaattttggtaaacagatttagggaatttttttctctttacggtttaaatcgggaaaaagccggggaatttaacacagcttatcaaaatgctttaggggatacaatcgtattttgcgatgacagcaaggaaattgtcacaaaattaaaaacaaaggttttacaggcaggggcgtccaacggcacaattaccgcacaaaacaaaaagctgaaaaattccgggtttgacaagttattcgatggggtctttctttccgaggcggtaggttacgaaaaacccaacataaatttctttaaacctgtatttgaaaaattcccggacatagcaaaagacgaaataatcatagtggggggacagccttacaagcgatattcccggcggcataaacgcaggaataaaaacctgttggtacaatcccaccggggcagaaaacaaaagcggccttgttccggactatgaaataaaagatttacacgaaatttttaatattataaatatgtaatatatcatactatattttgcaaatacaaagggcatttattattatatttataattgcaactgccggttgacaaaatgacagttccgtttggtggtatgcaacgggcaaatattgtatcatacagacagaaaaatatttcggagggaagttatgacattatccgacaaaatcatagaagaaagaaaaaagaagggctggtcacaagaagaactggcttataaattggaagtttcaagacaggcggtttccaaatgggaaagcgccggttctgtgccggacttgcaaagaataatacagcttgcggatttattcggcgtaagcaccgattatcttttaagggacaatgggcaggagagcaaagagggtgaaccctacacaagggaaaaacccgactttcgccgggaaaccgcagagccctttacagaggaaagccgtattttaagcagaatttcatcagagcaggcaaatcggtttttggaaataaaaaggcttattgccggccaaggggcaaaccgggtgtcaatgtgtattataagcccggtggttctcatagttttaattggaatggccggcgacagatttttacatatatccgaaaattttgcaatgggcgtaggcgcggcctttttgctgtgtcttgttgcggcggcggtttttattcttatccgttgcggcggagatataaaagatatggaatacttggaaaaagaagattttgaagcggaatacgccgtcattcaaatggcacaagagggtaaaatccggtttgcccctacatacaacaggggaattgccataggcgcggtgctttgtattatttcttctgtgccacttattctttgcggcattgcggaaagtacaccgggttatgtttattgcctttgtgtgggtatattgctgattgtggtggccgttgcggttaatataattgtaagggtgatggtgataaacaacagctttgatattttattgcaagagggtgattttaccccggaggaaaagctcataaaaagaaaaatcggcccatgggcgggtatatactggtgtttggctacggcactgtacctgtttttgagctttcaagatatgaagtggggaaccacctgggttgtttggcccattgcccggttgctgtttgccgccttttccggcattgtgcgaatatacgccaaaagagaaaaataacacagcacttgccacatttgcccgggggatgtataatctttacaaaaaaaggaaaggcaaaccatggacagagagacgcaaatcaggacgattaaggaaagcatcgccgcagttgataaaatcagcagagacatttttacactgctgcgtgatattgactatatcctgccggaggcaaaacggcaaagcagggtaagtgcgattttgcaaaaaacaagagaggatttatccgacgaggccgacagacttgaaaagacactgtgtgagcttgaagattaaaggctgatatttcacagataattaacataaatttaatttttttatcgccggtttttcacaggcagactttatactaaaaccgtaagttaaagcaatgcccaaccagaagcggataaaggtattgttaaatcaaatactttggcggtttcgattgcagccggcacccttatgtgcctgaaaaccgaaataccgcctgaacattttcattttcctctttgagaaaagcgacccgtgggtcgcttttctttttgtgtggcttttaaaacccggctgtaacccacaaggcaaaaaataaaatcaaaggttttaaaaattagttagcacaaggtaattatttcgggatttcctctttacaacggcgggaaaatgtagtaaactatcagatagttagcaaacgctaacctaatttaagaaggagaagaactatgcttttaatcaacaaaacaatgctggatctttcaaagggtctgcgcaggtacataatttgtattgctttgcttaaagtggctgttttggcggctaccgcacagtttgcacaaaacatatccgcctttatgggcaatatgctcgcaccgtcaatgtcggcggcggacttaaaaggggcgatactttccgcattttttgcggctgcaattatgcttataggggaacttgtaataggggaaatcgagtttcgctgtaccgcaaaatcaagaattttattaagggaaaaaatattttccaaaatgttggagcttgatgtgggcaacattgaaaaaataggtgccacaagggcagttacagacgctgtggacggtgtggagtccatgcaaatttactattcaaaatatttgcccggtttgctttacagcttacttgcaccgatatatttgtttttcaggcttaaagatgtgtcatttaaagtggctttgctgctgtttatagtgtcatttataattatgcctattaacaacattttcagaaaaatgatagacaccttgaaaaaggaatactggggttccttttccgatttgacagcttattatttggaatccctccgttcacttacaacaatcaaactgtttaatcaggacggcaacaggtttgaaactcttaaaaccaaggcctacaattttaagtccataattatgaaaacaatgaagatgaacttttcatcattcttgcttacggacacaatgatttacgcctctgtttttgtcgcaacgattatgacctgcggcgaagttgtaaagggcaatttaagtctttccggggcacttatggtgcttatgctgtcttacagctttttcacggctgttcgctctttgatgaacgcaactcatcaggctttgacaggggttgcggcggcgcagaatgttgccgaaattttggatatagacacaagcagaccttaccttgcacaggacaaaaaagaagatgccgatggcattgtgtttagagatgttgatttttcctatgataaaaagagaaaaatcctctcggatatagatattgatattgaaaaaggcaagatgaccgcttttgtgggcaagtccggctgcggcaaaagtacaatcgccgcattgcttatgaggtttttggacgccgacaagggcaaaatcaccattgacggcacaaattacatttcaatctctcccgaagaactcagaaaaaacatagttatggttccgcaaaccgtaacaattttcacaggaacaataagggaaaatcttctcattgccaacccaaaagcaacagatgaagaaatgtggcaggccctggaagatgtaaaacttgcggattgggtaaaatcacttcccgaggggcttgatacccaggtgggggatgccggcggcaaactttccggcggacagcgacagaaaaccggtatcgcaagagcccttttgaaaaacgccccttacataatttttgacgaggccacttcaagcgttgacatcaattccgaaaacgaaatctgggcttgtataaattctcttgcgcctaagagaacacctattgtaatttctcaccgtctttccacaatcggcaaggcggatatgatatatgttatcaacggcggcaaagttcgggaaaagggcaatcaccggcagttaatggcagaaaacggtttgtacaaagaccttgttaccgagcaggctcggcttgaaaatcacggcgagaggagagaggaaaatgaatgagaaaaaacgcggatttttacagatgtctgtccgtctttttaaaatagcaaaagaagtaaagggcaaacttataatttcaaccttggcctctgttttcggaaatatagggcacctggggcttatgggcttcggcgcaatgatgatactttcctacgcaggcctgaccggttggggcaatagcttaacatggcggattttaatgggcatttccgcatttacgattatgatttgccgctttaccgaggggcttgtatcccacgatgcggcgtacaccctcctccgggatatgcgtgtacatatgtttaaagttgtaaaagaccttgctccggcctgcttaatggacaggcaaaagggtgatattttgtcggttgcggttgcggatatagaaaccatcgaatttttctttgcccacacaatcggccctgtgtttacggttattctcctgcctttgacaactttgattatcgccggcaaggtgaatgtgatttttgtttgggttcttttgcctttgtacttaataatatcggttatactgccttacatctcccttaaagccggtataaatgtaggcagaaagtaccgccgggatgtgggcaaattaaaaagccatgttttggaatccgtttacggcatgagtgatatacagattttcggcatcggcgatgagagaaaaaaagaagttattcggcagacggaaaagataaataaatcggctcatgttatcacatggcaccgccagcttgttacaagcgcacctacattctttatctatcttgcgagaattttgattatcgccgtggcctcctaccttgcggcaaatggtgaaagcgacccggtgggggtaattgtgctgtcctttgtggtttccgcttccttttcctcatctcaaagtcttacaatggttgtaacttcccttttggaaacatttgccgccgcagaaagactgtttgacttagaggacacacagccggccgttacagaggcagaacacccggttgagcttggcaaaatagagaaaatcgaatttaaaaatgtctcctttgcttacaataaagggggaaagccggtgcttgaaaaccttaatcttgtaataagcggaaaagataaaatcggcgttatgggtgcaagcggcataggcaaatccaccattatccgtttgcttttgagattttgggatgttacctccggtgaaattcttataaacggcataaatataaaggacataagcctttacagcctgcgcagccacattgcccttttggaacaggacacatttatatttaacgacacaatagcaaacaatatcgcctttggcaaaccaacggcaactcttgatgagataaaggttgccgcaaagagggcaggtttggcggaatttatcgaaaccctgcccaacaaatacgatacggatatgggcgagttaggctcccgtctttccggcggcgagcgccagcgtgtgggcatcgcaagggttatgctgacaaatccggatatgctggttatggacgaacctacttccgctttggacataataaacgaaaaaggattgcttaaaacccttgaccgggaatataaagacaagatgataatgattgtatcccacaggcggtcaacattaaccgactgcaacagaattttaacggtgaacggcggaacgcttacggaaaaaactctgtaagaggtaaatttatgtttgtagaacttaaaaatatagaaaaatcctacggccagggagaaaacagggtaaatgttttaaagggcataaacttatcaatcaaaaagggggaattttgcgttttgcttgggccttccggctccggcaaaagcacccttttgaatataatcggaggcatagaccatgcggacagcggtgaaatttacataggcggtgacaagatgaccggccttagcgaaaagaaccttacattgtacaggcgcaaccatttgggatatatttttcaaatgtacaaccttatacccaacctgacggttgaagaaaatattgaagttggggcttatctctcccacagtcctttggatttggacgaacttttacacaccttgggcttgtacgaacaccgccgcaaactgccaaaccggctttccggcggtcaacagcagagatgtgccataggcagggctatcatcaaaaacccggatattcttctctgcgacgagccaaccggcgctttggactacaacacatcaaaggagatcttaaaacttatcgaaaccgtaaaccaaaaatacggcaacacggttataatggtaactcacaatgacgccattaaaaatatggcggacagggttgtgcgcatccgtgacggccgggttctcagcgataagctgaatgaaattaaggtttcggcagaagatttggagtggtaatatgaaaaaccccctttacaaaagaataatcccacagctcaaagacgaagccggtaagtacattgccattgtactgcttatggtgtttacaatcggtgtgtgttccgggtttaaaagtgcctccggcagtatgataaccacatacaacaacagctttcgggattacaatatcgaggacggcaagtttaccttggctgccaaggccaacaaagctcaaataaaaaccatagaagatgccggagtgaaaatttacaataacttttatgtggagcgcccccttacaaattcaagcaccattagaattttccaaaagcgcacggaggtggacttggaatgtcttatggagggcaaattcccggaaaacccgggggaaattgccatagacagaatgtatgcggaaaataataacctttccctgggagatattataaccgacggggaaaaaagttggcagattgtagggcttgtggcactttccgattacagctgcctgttccaaaacaacagcgacgccatgtttgactcgataaaattcggcgtgggcattgtgacccgggcagagtttgcaacttttgacagccaacaaatcacttacagctacgcttggaagtacaacaccccgccggcggataaagcaggggaaaaagaggcggccgaggatttgttaaaaacagtaaaccgtgaatgtcaccttaccgattacacaccgggctatctaaatcaagccatacactttaccggtgacgatatgggcggcgacagtgtcatgatggacgcccttttgtacattgtggtgggcattatggcctttatatttgcggttaccacattggacaccataaacaaagaatcatcgattatcggcacacttaaagccatgggttacacaggccgagaaatagtcatgcactaccttgcccctacggtggttattacggcggtaagctcagttgcaggcaatattttaggctatacatattttgcaaattactgcgcgggtctttattataacagttacagtttgcctacattcctgcccgggtttaacctatccgcacttttgcaaaccactgttttaccggtagtgctgatgtttgtcataaactacgggctccttgcctcaaaacttaaatactcccctttaagatttttaaggagagatataagcggcaaaaagagcaagagagctttctatttaagcagaaaaatcccgttcttttcacgctttggcatcagaacggtttaccaaaatctttcaaattacttaatgttgtttgtgggcattatatttgtaaatcttttactgttgttcggtttgattttcccctcgattatgaactattacacccggcgagtggccgaaaatatgatagccgactatcagtatatgctgacaattcccgttgaacggacaaatgaggaaaacaaacttgaaagcacgataaatatgcttaaatttgcaaatgaagtgcagacggaaaacagggatcgggaaaaattctccgcttacagccttttggctgtggactctgtgtttgacggagaacctgttactctttacggcatagagaaaaattcaaaatatgtggatttggatttacagccgggagatgtttacatttcctccgcttaccgggataagtttttaatcggtgtgggagataccatagttctccgtgaggagtacgaagataaaacctatgctttaaaagttaccggtgtttatgattacgacggccgggtgcgggtttttgcggatattgacagtcttaacacctggtttgacttaggtgagggctacttctgcggttatttttcatcttcacccatagaagatattgacgaaaagtacatcggtacggttatagatatagtggctcttacaaaaatttcaaggcagcttttaacatctatgggcggcatgatgaatttgataaacgggttctctgttgccatgtttgcggttgtggtttatattctctcaaaggttataatcgacaaaaacgcaaattcaatttcaatggcaaaggttttaggatattcaaacggggaaatagcaaaactttacataatacccacaacggttatggtggtgctgtttattttaatcagcttgccgatagaaaatcatattatgtactatgttttccgtgaagttctgctcacacaaatttccggctacttaccttactatcttgacccggttatccctgtacaaatgttctgctacggcctgggcacataccttgttgtggcgattatggagtacagaaagattaaaaatgtgcctatgaacgaggctcttaaaaatgtggagtaatataaaatgaaaaagaagatattatttgcgttgtgcttggcattttgttttgggggcgggcttttttacattaagaataaggagggcgaacctgccgacagcaaagcacagccggtttatgaaattataaatgaaaacacaggggataaatcatctgccaaaacagaaaagatatatgacgaaaccggcccggacaaagccgagaccgttcgcataaaagccgaccggtacggcaacaaaaaagaggtaactgtggaaaccacccttaaagccgggaaagatggggatgttatagaggactttacaacccttacggatataaaaaataaagagggtgacgaggaatacaccctttccgacgacggcacaattatttggcaaaataagggcgaggatattaaataccggggcaaaagcgacaaagaactgcccataaccgtaaaagttacatattacttagagggtaaacaggtgacggcaggggaaattgcaggcaaagccggcaatgtgaaaatccgttttgactatcaaaacaacaccgccggctatttcaccgaagacggcgttaaaaccaaggcaaccgtgccttttgcggcaatttccgcagtatttttggacggtgaaaaatttgccgatgtaaaggtggaaaacggcaaagccctaaaagccgacggcagtattgccgcaatgggttacgccttgccggggcttagccgggggcttaacttaaagggctatgaggccacaaaggaaatagacctgccggaatatgtggaaatttccgcatacacaaccgactttcaaatagaatacacagcaacggttttcacaaacggactgtttgaagatataaaaaacagcgatttaaaagacattgacgatttgcgcaccgaccttgacgatatgcaacagggcgttgacaaaatgagcgatgccgggggcaagctctccgatggctttgcggaatttaaaaagtaccttaaagagtacaccgacaatgttgaccttttaagcaagtggtcagcctcggtggcagatgcactgtccgcaagccgggggctggaggcgggattgacagacctttccggcaatgttaccgccttaaatgccgaaatttccgccttggatataccttcccttgaccgggagagccaaaatgccgtaaacgatataagcacacagctgccgattttgaaaacctatattgacaacttgaacagtaaaatttcggctttgacaacttttaaaacagaacttgaaaatcgggtgaatgcccttaacggcatcagttacgacggcacaaaaacggctatcaaaaatgccttttcggcggctatcggcgacagtgttgacgaaagtacaaaacagcggattttaaacgccgttgattacgacgcctgcttagccgacatcaaaacgcaaattcgggatttgcaaacaatgtttaacgatgttttgcaaaagtacccccgggaaatagacaccgacttgcggaatatgcaaaccgctgttgacaggattaaatccgcctacgaaaaactggaaaatacggattttaataccaccctggccggctgcaaaaccaaaacggcagatattttggccgaaaccgcagccgcaaaagcacaggcagaggggataaacgccggcttcggggccataagccaaagcgcccctgccgcaaaagttttaagcgaaaaattgccccgggcaagcacagctctcacaaaatccgcagacaccgtagaatccgcaataaacgaatttaaaaacgccataaatgagtttaaggaggaatccgttaaagaaatttcaaaaatcgggggagaaaaccttacaaatatgaaaaggcgaattatggcaacccgtgacgcagacaaggcctttaaaaacttcggcggcattgcaaaaggcaaacagggcagcgttgtgtttatagtggaaacagaggaagtaaaaacccaggataaaaattaaaagttcaacccatttaacggataaaaattttttgtagaagtagcacaaatgagacggaaaattccgcctcattttctgtttgcaaagaaagtctgattttgatataatattgaaaaatatgagagaggccaaaagtatgacagtagcaggtaaaaagttatcagataatgatttctgcggcagttttgtcacttttaacggcttaaaaggcacaaccgtcttttcttattttaatatttaacatttgccgagggatttttgtcccctcggttatttttatatgggagaaaggtaatatgaattcttacaacaaaaagattgtcttggaaaatgggcgagagttttacggttacggtttcggtgcggataccgaggccataaacgaaatagtttttaacacatctatggtaggctatcaggaaattgtgtccgacccctcttacacagggcaggccgttgttatgacatatcctcttatcggcaactacggtatgaacgatgaggactacgaaacaaaagtgccctcaatcggcggccttatagtaagggagtacaacgacacgccgtcaaatttcagatacacaaaaactttaagcgaagttttggaagaaaacaatatccccggcatacagggaattgacacaagagccgttgtagggataatccgccgtgagggtgcgcagaaagttatgatttgctctgcggacacccctctttggtctgctcttgaaaaaataaaggcctacaacccaaagccaaacgaagttgaaagggtttcctgcaagaaaacttggttttcaagaactcccgaccacaagtatgatgtggttgcaatagactgcggcataaagctgaatatcatacgcaaattaaatcaaaagggctgcaatgttatcgttgtgccatttgacaccccacgggaaaaaataatgtcattccggccggacggtttgttcctttccaacggcccaggcgacccggaaaatgtaaccccggtaattgaaaccgtaaaagaattaaggggcaagctgcctatattcggtatatgcctggggcatcaaatgataagccttgcttacggtgcaaaaacctataaaatgaaattcggccacagaggcggcaatcacccggttaaaaatcttgaaaccggcaagatagaaattacatctcaaaaccactctttcgccgttgatgtggactctttaaaggacaccaagttgaaacttacccacataaaccttttggacaacaccgccgaaggggtagaatgtgtacgggataaaatattctcggtacagtatcacccggaatccgccccgggaccacaggattcttcatatctttttgataaatttatctcaatgatggaaaaggagaaaaatcacaatgcctaagcgtactgatattaaaaaaatacttgttatcggctccggccctatcgtaataggacaggccgcagaatttgactatgccggcacacaggcctgccttgccttgaaagaggagggttatcaggttgttttggtaaactccaaccctgccacgattatgacagacacccggattgccgacaaggtttacatggaacctttgaaccttgaatatgttgcaaaaattataagacatgagcgcccggacgcaattttgccctcactggggggacaaacaggtttgaatttggctgttcggctccgggaaaaaggggttttggaagagtgcggcgttgaaattttaggcacatctttccaatctattaaaaaggccgaggacagagaactatttaaggaaatgtgtgaaaaaatcggcgagccggtcatctcatcggacattgccacaaccgttgagcacggccttgaaatcgcaaataaaataggttacccggttattttgcgcccggcctttacacttgggggcaccggcggcggttttgccgccaatgacgaagaacttaaacatgttatggcaaatgccctggaactttccccggtaaatcaggttttggtggaaaaatccgtcaagggttacaaggaaatcgaatacgaggtaatgcgtgattcaaacgacaccgccattacgatttgtaatatggaaaaccttgacccggtgggcatacacacaggtgactcgatagttgttgccccgtcacagacccttacgaataaggaataccaaatgctccgtgattccgctttgaaaattattcgtgaacttgaaatcgaagggggctgtaatgttcagtttgcccttgacccgcactcttttaaatactatcttatcgaggtaaacccaagagtatcccgttcttccgcccttgcttcaaagcggagcggctacccgatagcaagagtttccgcaaaaatcgcagtgggtatgactttggacgaaattcaaattgccaacaccccggcttcctttgaacctgctttggactatgttgtaaccaagattgcaaggttcccatttgataaattcgacggcgcatcaaatgttctttccacacagatgaaagccacaggtgaagttatggcggtaggcagaacatttgaagaatctcttttaaaggcgattcgctctttggaaacaggcaaatgccatatctatgacccgaagtttgaccggatgagcgaaaaagatctccttgactatatcgcaataggcaccgacgacagaatttacgccattgccgcccttatccgcaaaggcacgggactttacagaattgtaaacgccaccaagatagatttgttctttcttgaaaagatttcccacattacagaaatcgaaaaacttgttgccgccaatcctttcgacacagcggttttgtacgaagctaagagaaacggcttctccgataagtacatcggccaaatttggggcaaaagcgaaaaggagatattccttttccgcaaggaaaagggcataatgccggtttacaaaatgattgatacctgcgccggggaattttccgcctatgtgccctatttctactccacatacgagcaggaaaacgaatcagttgtttccgacaaagaaaagattatcgttttaggctccggccctatcagaataggccagggtgtagagtttgactactcaacggtacacgcaatttgggcaattcagcaggcgggatacgaggcaattatcataaacaataacccggagacggtttcaacagactacaccacatcggataaactttactttgaacctctgtgcgtagaagatgttatgaatgttattcggcttgaaaagcctaagggagttatagttacattaggcggccaaacggctataaacttggccgacgatatagcaagtttgggagttaatatcgtaggcacaggggtcgaggccatcgacagagccgaaaaccgtgacagctttgaaaaaattatggttaaattgggcatacctcaaccgaaaggacttgccgttacaaacattgaggacggcgtaaaagttgcggcggaaataggttacccggtgcttgttcgtccatcctttgttttgggcggcagggcaatgcagatagtttccgatgaaaaatccctgagaaaatatcttcttactgccgtaaaaataaacgaacggcggccggtgcttgtggataaatacatcagcggcaaagagcttgaaaccgacgcaatctgcgacggcacagatgtttttgtcccgggcattatgcagcacattgaaagaacaggtgtacactccggcgactcaatctccgtttacccggccttttcaatttcccgggctgtaaaagataaaatctttgactatacaaagcagcttggtttggcaataggcataaagggcttatttaatattcagtttatagttgacgaaaatgaccaagtttatattatcgaggtaaacccaaggtcatcaagaacagtccccttcctttcaaaggcaaccggtgtgcctatggcaaatattgccgccaaagtaatgctgggtcacacccttaaagatttgggctacggcacatacattcaaaaggaaaagaacaaattctatgtaaaagcacctacattctctttctcaaaaatcagcggtatggacacatatttgtccccggaaatgaaatccaccggcgaggcaatgggctatgacagaagttttaaccgtgctttgtacaaggctttgcaggcctccggcataaaggtgcaaaattacggcacggtgtttgtaacccttgcggacaaagacaaagaaaaggctctgccttttgtaaagagattttacaacctgggctttaatattgttgcaacccggggcactgcggaatttttaaaggctaacggtgtcagaacaagaaccgttaaaaaattctccgagggcagcgatgacatttacaagatgatacatcggggctatgtgacctatgtaataaatacacaggatttttcaagcgaaactgccgacgacggatttaaaattcgccgctgtgccgcagataacaacataaatgtgtttacatctctggacacggttggtgcattgctgaatgtccttgacgaaattacaatgtcggtttcaaccattgacgaggattgataattttccttgaataaaataaaaattagttgtataatagctttaataagagcaggggagcttgttttgacaggctgagaggaaggaatcaccttcgaccctttaaacctgatgtgggtaatgccgccgtaggaagatattttacgacttgcaggagaacccacaaaagggttctcctgttttttacttttgagaaaggggttttcacttaaatgtgacaggccgagggggagcgccctgggctttgtatatagcgatgggaagccgtgttccggcgtgagagggtacctttgagtgccgaccgaaatttttccgaacaagccgaaagttttatgataaatcggcgttgtttgttttgccggttttgttttttaatcttaaacaaaacctaaaaatcttcggggaaatgtcgctgtatgcagttccccgcacactcaaaggagaataaaaatgaaaaaagtaaatattaaaaagttggcggttgcaggtatattttgcgccgttgcggttgtaggcagtttgttttctttcccggttttcggcagtaaatgtgccccggtacagcatttggtaaatattttgtgtgcagttttgcttgggcctgcttacggcgttggggttgccttttgcgcttccctcattcgcaatctcctggctttgggcagccttatggctttccccggcagtatgataggcgcattgctctgcggcattgtctataaaaaaacaaaaaacatcccggccacccttgtgggggaagttttcggcacaggcattttaggcggcctttgcgcctacccggttgcggtgttgtttatgggcaagggcggtgccggtttggcattttacgcatacgttattccctttttggtttcaaccgcagggggagctgttattgccggtgtgctgatttacgcccttaaaaagacaaaggctcttggaaatatgcaacaatctttggaaaattaaaattatgttaggtcagtttttagataatgtaaggggaaaatcccctttaattcacaatatcacaaattatgtcacagtcaatgactgtgcgaatattttgctcggggcaggggcgtcccccataatggccgaggaagaatcggaagtggccgagataacatcaatcgcccgggggctaaatataaatatcggtatggcaacaaaggccaaagccgccgcaatgctcacggcaggcaagcggtcaaatgccctggggcatattacggttcttgaccgggtaggggcaggagcctccgaatttaggaacggcttaatttcccggctgttaaaatccgtaaaattcaccgttataaaaggcaacgcctcggagataaaatccctggcaacgggaatgtcgaatttcggcggcgtcgatgcggaaacctgccgggaaagcggccggggtaatctcgtaaaactcgccgaaaacctccggaaaaaagcccggtgcagggttgttgtaacaggcaaaaccgatattgtcaccgacggagacacgacctatcttgttcacaacggccatgagatgatgagccgcataacaggttccggctgtatgctgtccgctctaatcacggcttttgccgccgcaaataaagagaatattacgcaatcggttttggcaggggtttgcgccatgggtttggcaggggaaaaagccgcccggcgcatagaaaaacctgccggcagcggaacatttaaaacataccttatagacgaaatttacaatatgaccgccgaagaacttgaaaggggagcaaaatatgaagtgcgataaacaatctatgcttttgtatgcggttaccgacagagcctggacaggggaaaaaagcctgtaccgccaagcagaagacgctttaaaagggggcgtaacctgtttgcagcttagggaaaagcatcttgacagagatttgtttttacaagaggcagttgaaatttgcaaactgtgtaaaaattacaatgtgccatttatcataaacgacgatgtggaaattgccataaaatccggcgccgacggggtacatgtggggcaggatgatatgtccgtcggccgggttcgccggctggttggggaaaatatgataatcggggtttccgcccattcggtagatgaggccttagcggccgccgccggcggtgcggattacttaggggtaggggctatgttcggctctgccacaaaaaccgacgcaaatgttacctcaaaagatactttaaaggaaatttgccgggcggttgacctgcctgttgtggccataggcggcataaacaaatcaaacattttacagcttgccggccggggcatggacggcgttgccatggtaagcgcaatttttgccgcagaggatatagaaaacgagtgtaaaattcttcgctccctctcccggcaagcggtaagtggcaagtaaatttaatatgtataaaaattcgtataatttaaaggcgaattttaagcggtaaatcgggggcaccaccttttgccgctatataaacctgtgctgtaacgaaaggggattttattatgaaattaaaaacagcattgaccattgcaggcagtgacagcagcggaggcgccggtatacaggccgatttaaagacgatgaccatgaacggggttttcggaatgagcgcaattacggcgcttacggcacaaaacacaaccggcgtaacggcaattcaggagtccactcccgaatttttaaaacagcaaattgatgcggtattcaccgatatttatccggatgcggtaaaaataggtatggtatcttcttcccggcttatccgtgttattgcacggcggttaaaattttacaaggcaaaaaatatagtggttgaccctgtaatggtggcaacttccggctcggcacttatgaaaaccgacgccattgacacattgattgaccagcttttgcctatttcaacggtaattaccccaaatgtgccggaggcacaagtactttccggtatgaagatagaaaataaagacgatatggttgccgccgcaaagaaaataggggacacctacggctgcaatgtgcttttaaagggcggacacagcgtaaatgatgccaatgatttgctttattcaaagggcaacatcacatggtttgagggcaagaggataaacaaccccaatacccacggcacaggctgtacactttcaagtgccattgcctcaaatttggcaaagggttttactttggaagagtcggttaaaagggctaaggactatatttccggggctttgtccgccatgttggacttgggccggggatcgggacctatgaaccacgcatttgatttacagggcgaatttgccaaggaggcggaataatgaacacagtagaaaaacttttggcggcaactaaggacatttggcggcggtacaacaaacacccctttgttttgggaatacaaaacggtgacttggacagagaaaaattccgcttttatatagtgcaggactatgtgtatttgcaggactacgcaaaaacatttgccataggggttgcaaaggcaaaaagccatgaaacatcaaatctttttgcaaaatacatagaggttatgaacggcgaattaaatgtccatgatggttatctgggtcggttcggcgtaacacaggaggaaatcgacaacactcctgcatctttggacaacctttcctatacatcctatatgctgagagtggcctacgatgagggcgaggcagaaattttggcggcaattctctcctgcgcttacagctatgaagtcattgcaaaaaatatggttaaaaacaagccagactgtgtaaatgaccggttttacggcgaatgggttgtaaactatatttccgacagatattcacgggacaacaaggttttaatcgatatgttaaataaattgacagttgactattccgaaaaacaaatcaatcaccttattgatatttttacggtgtgttcaagatatgaattgaacttttgggaaatggcctggaatttaagtaaataaaaactgacaggaaaatctccgttttttataaagcggagattttttgttttctccaaaaatacatcaggtgtttttcggcctgttttcaataagcccggcttttgtgtaaacccttattttactgggagccatactgaaattttaccctgtttttagggcttttctgttgaattttgtaaaattgtgatatataataagtaattagagaaaatgtgtaatttggcagggaggtgtgctgatggggcaaagtcaagatgacgcaaaaaaacttaaaaaccgtgtatggctggcaattattgcgttaattttggcctttttggctgccgcaagtgccacctatgcctggtacgtttacaatacaggcaagcgaacaaccagtgttcgtttggcggcaggtgccggctctaatttacagataagcaacacatatgacagcggttacgcctcacggacgccccttagcagttttgtgggggaacttattccggtttccaccgactatatacaaaacggatttcagcgtgtcacaaagtttgtcgacaacaacacaggggtgggggctaatattttggcagaccggttcggcagtgccaacggccgggaatactacaaaaccagcctttacatacgcacaaacggccccttgaccgatgtgtatatttccgatatttcatatgaggacgacaacccggccttgcctatatccacagcggtgagagtgggctttgttgtccacactgccggagaaaatactccgccggaaaatgagtatattttttcaataaatgaaaacaaaaacccggaagcggagtacaacacggcaacaggccgtgagggctatgtgctggacagcaggaaaaccgacggcacaaccgtagaatttaaacattacaccggtgaaaattattgcatatacaaatcggcggataactctgttactttaaaagaaaaatctttgaaaatttgcaaggtcggcggcactgccgagggcaagcccggcacccctgtgcaaattgatgtttacatttggcttgaaggctgtgacgaggactgcacaaacaatttaagcgcccaaacattaaagaatttggcgatttcctttgcaggggttaaggcaaactaaaaggagaaaagtatggagcagcagaaacaactgaaaaaaagaatgtattccttaattcgggttatcattctcatacttgttcttctcacaggcacaaccctggcttggtttacatataccggtaattcttcggtaaacattaccccggtggcaggcacaataagcaagggggatgcaaacctgcttatttcaagcagcaaggggggcccttttgacaaaagctgtgggcttatttttcggggcggatatgacagtttacagcctgtgtccactgcggatttggttaaattttccgccgccgtggcacacaacaaggacggaatagccgttgtttacaaagaacttacggcggaagatgtaaataaaatcacaatgcacggcactgtgtatcttaaaagcgaaaacggcggcagtgatgtttacattgacaggacaaatttggatttaggcggggatacacagcttttggccgcaatgcgccttgggctgattgtcaccacaaattccggcagtaaaacatatatattcaaggcagatgatttggcagacacctccggggctttggcaaaggctaccgtgcccacagcaggtacggttgtatcttcattaaagggcacaggggcaaattatgttgctgacccggccttgtctatgatggattatttttgcacaaccgacggagaggaagtatcccctggcaaaacagttttatgcaccttgccccgggacgaagtggcaaccgttgaatttttctattacatagagggctgtgacgaaaatcggtacaacccggcgcaaaacagacaaaccgctttgaaacttgcctttggcggtgtggacacagatttacctaagtgatactacacagatattcatataaatatgtaaaacaggaggggagatgggggaattgaacaaaaaaatcaaatcatatcttttgattgccgccttgattatgctgttgttctcgctggtggcaggtacatacgcctggtttacaagtaatcggaaagttgacacaagcagggccacggcgaagtccggcaccgcaaatgtggaactgcaaataagctcctacggtggagatgattttgtaagcagtgatcgggcgcaaatagtgcaggtgaatactgccgacggggaatatcttctccctgttacaactgccgactgcaaaacattctcccaggctgtggcttttgaaaacggttacgccgtatcctttaaaaaactggaaaatgaggaaaatatctatcacggcagaatttatataagggctttggccgcaggtgattttgccggtaaaaaaatgtatttgtatttagacgaaagcgaaaagcccataaatgagcagttaggcggcatttggaacaaggctgcaagactgggtttgtcttttgacgggggctcggcgattattttaaggggagaggaaaataccgcctctgccggcaacaccaaaatagacggcaatatacttgaccatggcaaggttgtaacctatcgaaacggcagttttgcccgggcggacgacccaagcgtaaatattgccgattgcgttataaacaccgagagtatccgggcggctgttatgcccttggcggaaatagagatgaacaaaatatactcccttgatgttttcgtgtacttagagggctgtgacccggactgcgacgacagtgcaagtttttcacagggcaatcttaatcttgccttttacggcattgtaaattaagggggcagtatggaaaaaagcagagatacaaacaaaaaaatacgcaacaggcttacaataacaattttgcttattttagttgcccttgttgcacttaccgccgccacggcggcatggtttaccattgccgaccacgccagggtacagaccatgaacctggaaatcgaaagcggcaaagaattgagaattgacctttacaaaaggcggaattttgaggactatgtccgcacactgtcttttcgggatatagacggaaaaattcaaggggaaaaaggcttttcaatggccacaacccctttgcgcccggttacaaccgccgacgcaagtagatttacatataaaaacggccgggcagtaagccccacaagcggagcttatcttgaatttaccctgcattttatagcggataaagatttgaccgttcacctgacaagtgccaacggagaaacccaccgggacggcaccgagataacatcaaaaatcgccggtttgccacaggctatgagggtaagttttaccgttgacggccaaacttgggtttatgacccgggtcttggggatacaaggcagcagggtaatttgacaactttcggtcttgcagaccggcggaatatgaaattatccaaaaacaacagccttttccggcttaaagcctatgaggacaaagaggtttcagttcacatctggcttgaaggcacagacgaaaaatgcaccgacgatttaaagggtgcggattattcaataaaattgagatttgtcggaatggacgagcgatacgcaggttaattccggtgacaatacagaaaaatgaggaaatgaaaatgcaaactatcaaaaaaattgcctccggcatattcagctttttactttgggcggttatatttgtttcggcactgttcgcctttacaactatggccacaagagatgaaaacaaaatcgcaagcatagcaggctacaccccaatgacggttgaatccgactcaatggcgcctacatttaagcggggagacttgattattattaagcaatgcgacccggcaaaattgcaggagggggatattatctgcttccacaccataatcgacagcgaatatgtccttaacacccaccgcataaagagcatagacgaccaaaacggcgcaaggtattacaccacaataggcgacaacaatgagggcattgcggatactcatgttatttccgacggtgatattgtgggtatttacaaaggtaaattgccgaatatgggcaaggttatgaactttatgtccggcagtacaggttttcttttgataatcgtcttgccgatgctcctgttctttatatatcagatttaccaccttattatggtaagtgtgcggcttaaaaatgccgttgccgaagaaaaggcagagaaaaacaccgacgctcaggcggcacttgccgaggcacaaaggcttaaagccgaggcagaggaaatgcgtgccaaggccgaggaggccttaaaacaggcaaaggcagacaaagaggagaatacagatgagtgagtttcttaaattcgcatatgaaataatttctcaaattgtatattatgttgcccggctggctcgggctgccgtaaagttgtttataacaggctggattgattatatccttatttttaagacatatttcttcacccttaacatagtgggcaaaatcctttcgattttgcttatgattgtcctgcttgcaatacctgttttgattgtttatctcattgtgcaaaagggtcgactgaaccaccgccttaaaaccgacaaaaccgacaacgccgaactttacaaggaaatcggcaggcttaacaagcaggttttgcagttaattgacgaaaaaaacagcattcttgcccttaaagtaaatacaatgggcggcacggaacacataccctatatgggtgcatctgcccttaccgacgatgttttgccctcggtgggcaatgttacaacttcggcggaacttgccgccgcaaaggcaaaggcaaaagccggggcggaacctttggctgttcgctttccaaaattggctttggtggatcaaaaataccggaatatgccggcggaagtattcgacaaccggattactttggaagaatttgccgagggctaccgtaagtttgccgcaagcgcaatgaacctttactattcgccggaaattgtccgccgttttatcgccggtatgtccgcaagtaaactccttattttagagggtatttccggtacaggtaagacaagtttgccttattctttcagccgttatttaaacaacccggctaccattatatcggtacagccttcataccgtgaccgcacggagttgcttggctactttaacgaattttctaagaaatttaacgagacggaatttttgcgtgccttgtacgaggcagactaccgccaagacccctcatttatcgttttggacgaaatgaaccttgcccgtatcgagtattactttgcggaaattctctccgtacttgaaatgcccagcaaggacgaatgggttttggatctggtacctaccgcatgggcaaacgaccctgcaaaaatgcaggacggtaaaatcaccgttcaggacaacacctggtttgtgggcacccggaacaacgacgactctactttcaccattaccgataaggtttacgaccgtgctatacctattgaaataaacgaaagggcagatgcctttgaatgtgagcctcagggcccgtgcaatgtttcaagccaacatttgcagaacttgtttgaaaaggcacgccgggatcaccctatcagtcaaaagacccttgatggtatggacaagttaaatgattaccttatgacaaggtttaagctctctttcggcaaccgtatcatcaagcagatgaacgactttatcccggtttatgttgcctgcggcggcacggaacttgcaggtatggactacatcatcgcccgcaaagttttgaaaaagtttgaaagtatgaacatcacatttacccgtgatgaaatttacgctttgatagactatatcgacaagcttttcggcaaaaccgaaatgccggacagcaaagcatatttgcagagaatacagaatttgtattgataaaataattttttggaggaaaccccatggcggctgatataaacgacctctacttgcttataacacagcaagtgggcccctctttggaaaatgacgaatatttccagtatttgtacaacctggttgattccggcgacaacacaatcaatcagcaacacaaaatactccacaaaaaaatagatgaaaattggattgattttatcgaacaaaatattgatgccatctttaaaatcattcaaaaaccccgcagttttatagccacaaaagaagaagttgtgccggtgggcttggcaaaaaaaataacagccgacagcgttcgccatttaagcatgaacacacagttcattgcctcggacgaagggggcgacatacagcctacaagaattttaaatgtttccaccgaggaaagctttaatctgtacgaaaacagatttatatatcaccttatacagcgtttgtcggcttttatcaacaagagaacggacattatattctgggcaaccggcgacgagataaccgataacctcaccttggaaagcagttttaaagacgcctatgaggaagtaaactacaaaatagagctgaatattaaggacttgcaaaatgtggccaaaagccgtgaggaacatatggatttgttcaaaagaattgaagaaatccaaaagaaaatccgtgctttgagaaaaagccccttttgccaaacaatggcaggctgtacggtggttcgcagccctatacagcgtacaaaccttatgatgaaagacccttattatcgcacctgttataaactgtggcagtttatagaaagttacgacgatataggttacaccattgacgaacaagatactgccattgaaatggacgaagactaccttgttcggatgtacacaaacttaatttcaaattacacggttttcaaaagtcttaccgacggtgacggccgcaaggaagatgtgcttgcacagagaaattttgagaaaatcaagccgaaatttataaaagaaatccgtgaagaaatagttgacgattataacctgccggatgtggaagtaaggcgtgtgcttattgaagaagttacccaggcacagcttgacgccgaggcacggctgcggaaagagagggcaaaaaccgccgcccttgaacaggagagggaacggcttagggctaaaatcagcgacaccgaaaaacaacttaaccgtgcaaaccgggacaatgagcttttacaagacacaaacagcaaaatcagcgcagatttggaaagcagtttggctttacaggcaagcctgcaaaaggagctttcttctgcaaaagagaatttgcagacagaacaaaccgcaagacagcaggcggaaaccgccgcaaaaaatgccaaagaacagcggattttggcagaccggcacagagaaaaggccgaaaaagagatgcggcgggctttaaaggaaaagcaagaggccttgcggcgtgcggatgatgaccgccggcggaaaatttttgcagaaaaagccgcagaaaccgctgttaaagagagagagcagttcgcccggaacagcaaaaatgcccagctggcaaagcaagaggcggtttttgccatgttggaagcgcaaaaacttgcaaagcgtatgcaaaacgacatcaaaggcggcgaaaagcgtattcggaaattggaaaaagccaagcggaaagccgaaaagcgtgcaaaggcaaacagcttgtcacactatattttacaaaggttgcaggctcgtgaccgggcaagagaaaattcgcaaatcccggaaagtgatattcccaataaggagaacaatcggcaatgataaaaaagttctttttggcaatattggatattattgcggctttggttatagcttttgccattgcggttttggttgtggttataaaaacaccggcaggcagtgtgccgtcaataggcggttacacggttttgcgtgttgtaagcggcagtatggagccggactaccccatagacgcaatgctttttgtgcataaggtaaagggagaggaaatccgcccgggagatgttatttcgttctattccaccgacccgaatttggccggggctgtaaacacccaccgtgttgtttcggtggaaaaggacgaaaatggagaaattttctttacaacaaaaggcgatgccaacccactggcggatttatacaaaacaccggcggacaggctggtaggcaaagtgtttttttcttccctcacgttaggcaaaatatcaaggcttgcggcaaatccgctgatttttataccttttattgttctgccattggcggtgattttatcggttaatctgtaccaaacagtaaaattaacaagggaattacggcggcaggaagaagaagcggaacttcgccgggcaatttcccaaataaaagaaaaaagagaaaaaacaaaagaggataaggagtaactcacatggatttaaaagaaatgtatgacgaaataggcggaaattataacgaagcaaaatcaaggcttatgaacgatactttaatcgaaaaatttgcccttaaatatgaagcagacggcacatttgaagaacttaaacaggccgtttcggaaaatgacatagaaaaatctttcagggccgcccacacattaaagggtgttgcggcaaacctctcttttaacgaacttgcaaaggcggcctcggaacttaccgaacagcttcgccctttaaaagagcaggccgacgccgatttgtacgcaaaagtaattcggcggcaggaaaaggtaataaagggaatagaaacttttaaacaaagcagataattcaaataggtacgataacctaatttgcaagggaatttccaaccgaacttgctatcgaatataagatgtaaacaaaatatt

SEQ ID NO: 2399 - DNA, 4516 bp, Unknown
  16S sequences of unknown bacteria
ctttgacgattcggctcttttaggaatagatgcaaatgttgcgacgttttaggccgccattttattggcgactttgtatttccagatcatttccgcatgattttgttcgtcggtcatgatggcgttgaggacgtttcttacttcggtggacgcaaagtaaaacagatcgttgttgtagtccgttgccacgtatttttccgtgacaatgatgtccgtgcataagaatttatcgaactccttttcttcctgagtccctttgtgcgaggcttgcggttcgtattttacggcgcgaggctcatgatttttaatctgcggaagggtaccgcccaacaagttttccaacatatcgaaatgttgctgttcgtgtttggcgatcgtcttgaataaatttttcagctcgggatcctttgcctgcttcgcataaaaatcatatttctggatgcaaagctgttcctggtttttaagttcggtgataagctgggtttctttctgattcagtttcattttccatacttgcgcggtagaaacggagaaaatctgccgcgcaatgctcctttttatttatcttctccgtcaaagagtattgccaagatttcttttcttattccggcgagtttcgatttttcagatttgttatcccctttcaaaaatccgttcttctttctaatcgttgacttgcaattttacctgtgctataattgtcgtcgggaagagccgattcttttttttggacgaaaggattgggaccctttgaaaataagacggagaaaagatgcgatgagttattacgaacttcctgcagaaggacgcggatattatttgtttgcgcatagacctatcctgtacggtgcggcgcattttcacagcgcgctcgaattcgtctttgtggaaaagggatgcgcggaagtcaatctggacggggagtgccgactgctttcaacgggtcaggcgtgctttgccgatagtttttgcgttcactcctatcgggacgcaggctctttggtctatgtcctgctcggcgacaaaagctattttgaagactttttcggggcgaaaagcggccgtacttttcccaagttcttttctttttccgactacgctttgctggaaactcttttaactctttgtggcgcggagagagaaaaggacaatgcgcatatggtgttccgcggggcgacggacatcttattggggaatttggcggaaagcgtgcccatggaggaaaaacgggaagataagcgttccactctcgtctgcgagattctgcgctatgcgcaggccaatgcgagaggagatttgtctttgacggtgctgagtcgccggttcggatattcgcgggaacacttgtcccggcttctgcatacctatcttagagaaaattggaatcattacgtcaatcgtcttcgcgctttacaggcggagcgcctgctccaagaaaacacagacaaaaatgtacttgaaatcgcctacgaatgcgggtttgaaagcgcaaacactttttaccgcgcttataaaaaggaattcggtaaaagcccgcgcctttcttctttcaaaaaacaaatcaatatttgacataaatttgtcgttaataggctggaaaacgtaaaatcggtttgctataatagtattataagacgagttccgtcgaaaaggggacggaaaaggagaaactatggcggatagaatttttacggtggcaattttgggctgcggagcgcgcggggcggaaagttacggacggttgtttttggaggggaaggatcggtacaaggtcgttgcgctttgcgacatctgtcccgaaaaattggaaaaatacggtcagatttttcaggtgccccgggaaaacagattttcgagcgaggaggaattttttaaggaaaaacgcgccgatttgctcacggtgacgactttggacgccgaccatgtgcggcagtgccttgccgggttgaaaacggggtatgacattctgctggaaaagcccgttacagacaaaaaagaagagtgttttgctcttttagaggcgcagaaaaagtatggaggaaaggtactggtctgccacgtattgcggtacgcaaactccttccgcaaggtggaggaactgttaaaagaaggcgcggtggggcggctggtggcgatacaggcaatcgaacaggtggtgtattggcatcaggcgcacagctatgtgcgcggaaactggcggcgcgccgaggacactacgcccatgattctcgccaagtgttgtcacgacctcgatcttcttcaacattttgcggggtcgaaatgcgagtctgtttcctcggtgggcgatctgacttatttcacctcggtcaacgcgcccgaaggcgctgcaaaacgctgtttggactgtaaatacctcgaccgctgtccgtacagcgcgaaaacgctttacatagagaaatggaaaaagcaaggacgcccggaaaactgctggccgtataacgtgcttaccatggcgctccctttgacggaggaagcgattggagaagcgataaaaaacggtccttacggaaggtgcgtctttgcctgcgacaacgacgtggtagatcatcagctgacgcagatgacctttcaaaacggcgtcaaagccacgctgacgatgacggcgttcacggcggagggaggcagaattatgaaattttacggcaccacgggcgaggtggtcttggacgaaacgcgggacgtcatagaagtaaagccttttggcggcgaaaaacgggcgctggaattgagcgcgctgaacgagagcgggtatggtcacggaggcggcgattacgggcttgtcagagagttatacgaggtgctttgcggtcgtgaaaaaacgacgacttcgctcgaagagtccgtggaaagccatctgatcggaatctgcgcggaggaatcgcgcaaggcgggcggcaaacttgtcaaaatacacgaaaacgtctgaaaaaggaaagggcagggatgcgtcgaacgcaattcctgcccttgttttttaattttcactcggaagaagccgggaaaacaagaggactcgtcttcgataaatagaatgcgggcgcagctcgggcgattgaagtcataaaaacggatagccgcacgcacgccttaggtcgcttcgtgaagagcgggcgtggaacgccgaaaacgattttccgcttcggcgccgtaaatgcggtgacttttttccggcgcgaacggcgccgttgcttatactcattctcttaaaaggagatggaccttaggagttgacgcatcgttatgattttttgtaaattttccgcgttaggaaagtgagaaaaacggtgcctctcgacaggggaggaagcgttaaaaaatgggacaagtgattttttatagggaaatgcgttcctaagcgatccctataagaaaaaaacgccgcacgaacttatattcgcgcggcgttttccgttttcagattatccgtgtacgaatttttgttccgcttaggaacgtttccgtttttctgtaaacgaaaggaacggaaaatcaggattttaaaggaatatagccgtaaaatctgaaaggaagtctatatccgagcaaagggaaggtttccacgcagcgaaagaggcaaacttttattcgcgctaaatatttgaaagcctgctttaagacggaattttgaaaaaatcagtttccgccgacgggttgtttcttcttttcgctttttttccattcccgcggcgacattccgaagtgtttgaaaaattgcctgttgaagctggacagggtagtgtatcctgtgcttcccgcaatgtcgagaacggaacgttcggaagagagcagcatgacggcggcgttgtgaatgcgcaccttatgcacatattccaagggcgcgcatcccgtaaattcaaggaaggaacggcgcagagtaggctgactgatatagcacatatccgcaagctgttccacggctatactctccatataattgttgtgtatgaagtcgatcgctttgctgattttgcgaaaggtttctccgttatcgcgcggttcttccgtcttttgaaccatgagtctgccgtggaggatgagcagagaaaataaaagtccctccgcgacttcattacagcgttctttatgcgcggtagcttcttcttcgatcatcttcacaagagagaaaatttcgggatattcccgtctggtgagaacggcgggaaaggaatattgaggataatgaaaagcttttaaactctttaaggaggtttcgtcgaggtggcggagaacttttcccgcgtctatgtagagaaaataccattcggatggattttccctgtcgctttgagcgctgtgcagcattcccgcgtagaggatggaacagcaaggttcttgtacgtggtagacatctccgtcgacgttgaataatcccgcgcccttttccataaagccgatttcgagaaaattgtgctcgtgcatgaaactcagtcttgcgtcgggaatgtgtttccacaatcccttttcgggaaaaaacggcgcttcgtcggtaaaagtg

SEQ ID NO: 2400 - DNA, 32759 bp, Unknown
  16S sequences of unknown bacteria
gcagagacaggcaagagccgccgccgatcatatgtgcggcaagtatcacaataacaaagggtatatcggctcatcttgcgtacgcattttcaatcagaatgcagcggtaacaggtctttcagagaaggcggcggccaaagccggatacagttttgattccgtgcttctgtttcctgcggataaaccggggcctatgccggacagtcactatatggcgttcaagcttatctttgaagtgccgacaggcagaattctcggagcgcaggctattggccttggctctgcggataaacggatagatgttatcgcgacaatgattactatgggaggtacgctcgaagatttaaaggaattggagctctgctactctcctgtattcggtacggcaaaggatgtcgtaaatatggcggcgctggttgctctcaatattctctacggggaatcaaagcaggtacatataaacgaagtgcgcgggctcgttgaggacggcgcatatatcattgatgtgagagaggccgacgaatatgaagcgggacatttaaagaccgcgcacaatataccgctttcagagctgagagaacatctcgacgagattcctaaggatgaacccgtatatgttcactgccgatcgagccagaggagctattacgctttgagagcgctcaaaggccgtggatttgacaatattgtgaatatcagcggctcgtatctcggcatcagtctttatgaatatttcaatgacaaagaagagcaaagagaaccgataatgacagcgtacaattttgactgatttaaccgcttagaagtaaaacagctgagcgtattcgatgttcaagtttattttgctgtttcaaggcggcgagctgtttgatcctaaataaatataagaataaatataagataaaaacaggcatacatcgtctttgatatgctgcttattttgtagtctttaaggacaacaaaacttgcagtatatcgcgaggtgtatgcctttataaaattacttggatttttctgatttgaagctataaaaaagaaaatgtttattgtttatttgcgggaaaaatcgatgggctcatcgtcgagaagttcggcgagcattcccatttgcgcaagtttttcctgaatttcgtcgagggttttttcatcgtcagccagtattgtatgataatggtatccggcagtcgcgtttttgagcagacttgattttccggagtgaattttttcaatgaattcggcaatatctttgcgcgaacgcagattcatatcggcacggactatgccgtataccttgtgatatataaatacatctttgattttgccgccgaggtcgactatggcagtgagttccgcttcggtttctctgtcggagtggtgcattttgagaattctgcttgcttcctctgacctgtggagcatcatatatccatatcttgcggaaagtatgtctaaaccgtttgcgcggagcagcgcaatgtcctgcactatgacctggcggctgacctttaaggtttcggcgagcgtactgccagagacaggcttatcgctttccaaaagtattttgagaagttgttttcgtctcttatccccattcatacagcggacctcctttcatagttttttgtaccacttatgtgataaaatattcacagtcaaaaattttttatatgttctactcggcaatcgggtgcagatttttgagtgaaatatcgaggataggagcggaatgtgtaagcgcgccgctcgaaatgtaatctacgccgagatctgcgagtgcgataatattttctttagtgacgtttcccgaaacctcaacttcggctctgcccgcgatgtatgaaatagcttctttcatctgctcgtgcgtcatattgtcgagcattatgatatcagcgccggctgcgacagcttcttttaccatattcatattttcaacttcgacttcaattttgcggacaaaaggcgcgtatgccttggccattaaaacagcattctttacgcctccagcggcgccgatatggttatctttcagcataactccgtctgagaggttgtacctgtgattatttccccctcctgcgcgcactgcgtatttttcaaatatacggttattcggcgatgtttttctggtgtcgagaagcttgatactcgtaccgtcgagaaggctggcaaccgaatgcgtgtatgttgcgatgccgctcatgcgctggagataatttaaagccgtacgctcaccggatagaaggatgcggatatcgccgcggatttttccgagaagctggccttttttaacggcgtcgccgtcatttacaaagaattcagccgttgtggcattatcgagcagcaaaaaaacacgttcaaaaacttgcagtccacagatgataccatcttctttgcagataaggtcggcttcgcctgcctgagcatgcggcataacgctgtttgtcgatacgtcttctccggaaatatcatcgcggagggcgctcataatgagcggatctacatttaatttaagtgttacgggatcaaacataattaaagattcctttcagttttgtttatttatattgtgagtttgtttattaaaacggattgatagcgttcgccttttctattgcgccgagaacaagtgatttatattcttctttgattttgtcgtaatttttataaattgaaaggtctacagcgccgatggcttgtgtttttgcctctgccttttctgcctgtgattcacttttttctgcgatatcatctgcggctctgccggcaaataccatactttcaagaagcgaattgctggcgaggcgatttctgccgtgtacgcggttgcaggctgtttcacctacagcatagaggcttgtcatcgtggtgcggctttcgtagtccactttgatgccgcccataaaatagtgctgtgcaggcactacgggaatgcattcttttgttacgtcatagcccatttcggcgcagtgcgcgattatattggggaaatggccgtaaagctcatccggcgggattgttcttaaatcttcccagacaaattcagtgccgtcttttttcatctgctcacgtattgcagaggtgagcttgtctcttggaagcagctcgtcggcaaaacgcttcatatccttaccgtagagctttgctccttcaccgcgtacagattcggagatgagaaagctgcggtctttattttgcggtgaataaaaagttgttggatgtacctgtatataattgatgttttcgagttcaatatcgtgctttacagctatggcaagcgcatcacctgtcagatggcggaaatttgtcgagtggcggaacaggccgccgatgccgcctgttgcaagcacggtaaaatcggcttcgatgatttctgtatttccggctgcattgcggacaaccgcgccaaagcatgtgctttcatgctcgatgacatcgagaagcgttgtattttcaattatcgtgacattaggaagctttttaactgcggcaaggagcttactcgtgatttccttgccggtgatgtccttgtggaacagaatgcggttatttgaatgcgcgccctcgcgtgtatatagaaaggctccgtctttgtcgcgttcaaacagcacgccgcagtctacaaggtctgcgataacgcgctgtgatgagcgcagcataatatcgactgaggttttgtcattttcgtagtgtccggcgcgcatagtgtcttcaaaataagcatcgtagtcagcctcgccgcgcagtacgcatattccgccctgagcgagaaatgaatcgctgctttcgagatcggctttggtgataatagtaattttcttttcccgcggaagcctgagcgcgcagtaaaggccgctgcagccgcttccgacaattaaaacatcggttttcataatataaaattctctttcctttgattgtatgcggatttcaagacgcggtaataagatttgtactgcggcaggaactgtgcatattgtatttatgatgttaccggataattataacataagagttgtcatatgacaagacagttgttatgataaatgtaaagctgtgtattgacagaaagcgagagtttttatataatcaggtcagttattttattgattttgctgatttattggtaaattcatcggcgctttgctgccgggttacgggatcatcaaggtttacgagaacaagataggaaaggttagaaatatgtttacaacgagggagcttcaggatgagattctgaggctgaaaaaagaaaatgatatttgcatacttgcacacgcgtatcagagccaggatatacttgaagtagctgattatgtgggcgattcttacggtctttcgcttgaggcggcaaaggcgccgcagagcacaatactgatgtgcggtgtacgttttatggcggaaacggtaaagctcctttcgccggataaaaagacaattctgtcgcatccgcaggcgggttgtccgatggcggagcaaatagaccttgaaatgctgcgcgcgatgaaagaacagtaccctgattatacggtggtcgcatacataaatacgacgtcggaactcaaagcgctgtgcgatgtgtgcgtgacatcgtcatcggcggtgaagattgtaaaaaatattgagaataaaaatattctttttattccggactgcaatcttggcgcctgggtagctgaacaggtgccggaaaagaatataaagctcgtgcacggcggctgtccgacgcacgctaaaatgactgtgcgcgatgtcgaggcggcaaagaagctgcatcctgcggcagagcttcttgttcatcctgagtgtgtgcctgaggtagcaaagcttgcagattatatcggaagcaccacgggtattatggattatgcgagaaacagcagcgcctcagaatttattatcggtacagaaaacagcattgtgcagcatctgcagttcgagtgcccggacaagcgtttctatccgctctcaaagggatgcgtgtgtatgaatatgaagctgacaacactcggtgaggtctataactgtgtgcgaggtataggcggcgaagaaatcgtgctttctggtgaagtgatgacgaaagcgagaaagtgtattgatatgatgctgaagcttggataagttatggtttatttaatttgttatgcggttacatgttttgcctgcgtgctgggcacgatatgcggcatgggcggcggtattatcataaaaccggtgcttgatgcgacaggtgttatgaccgtagatacgataacctttttatcgggctgcactgtaattgctatgagcggctggagcgtgagcagggctctttataggcaagaagatgtgcttgatatgaagcgcacgccgatattcgcacttgcagctgctgtaggaggtctgctcggtaaggaaatgtacatagctgtggcggagctttttgctgacaggaatatggctggcggcgtgcaggcgtgtctgcttttggccgcgacttttttgacgctgatttatacaatcagaaaagacaaattaaagtcaagacaagcagagtcgcgagcggtaagctttgtcattgggctgcttctcggaatgctgggagcatttctcggtatcggcggcgggccgtttaatgtggcggcacttacgtattttttctcgatgccgacgaaaaaggcaacgcagaacagcttgtttgtagtgctttttagccagcttgcgagtacgctgaagacggtaataacgggcggtataccggattttgatccaataattttgataggtatggggcttttcggcataataggaagtgaaataggaagacgcataagcaagcgcatagataataaacaggcgaactttttgttggaggcttgtatggtgctgattatgtgcataaatgtttataatatttttaagtatctgcgttgaaagctggaggcagatagctttataagggtttaaaaagatagtcccaattttgctctatataccaggcaaatcataatgaataggagcgtataattatgtcgtttaagaaaaaatccagaattatcgcatcgattatgcttattgctgcaatcgcattttttgtgtttgctatcacacatccaacagcaagtttcccttggagcaataccataacatatttcatttatgccgtttacattttaatcatggtgctgctgtttgtagctccttgcagaaagggaaaataaacgctgctgcaaatgagtatacaaagtggaataatgttattcttagggaacacaaaagtgaattggggaaaaagatataggacgtggacgatggtttacatccatttgtgcgcagcatctgtgcaaaaatatgaagtaaaataaacggcagagcgctgagaaaattcatagctttgccgtttcattttttataatatatatgtagtgtgtatttttgtgtctcttgcgctctacagttcaccgtttactatcatttccgcaacgagctttgtcgagtagccgacagccttagcgcagttctcgtcgccgtcttttgcattgtagcccgcttcgccttcctcagtgaagaaatcgtagcagtctccgagcattgcagtctgcacttcgcggcaggttacgccgtacttgctcctgaaattcgcaataactttctttattttgtcgtagcacgcactgaagtcgtcatccatatgatccttatcgcgtccgtttaagatgcttattgccatagcagcgccggaaagcgctccgcatgtaccctcgaggcagcatccgcagccgccggccagaccgtaagaggttttaaacatttcgtctgtaacgccgagatctggaaacgcatctcgtagtccgccgaggcacgactgtgcacagcttccgtaagtcttttcatagttgtaagcagattcgcttgctttttttacaagggcttctttttccgaagcagataacttagtataatccttcatattaataaatcctccctatgaaaataaaaaatattgcataatattctgtcaactacaatttatcataatcgcttaagaaaatcaaccatagtgaaaatattatttaaaaagaaaaataagcatttttggtaaatttatggctttgaggttattttacatttaagtttttgtgcgtgcggctgtctgcttttccgcagacatcaggcagtatagagatgcttcatcgcccgctgttttcataaagcaggtgcatagaaactacatatatctaagaaacgaatttttgagaagttatagcagggcttgctgaattcagattttgccctcggtaagagcagggattggcgaaggcctgtttgatatttgttatataaaattatctgtgatatatacgctttgagcctcgccgagaatgctaagcgctttgaagaatttaagggttttacgtactgatgcgcgtgaaacgtagtattgaaatataactctgattcttgcacttctgcaaaaatattgttatacttaaaaggttaagagcctttttcagaggtttaatgcatcttaatgatggggagaaaatatgagctataaagtaaagcttaatgtttttgagggaccgtttgatcttctcgtttatctgattgaaaatgcgcagatgaacatatacgacataaatgtggcggagattgtgacgcagtacctcgaatatattgatgaaatggagcgtagagaggttgccgtggctacggaatttatggttcttgcagcgtcgcttatcgagataaagtcaaagatgctgctgccgcgtgtcggcacggacggcaatgtgatcgaggttgaggatccgcgtacagaacttgtggagaagctgcttgaatataagaaatttaagcaagccgcagcgatgcttgccgatgcggaggagtattcgctgcgcgtttatgaaaaaccgcaggaggacatttctatgtatacggaggcgccggacgagtatttcctgatggatatcgacagttttgtaaatgcatttaatttatttctttacagaaagaaaaagattgaggatgtgcgcaggcattatatgcggctggagcgccagagaatttcaatagagcagaaaatttcctatataaaatcattttttgcacgcaaaaacaagacaagcgtgacattcgatgagcttgtagaagaagacagggatagatataacaaagtggtgacctttacatcgcttcttgagatggcaaaatcgaaagcagttggacttgagcagcgggcaaattttgaaaaaatagtgataacaaaggaaagtgcgcttgatacactggatgcggcggctatagatgcggcacaggcaaaggaataaatgattaggcggcagcatttaagacaggggcgcgatagggtcataaaagccgcagaacagataaaggaggaaaacgaatagatgacaagtagaaaaagcataaaatcggcgcttgaatctatgatgtttacttggggagaaccgctttccgccaaaacagcggcggaggttgtgaatataaattggaaagaagcgtatgagtgctttaaggagcttgagagagagtacgaggaggaagggcgcggcatcagaatccgcgaggtaaataaggcttttcagtttgtaactttggcggataacagcgagtacatagagaggctttgtactcctgtgaagcaaaaacgcttgtcgcagtcggcgctcgaggtgctggctatagttgcgtataagcagccggttacgagaagcgaggttgaagcgatacgcggcataaagtgtgacagagtgctcgagggtctcgaaaaaaaagaattgattgcggaagtaggacgttcggcgggaataggccgtccgatactctatggtacgaccgatacatttctcagaagcttcggatttacgaatataaaagagctgccggatatagacgatattgagggagtgattgcggtaagagatgagggtatagagaaaggagagccggacgcgcagcaggtggagtttgatctttcgggcggcttgatgaatgaggatatggattcaggcggtgatttcggtataaatgccgccggttattccgaggaggaatcgagcgcaggcagcactggaaatgtaaacgcggcagcaaagggaaaatgtgcggcgtctgccgcagaggagctgccttatgaggcggagggtatagataaagccgcaggcgcatcggaggaagaaaatggcgaaagataagacggaaaagactaatgtaatgcgcattctcgatcagaagaaagtaccgtacggaagctatagctacgcggataccgatgctataagcggtgttgaagtagcaagcgcgctcgggcaggatccggcggcggtattcaagacgcttgtgaccacaggcaggacgggagagcattatgtttttatgataccggtggcagaagaacttgatctaaaaaaagcagcgtcagccgccggagaaaaagcaatagaaatgcttaaatcaaaagagctgctgcctcttacaggttatgtacatggcgggtgctcgccgattggtatgaagaagcagtttgtaactgtcattcatacatctgcatctgaacttccgaagattattttcagcgccggaaaaatcggctatcaggtggagctcgcacctgccgatcttgcaaaagttatcaggtacacctttgcagatgtaatcgccgagtgataatactaaaaaaatagcttttaggaaacttttctcctaaaaagatgactttatcgacattaggtaaggtaaaactatcttttagtttttcaaaataaaagatagttttttgtttattaaatgcgagttgatagaaaaaattggattaaaaaatatccgccaagcccaaagtctttgaaaaatataacaccaaacaaaaaattaaaaaagagttatctttttacgcaataaaacgaaaaaggataactcattaaaacaaagtgtgatttacgggtttattgtttatgcacaacaagagaactatttaagccaattgctgataggctgtacaaatagtgcggtgcatatttgcggtactatacgaggttgaagcctgcggcgaggagcgctgctcttatgctggcggcgtggtttgcatcgcgcgtctctacgaggagattgacgaaacagctgttgacaggcatcagcggatcgctgctgctgtactgaatgtcgataacattacctccatattcgcttattatggacgagaaagtagtgagctgacccggcttgtccggcacggcgatggtaaacgacgttcttctgccgctcagaatcataccgcgcgtaattactctgttgaggatgttaacgtcgatgttgccgccgcttatgacgcagacaatatttttgccggcaagattgaatttatcaaaatatgcggcggcgacgggagatgcgcctgcaccctccgcaacgatcttctgcttttcgagaagcataagaacagcagcggcgatttcatcttcagttgcgagggcgatgtcgtcaacatatttgcttatgcagtcgtatgttatatttcccggagccttaacggcgataccgtcagcaaaagtgtcggcgctttgtgaagccataagctgatgagctctgaaggaattgtacattgccggcgcattcatcgactgcacgccgtatactttgcattccggcttgatgctcttgacagcaagtgcaagacctgaaacgagtccgccgccgccgacagcggcaatgacggcgtccgtctcgggaagctgctcgagaatctcaaggccgattgtaccttgacctgcgattacatcttcgtcgttgaacggatgcacaaaagttgcacctgtttctttctgtatttcgacagcctttgcgtaggcgtcgtcataggtgtcttttacgaaaacgatttcggcgccgaagctctttgttgactccaccttgctgagcggtgcgccggccggcatacatatagtacatttgatgccctctttttgagcagcacgcgctacaccctgcgcatgattgccggcgctgcacgctatgataccgcgcgctttttcctcatcgctgagtttgcttattttgtaggcggcgccgcgaaccttgaagcttccggtagcctgaaagttttctgtcttaagataaatgttgttttttcccgaaatattggatgcgagaattaaatcagtctttcttatatcaggcgcaattattttttgcgcgtctttgattttttctattgtgagcattaaaaaaacctcctgtttaattagcatttccttttttataaaaaatatagtcggaaattggtacttttatcgctgaggccggacatatcttgtaagatataaagtgcgcggtcagccgtaattctcatagtgatattctatacttaaaattctaaaactgcaatataataattttcggaattttactcgagatgcgcaagtaaaattatttgcaggagggctaaactatgagggtattaaaaaagaaaaataaaattggaaaatatattaggaaaaatgccgcgagcctatcaatgatagcagccgtgctcgcgctgtcggcgataataaacggaaatggactttgggtgtcgtcgcagagcctgccgcaggcagtactgacaggaggcaggcacggaacaggcgctccgggaatatctgcaagctcggccattgtcatagacgcagaggatggaagtgtgctgtacgaaaaaaatgcagagcaaaaggcatatccggcgagcactacgaagataatgacagcaatgctgactctggaaactctcgcagagcttaaaagcccattggatcaaaaggtaaaaattcctaaagaagctgttggagtagaaggttcgtctatatatcttgcagcggatgaagaggtgcgcatcatagatctgctctacggaatgatgctgagatccggcaacgatgcggctacggcgctggcgataataatcggcggcagtacggagaattttgccgcaatgatgaatgcacgtgcagcggaaattggctgtaccggtactaattttctcaatccaagcgggctttacgacgataatcattatacgacggcatacgatatggcgatgatcgcaaaagaggcgatggaaaatgagacttttcgtgagatagcggctgcctccgattatactgcggagcgcgcggcggacaaatataactatttttataacaaaaataagactgtgcatcaatatgaaggaggaaacggtataaaaatcggatacacaaaagcgtcgggacgtacgctcgttgcctcggcagagcgcggcgaaagacagctgatctgcgtcgtgatgaatgctcccgactggtttaatgacgcttacgcgcttatggattattgctttgagaataaataagcagccgcaccaacaaataagctccgccatattatatatacatataaataaagacggaggcttgtaatggagcaaaatttttatgactgtatcgactgcggcacggaaaattgcccgtgctatttggcggcaacgggtgactgtctcgtatgcagcagactggccggcaaggactattgcgactgcaactggaaaggcgtgtgcatatataatgaattcatacagagtgggaaaaaaataaataatgtacgggaagagtttacggcaaaagttgaggagaataagcgctacgggcaggatacggtcgtactcgtgcttgatgtcggccgcggctttgcactaaaatgcgctaaaccgggctcttatgtttttttgaaacgtgccgaggatgaggatttttataacattccgatttctgtgatgaaaagcgatatcacgggcggcaaaatacatctggcagtaaaagaaatgtcggctaagagcaagcgaataacggaagtacagccgcattttgaacatatagatgcaggcacaactgatagtgcaggcaaagccaatgaaaatattgcgggcagcaataaacgcgagaatattggcggagaggattcgctctgcgttcgcggcgtgtacagaaacggcattcttggaataaaaagcttaatcggcccgcgcggcaaagtggataccgaccgaaagatgatgatcgttacaaaaggcgtaggctttgctcctgcggcgcatatgcttgaatggatagacggaagagcacgtgccgatatatacaccgataccgataaaatagaagaggaactcatcgcagaatatctgccgcaaaggctgaacggcaagcgtgaaaacatagatctcaggcgcgaatttgaatttaaaggaacggagcggatttcagcactttataaggctggcggctatgatacacttgtcgtttttgcttctgactattacatcgaacaaataggtaaaatccttaaaattgatgccagaagcaataatttcaggctttgctgtggtgaaggtgtctgtggagcgtgcgcatttacagatgatttcggcagaacattcaaaatgtgcaagtgcagcggaattatgcctacagagagtttttgacaagcaacagtgttttttgtataataaatagtaaaaataatgaaagatgatacgctttgattaaatatatatgaacaaaagatacggaggagcgaaaatggaaaaatcgaaggccatacagaaacatctggaatggaaagggaaaatagaagtaattgccagggcagagatagaaaacaaggaggatttggcgatagcatatacgccgggagttgcagagccctgcctggagatagcaaaggacgagtcgctggcctatgaatatacgagaaaaggtaatctcgtagcggtagtaaccgacggaacagcagtgctcgggctgggggacatcgggcctgccgcaggaatgccggtaatggaaggaaaatgtgcgcttttcaagagatttgcgggaatagatgcgtttcctatctgcgtagactcgaaggatccaaaagttattgtggagacgatagcaaacatttcaaaaagctttggcggtataaatctcgaggacatttccgctccgagatgttttgagattgaagaggaactgaaaaagagatgtgatattccgatttttcatgacgaccagcacggcacagcaataattgtagcggcagggctgctgaatgcagtgcgttttaccaagagaaagatgggtgaacagaaaatagtaatctgcggtgcgggagctgcgggtgttgcgattgctaaactcgtgcttcagatgggtttcggtgaggtgataatgtgcggcagccgcggtattatctatgagggctgtccgacgaacaatccggtgcaggaggaaatgagccggattacgaataagggcaaaatgcagggtacgctcgccgatgcgctcgtcggtgcagatgtctttattggtgtgtccaagcctgacatcgtaacggaagaaatggtgcgctcaatggcaaaggacgctattgtatttgcgatggctaatcctgtccctgaaataatgccggatatggctaaggaggcaggtgcggctgtagttggaacgggcaggtctgattttccgaatcaggtgaacaatgtgctcgcatttccgggcgtattcaaaggcttgcttgctgtaagggcgagcaaggtaacggactcgatgaaagaagctgcggcgaaagcattggcaggcataatcactgacgaagagctcagggatgactatgtactgcctgatgcgtttgatccgagagcggcagaagcgatagcagaagcggtggccgcggaagcgataagattggggcttaatcgtatataggcgataggcaatgaatgcgctgaatatgcggaactgggcattgctcacaccgttttgttgtttgcatttttgtaatctgcgttatttaaggacaagcagtgtaacagtgtaaagagggtggaaaacgtatgaattttagagaagagcacgatacgatggggattgtaaaagtgcctgcggacaaatactggggtgcacagacgcagagaagctttgagaatttcaaaataggcacggaaaaaatgcctgaagaaatagtgcgtgcatttgccgtactcaaaaaagcggcggcacagacaaatgcggaaattggcgttctctcaaaggaaaaagcggatgctatagcgagcgtctgcgatgaaattctttggggaaagacaggtatggagcatttcccgcttgcggtatggcagacgggaagcggcacgcagtcgaatatgaatgtaaatgaggtaattgccaggcgcggaacggaaattgcaggtatcaagcttcacccgaacgatgatgtaaataaatcgcagagttcaaacgacacttttccgtctgctatgcatatagcggcggtgattgagctcgaagaaaggctgctgccatcgctcgatgcacttttcgcagagtttgaaaggctgtcagtggaatataaggatataataaaagtaggcaggacgcatcttcaggatgcgacgccgctcacactggggcaggaaatttcagcttttgccgcgatgctgaaagagtgccggaagatgataaaagcgtcggaagaaggccttctgtcattggcacttggaggcacggctgtcggcacggggttgaatgcacctgctggatttgcccaaggtgccgcggcaaaaatagcggaaattacaggttatgaattcagaacggcagacaataaattttatgcgcttacttcaaaggacgcggtagtgttttcgcacggtgcgcttaaagcgctggcagctgacctgatgaagatagcaaacgatgtaagatggcttgcaagcggaccgcggtgcggtatcggagaaattttcataccggcaaacgagccgggaagctcgataatgccgggcaagataaatccgacgcagtgcgaagctctcacaatggtttcagtgcaggtcctcggaaacgacgcagcgattggcgctgccgcagcacagggaaatttccagttaaatgtttttatgcctgtaatcatatataactacctgcagtcggtaaggcttctcgccgatgctatggagtcgttcagagttaactgcgcaagcggcatcaagcctaatattgaaaaaataaatgaaaatcttgagaaatcgcttatgctcgtgacagcgctgaatccgcatatcggatatgagaaagctgccgaggtggcaaaaaaagcatacggggaaaatattacgctgcgtgaagctgtgatttcccttggatatatgacaggcgaggactttgacctggctgtcaaccctgagcaaatggtgtaacaccaaatcccgcgccatttcatatgctgataaaagcaataaagcatatatttggggagggtttgatgtgtataaagcagtagtaataggcggcggctggtcgggttgcgctgctgctctggcagcaagaaaggccggagctgaggtggtacttctcgaaaagacagatttacttctcggtcttggaaatgttggcggtattatgagaaataacggcagatttacggccgcggaagagaatattgcgcttggcgcagatgaactttttaacataaccgacaaatgttcaaggcatataaacgtagactttccggggcataagcatgcgagcctttatgatgtcataatggtggaaccggaggttagaaggctgctgattgaaaaaggcgtggagataaggctcatcgctcgtgcagtcgattgtacttatgtaaaaacaggtgcgggaaaacatatagaaagccttactctcgcggacggcagcatcatcgaaggcgatgtattcatagaatgcacagggtcaacagggccgatgggcaactgccttgcatacggcaatggctgttcgatgtgtgtgctcagatgtccggcattcggcccgcgcgtgagcatcacgcaaaaagctggaaacgaagacataatgggtaaacgcgctgatggtgcgtttggtgcatttagcggctccggcaagcttatcaaggaatcgcttgcggaggagataaggcagatgctcaatgaaaagggcgtagctattattccgcttccaaaagaagaaataaaggaagaaaaactcggactcaaagtctgccagcagtacgcgctgccggaattcgcggaaaacattattttactcgatacggggtatgctaagattatgacaccgttctttccgctcgacaggcttaggacgataccgggatttgaaaatgcgagatacgcagatccgtatgcgggcggcaagggcaattcgatacggtatctttcggtagcggagcgcgacgattttatgcgggcaaaggatatagacaatttgcttgtaggcggtgaaaagtcggggctgtttgtcggtcataccgaagctatttctacaggcacgcttgccggctacaatgcggcgcgttttcttaaagggcttccgcagacagcgcttccacgcacgcttgcaataggcgatataatagggtttgcaagggaaagacttgataccgaagaaggacttatgagcagatatacatttgccggtgcggaatatttcagccgtatgaaagagacagggctatattcgatagacacatacgagatagaaaaccgtgtgcgccgcgagggtcttgcgggaatgtataagcagaaattttgttaggggactgacaaagttattgtaagtaaatttataaaaagggaaaaggagtacattaggatgaatgaaacagaaagaacaaaaaatgagggaaaaagcagcaaaaaaacaatagtgattttggccatcgttattttgattgcggctgcgattatagcggttgctatcgtatacagcggaatgtcgcgtaaaaataatcagacggattatatcggcgagcaaagagcgcaggaaatcgcacttgctgatgcagggatcagtgctgatgagacggcgtacatcactgcgcatatggattatgaaaacggcattgcagtatatgaagtgaattttgtgagcggtgatcctgcttatgaatacgactacgagctgcgggcaacagacggatatatacttaaacgcgatattgacttggaggatgatattccgcttgtaccgcagcaaggaaattctgacgcaggagcaaattcaggctcgccgggtgcaggaaattcaggggtgtcagacaatgcggattatatcggggaagacaaagccaaggaaattgcacttacagatgccggaattgacgaaagccaagcgacatttacaaaactcaagctggattatgataatggaactgccgaatatgaaatcgaatttttatcaggcggaatggaatatgaatacgaaatagatgcggtaagcggtgaaattatcgcttacgacaaggatactgcacattgaccttaatatctaataagccggcgctttgaagcgggcaggctttgcggcgggcatatgcgtcaattgaggattaaaaagtaaaatacaaagaggagaaagccgtgagacttaacaagtatatagcacaggcgggaatagcgagccgccgaaaggcagacgagatgatatcctgcggcaatgtaaaaataaacggttttgttgtaagagagttaggaacggatgtaaaagaaggcgatgtcgttgaggtgaacggcaaacgcatttacgagccgcaaaaaaaggtatatatacttttaaataagccgtgcggctatgtgacgacatcagctgatgaaaaggacagagcgacagtgctcgatcttgtcgccgatataccggaacggatttttcctgtaggccgactcgattacaacacatcggggctgctcatacttacaaacgatggggagctggcttacagacttacacatcctaagcatcacatatacaaaacataccgcgcgcaggttgctggggtgctcttaaatgagcgcgccgcgcgcctccgccgtggcgttgatataggcggttttgtcacttctcctgcacaggtaaaagtgataaagcagggcgagcgttcggcgcttgttgaaataaagatatacgagggcaagaacaggcaagtgcgcaagatgttttctgctgtcggcaacaaagtgacggcgcttgagcgcattgcgctcggtgaaatcaggcttggccgtctgatggaaggacattacagaaagcttacgcgggaggaaatcgagtatcttaaaagcttatagggcgaggctgacattttgcagaaaattgataagatacttataaagacgagccttgaacttaacgatggaaaatatatgcgcacatttgttgactttgcggctgaaagacggtataatataacggaaatttaaagagcagcggaggagatataatgaaacatattgaaacgatagaaactctcaatctgtgcgaaagtgcaaagaacggcggctgcggcgaatgccagacttcatgccagtcggcctgcaagacaagctgtggcattgcaaaccagacttgcgagaatacagagaagaattaagagagatctgcgaaagcaaataaacgcgaatctgaaatgccgccggttttggcggtatttttatcggaaagggaaaaaacaaaaatggtacatcagtataagctcggcggatataacatcgtcatagatgtctgttcaggctcgattcatgcggtagacgatatagcatacgatataatagagctttttgaagaagaggacagggatacggttattgaaaaaattacgcaaaaatacagtgttggaagcgatgttacggcagaggacataagcgaatgttatgatcaggtagcggagcttgcggcaaaaggcaggctttttacccaggacatattcgagccaatggcgggtgagcttaaagaaaagacggcgggcgtaatcaaagcgctctgcctgcatgtggctcatacctgcaatctcacctgttcatactgtttcgccagtcaaggcaaatatcacggcgaccgtgctgttatgagctttgatacgggcaaacgcgcgcttgattttctcatagaaaattcgggaacgcgccgcaacctcgaagttgatttttttggcggcgagccgcttatgaatttcgatgtcgtaaagcagctgacgcagtatgctcgaagtattgaaaaggaaaagggcaagaattttcgctttacgcttacgacaaacggaatgctcatagacgatgatgtaatagatttttgcaatcgcgagatgagcaatgtggtgcttagcctcgatggacgcaaggagatacatgaccgctatcgtgtggactatgctgggaacggaagctgggagcgtatagtacctaaatttcagaagctcgtaaaggcgcgcggcaataagggctattatatgcgcggaacctttactcatgctaatcccgattttcttgctgatatagaaaaaatgctggagctcggatttacggagctttctatggagcctgtagtatgtgcgccgggagacccggaggagcttacgaaagatgacctgaaaatagtaatggagcagtacgaaaagctggcagagcttatgcttgagcgtgatgcagagggaaagcctttcactttttatcattatatgatagatcttaaaggcggtccatgcatttacaagcgaatatcaggatgtggatcgggtacggagtatatggcggtgaccccgtggggagatctttatccgtgccatcagtttgtcggcgaagaggattttaagctcggagatatatggaacggagtgagtaatgtcagagtccaaaaggaatttgcaggctgcaatgtctatgcgagagaagaatgccgtgactgctgggcaagactgtattgttcgggcggctgtgcggctaatgcctatcactcgacgggctcggtccgcggtgtatacaaaaatggctgcgaacttttcaaaaagagaatggaatgcgcgattatggtggccgcatccaggctgctggcagaaaagaagggaaggtagagactaatggaagtgaaaattaaaacctttgatgagctcacgacgaaagaactttatgagattttgaaacttagagcggatgtgttcgttgtcgagcaaaactgtatttatcccgatcttgatgatatagattacaggagcattcatattttctatgagaatgaagatgaaactatagcggcatacctgcgtttctttaaaaaagagggcgagaatgacactgtgcagatagggcgtgtggtaacgagcaagagaatgcgcggtacaggacttggcggcaggctgttgggagagggcataaaagctgccgagaaaatgatgaacccacaggagatgtgtctttcggcacagacttatgcgacaggtttttatgctcgggagggttttgaaattacctccgaggaatatcttgaagatggaattccgcatatggaaatgcgccgcagaaaatgattctgcagcgcatttttttatagcttgtattaaagacacgcaagcatatcgttatatacttccgtaagcagcgtaatttcgccgcttgctttctttgcttcgtattcttcagtgtcatactggccgggaattctcacgccgcttgagcccggcgcaggctttgcgtttttaatttccgtgagaaaagcgtccatattgagcgtaaaagtttctgcaccgataaaaagatcgggcttaaagacgataatgagtgttccgtctgtaccttccgggatgccttcgccgttgccgctctgcgcgcccacaacaagtccggccaggatttcggaggcaataccgagcgcataacctttgtggcctgcgagcggaagctgagtgccgccgcgctctatcatatcgagcggatctgttgtagggtaaccgtccttgtttaaaataacattttcaggagcctgctcgcccgatttggcgagtattgcaagtttgccgtagctgataccggcggtagatacatcgcatactacaggcgaatctgcggccgggattgcaaatgaaatcgggtttgtaccgatatgcggctccatacctccataaggagcaactgatgccgacgcgcggcagaacatcatactgatgagtccgctgcgtgcgaggaaacgggtgtagtaaccgagagctcccgttgtttcgccgacgtagttgtgcacacctgcgatgattacagattttgtttttgcaagctcgactatgctgtcgcaggctttctttaccgctacaaaactgagattttgacatccatccacagatataacattgtcatttatactgatatttaaatcggtacgctccttgcggcttctgctgtagcgggcgatcgcaggaatgcggtaaaagccatgtgatgacttgcccatatattcgtcttcaagcagattttcaaacacgagcagcgcgttttcccctgtttcgcctgctgctgtcagtatgcggacagttaagtcgcgcagctcgcttacctttactgttttgtacattttaatataactcctttattgaagagttttacctccgtcacatacaaagttggcgccgtttacatatcttgcttcgtccgaaagcaggaagcaagccacctctgccatttcctccggcgtgcttggtctgtccatagtgccgttgttgagagcgtttttgtcctgagctgcacctgcatcggaatactgcgagaggatgccgtcgagcatttctgtatcaacccagcctggtgagaagcagtttactctgatgccggttcttccattttcacctgctgcgttcatagtgagaccgagcacagcaaatttgctcgagccgtaaccaatctcgaggtcgtagcctctcattcctgaacacgagcaggtgtttacgatagcgcccttgccgtttttcttcattacaggaatgcagtacttcatcataaggaaagtgccgaagacattgatttcgtacactctcttgaaatcttcaaacgaataatcctcggcaggagcgcttggaccggaaatgccggcaatatttgcgagaacatcaattttgccgaagcgcttttcaacttccgcgacaagagtctttacatcttcctcgctgcttacatcggcgctgattgcgcatgcgtggtctttgccaatctcgtcaacaacgctttgaagcttgtccgctcttctgccgacgataactaccatctcagccccctctgctgcaagctgctttgcgatagcccttcctatacctgtgcctccgccggtaacaattgctatctggccgtcaaatctgtttttgttcatttataatacctcccatattgtggataaaatattagaaatattttgaaaaattccatcactaaattatatattaaaaagagcgcaatgtcaattgtataagcggctgtatgatagataatgcaagcttttttatctttgtttaccgcggactttataattgataaacacgaaatatccaagcagcgtatatgaatagaagacaaaataaaaaagaggctttcggagaaatccgagagactcttttatttgcttatttgttttatttttaaaaccttgcagactgccgcgtgcggcaaatgattgcaatttaactgtaatttgtttttacagcttgactatttccctgccgtgttcgttgtttattatctgaccgatagcgctgtaaatggctgtaaaaccgcagataattccttcgtagccggcaataagcgtaatcgtatggttttcggtaaaatctcctattgagagaagcaggaataaaagcgtaagcgaaccgaatacgagctttgtaatagtattgtgcttcagtgcccctgcgaacataccgcctgtaaatattgcccagagcaggagatatgcgcccattgaaaagctgtctgcagcatttgatacaggcagtatccagatgattacgagcgaccaccaaaagcatccgtacgcggtgaaagcagtacctccaaacgtgttgccgtttttaaattcgagaatgcctgcaataatttgagcaaggccgccgagcgcaatgcccatagcgactatcactatcgaaagaggcataatatcggcattgtgcagatttaagagcactgttgtcataccgaaaccgataagtccgagaggtccgggatttgcgtgtgttttagctgtttccatattgttgttaccattcctttcaaggcgttatagtatcaatatcatatcatgcggcagtgcgggacggcaacaaaaatattcgcggaatgacaaaatttaataactctatatcggctgctaattgcaaatgcgcaggcttttgtcagcagcgcacttagcgcaggtgtttgtcgagcaggtcgataaaagtctcaaggtattcggcatttgggaatatggctctggcattatctgcgcggccgcctcctttgccgttgtaaatcggcgcattttcttttatgaggcggccgcagtcaaagcgcttgccgtccgaaaagagcatcacggtatttgagtttgtatcggcaagaacgagaagcttctcgatacttcctatgaacggcttgccggtgtgcagaagatcgtcaggtttcatatcattgtatctgcgaactataagcggagagctgtgaccgtcttgctgtctttcgttttctatatccgctgtacggctgtcaatgacgatttttcgcatagcagcaagctccatgcgcacagcctttgctttttcgtcggctatcgccattttttcttcaaggtcgtctgtaccggcgctgtatttgttttctattgcggtaattatgtcgtgctttttttcataatcgagatatgcgcgtctgccggcttcgcagtaaatgcggaacattcctttgttgggctctattttccatattttaataagaccaacctgtcctgcactcgatgggtgcgtaccgcagcaggcgacgcagtccgatgcgttttcgatgcttccaatgcatactatcgagatatcctcgtctatggtaagagcttttctgagcggcatagctgaggcttcttcgcgagttttaaatcggtgcgttgtgatttgcctgtcgttccagatgacttcatttgcagcgagctcagcctcttttgccatatcccaggtgagggtattgtaggctggatttttttcaagacttatgtcaattgtcatataagcctcacccatatgaaaaccgcggtttactccgccaaacttgctgtagaacatacccgaaagtatatgctctccgcagtgtcgctgcatattgtcgaaacggcgctcccagtcaattttttgcagcacgcgcatgccaatatccgctaagtttaaagaagcggattgtgcagaaacgtccgctgcctctgcggccgggcaattatcataaagaggtattgccctgtgcagtacacgcttgccgtcttcaaatacgcttacaatttcaaaagcggcgatttttgtatcggcggtgttttttgctttgctgttttcatcgccgagtatgtaaataaagcctgtgtcacacgattgaccgccgcctgtggggaaaaaaatggttttgtcaaattcgagcaagattccgccatcagtcggttcacaggaaataattcgggctgcgcattctttcatataaacatctttttgatatactctttcggttttcataaagtttaatagttccctttcttctataacttacctttagacacgttttttccgccgccgcggattagtgcggggcataatgtaataaaatctcatgcaaatattataacacaaatttcaatatttggcgttgacagctgtaaaacgggaagaaaacgacttgggtaaagtttgttttacataataaaagctttagaaaatgaatttttttgttgtccaaaaccctgcgcttgtggtataatttgctaagaaaataactaatttgctgaacataggacaaaactaccgcgcataaatatatatgaaaatatatatgaaaggtgcggaaaatgaaatttacatcggtaaagcgaaagctgcgggtgctgttctgtctcatatgcataatgataatcacagcgtcggtgcctacgggaagcagcattcttacaggagttgctaagctcataaaaagtgagggaaagaaaacggcagtcatagttatagatcctggacacggcggtatggacggcggcgcggaaagcagctcaggaacgtgtgaaaaggacatcaatcttgctatagcattgcacgtaaaggaactggcagagaaggacggacataaggtcattatgactcgggatgatgacagacttctcggagatacagaaagcggtactatcagaagtaaaaaaacagcggatctgatagagcggaagcgtatcattgatgaatcgaaggctgattttgccgtgagcatacatcttaacagctttaaggaagataggagtgttcacggagcgcaggtattttatccgcaagggaaagaagacgaaaaggtaatcgcggacagtaaaatgcttgcggaaaccgtttacgaaaaaatatctttgggtcttgatgacgggacaaaccgccctgtacttgccaaaggtgatgtgcgcattttaaagaatgtgagcgtgccgacgataatagtcgaatgtggatttttgtcgaataataaagaagcagagctgcttgaaagtgaggaatatcagaaaaagttggcacagtttatatacgaaggaatttcagatgtaaacagtttaaataaaactcaaaaatctgtggaaaacacttttgacagtaaattacatgatgacgaaacttattgaaaaataagcagttgaggctaagaaagttatccacagtcaccagtggataatttcgtatacaatttttaaaaacttgtggaaaaatccagaaatccgtgaaaatcaatgctctaagctatgttgaaaaatgtttgcaggcagaagaacgcaagtttacataatacggaggaaaaaataaagaagatgattaaagagaatattgcttggaaggccaatttgccaatacaagtgctgattgccgatatcaaagaatggccgattcactttcataatgacattgaagttatctatgtgctcaaaggcagcgtcaatataaaaagcggaggctatgcttacaggcttgcgagcggcgatatttttattgtaaatgcaaacgagatacatagcatagaggaagatgctgaagaaaatatggtattttgctgtcatataaataaagaatattttacacgttattatccggaactggaaaatcgcttttttttcattgggtccaaaatgcagcacagcgagggaacggaaattttaagggatagaatcaaccaagctatgctggagattatggaaaagggcaggcattataaagataaggttgtggaaactacgcataatatggtggcgcatatgctggcgagcttcagttattcgcttgaggaaggggagcaggaggaaagaagcggcagtaaagttctcacgagaaggctcatacgcattatgaattatatttgtaaaaattacagccgcaagcttacacttaatgaaattgcagaacgcgagaatctgagcatatattacctttcacacattattaaggaatatacagggatgtcatttcaggactttctcaattatctcagggcacatgagtcaacggcgctgctgacgggcacgagcaaaaaaatatcggttattgccgaggaaatgggcttttctgctgtcaggtattacacgaaacactttgagataagctacggcattactccgcaggaatatagaagcaggtataagcagggcatgctgtcaagatatgatgcgggacttttatgtaaatattcgagaagcgctcctgaggatattaaaaaagtgcttaaatctcgttctgaagacttaaatcgggaatcgcttttcaggaatattacagagcctgtcatcattgaagcggatataagcgatgtgaatgcttttgcagcaaaggaaaatttgtttccgggacgtcttttcagtacggaaacgatgaagccgattgcgaggttatataatattatggatagctttcatgaaaaagtgattgtcagcggcataaattatgtcatcgcgaccgctgagaatgatgcgggcgctgccgaaagcctgagtatacttatgtacaacctcaatgatgatatatgcgatgagctcaggcaggcatcgtttgacaaggcggccgtattaaaatgtgtggaaaatgtggacatagatacggattttcttgtaaaaatcaaaggtcttagcggcaaatatactgtaaacaggtataaaatgagccgcgaaaatgcgataacaacttatgaagatgcaataaataaacagaattttatcggaagacggcagatgatattgaacaactggcgcacatttccaagtatagattttcggcaaataagtgtaaaaacaacgctcaatctcattagcagactgtcgggcttttcggcagagctgatactaatagaccgcgttgacgatgcgaaataggaaaagcggtgcggcagcacagaataatgaggcggcgatgcggagaaaaagagacggcgatcaatgatcgtcgtctcttataaattcaagaaaatcgttaaaatcataaaagtcgctctgtaaaaaatcgtagagtatcggttctttgaactcatatttggcgataggaaaagcactgccggcaatcggactttttcttatattgctttcgagcgtgtgaataccgtgcaggctgtatgaaaccgcaagcatctgaccggtttctgagatataaagaagcccgctcacatcctcgcttaaaaggaaaatgcggctcttcacatgattgttgtgcttgttaaacatcatgtacattttgccggtttcgtatgaagtcgtcatcgcctcatctatgagacttccgcatctcatttcaaactcagaagcgtcaaaaagcaacgtgtatatcgtcataaactcaggcctcgcaagctgcaatgcggcttcggcaggcgttaccttaaaagcgcttacacgttcaaaattgacaaccgttccgcggccatccacctcaatttttgagacagctaccatatatgtgatatcgatctctatgagcgattcgcatatatatgcacccggactttctgatgaggcgtcggcatcaatagtatttttgcacagcgatgccggcggaatgtcgttaaagagctcgagatctacatcttccgcggcgagaaaacgagccgcagtcatatcttttccgaacattctcatcaaaaaatagtggataagttggtagtcgttttcgatcggcgtacagatttttttcataagcgaatttatttcgcggggatcgggctgtggttcacattcaagcagaaaagcatattcgtcatattttcccgggaaaggcttttcgtattttttgttaagccctgcaaattcagtaagtataatgcggcattcgcgctccgtgagttcattttttttgccgccgagccctccgattagtgtattttcgactttgtgtatttccttagggctgtttccatagacgctgatataattttctatggcatattcctcagcgtcgagataaaaaaattgataaaaatcatccgtaataccgcttttttcaatttcccaatgtatcgaaagaccaagcacgcccatgaggcgcgtgtcggtagcatacgcgtttacaaaatctcttttatctatgctcggcggcaggtcaatgccgccttttattactgtaaatctgttatcagtcaaatcatcacctccggctttataattagagtatacccgaaaagaaaaaaattacaagtatattcctgcaagcaaataaaaaagatgcgggaaatgcggccgaaatcctgcaagaatattgacaacaaatgttctgtgctataatattatagatagaaaaagtaaatagaccttatcgagagagactgagggaataggccctatgacgtccggcaaccgggtatccgcttaagttacgggtatcagcggtgctaattcctacagaatgtatattctgaaagatgaggaaagataacttataaaatctatctcgtctttgggcgtgcggttttacgggcggttatgatgcgcctgtaagtggacttttcctgttttcgcggcctgcaaggcgactttttattttttgcaattgaatatacaagtttatttgctatacgaattataatgaaggagaaatagaaatgaagaagctttttacatctgagtctgtaacagaggggcatcctgataaagtatgcgaccagatatcggacgccatacttgatgccatccttgctcaggatccaaacggcagggtggcagctgagacaaccacaaatacaggatatgctatgataatgggagaagttacgaccaatgccacaatagatattgcgcagattgcccgcggagttatactcgatataggttatgataagagcgactatggatttgacggaaactcgtgcgctatctttacatcgctcgacaagcagtcgggtgatattgcgatgggtgttgacaaagcgctcgaatataaggaaggtacgcttgacgatatgatagagactatcggcgcgggcgatcagggcataatgttcggctttgcctgtaatgaaacgccggagctgatgccgatgcctatatctattgcacataagctggcaaggcagctggcaaatgtgagaaaggacggtacacttaaatatctgcgtccggatggtaaaactcaggtaacggtcgagtacgacggaaataaggtgaagagaatagataccgtgttaatttctacacagcacgatcctgatgttacgactgagcaaataaaaaaggatatgattgaatatgtaataaagccgattattccggcagaactgctcgatgaggagacaaaatattttgtaaatccgacgggacgcttcgtaatcggggggccgcagggagattcgggacttaccggaagaaagataatagtagatacatacggcggatacgcgcgccacggcggcggagctttttcgggcaaggatcctacaaaggtggacagatcggcgacatacgcggcgaggtatgttgcgaaaaatatagtggcctcgggtattgcggagaggtgtgaaatccagcttgcatatgctatcggagtggcaaagcccgtttcgataatggttgatacttttggcacgggtaaggtgagcgatgataaaattgcggaaataataaatgcgaactttgatctgcggccggcggcaattattcgcgatctcgatttgagacgccctatttacagacaggtagcggcttacggacattttggcagaacggatgtagatgtgccgtgggaaaaaactgatatggcagaaaagctggcggcggacgcaggactgtaagagcagcgcgctgctgatgagcgagtgctattgcggcgtaggctttgtctattttacaacttgaattttagttcagaaacacggaaaaggagatgtgaggtatgaagacattaacaccgagcgaggcttgggaattactcaatgaatataataagggagagtttcatttgaagcacggacgcattgtcggcgatgtaatgcgctggtatgcggaaaagctcggctatggcgatgaagctgatttttgggagacggtagggattctccacgatcttgattttgaaatgtaccctgatgagcactgcattaagagtcaggaaataatgaaatcgcttgacctcgatgatagactcattcgcgctacggcgagccacggttacggaatatgcgtggacataaagcctgagcacgaaatggaaaaagtattgtttgccgccgacgagcttacgggtctcatcggtgcagttgccgttatgagaccgtcgaagagcgtagacgacctcgaggtgagttcggtaaagaagaagtttaaggacaagaaatttgcagcgggatgtgaccgtgaagtaataaagagcggagctgagatgctaggctgggagctcgaaaagctgatggaacagacgatactcgcaatgagagcgagcagcgcggttgattaaagatattaaaaaataaaagaagattttatgccttggcatagctgtcagtcataaaatgtatagcagtcagcggaatacgaaaacaaagatggtgcaattgagcgccatctttgttatttaaaatgtatgtttagctaattagatggtttaaggcaagtagttttctccagtaaacgagtcaacggtcatagtggtactgcctgtatttttaaggcgcagccgataatagcatccgtggccctgcggcatcttcgcaggtctttggcagctatttactgccaaagactgcggggcagacgctttataatagctatgccggctatcattttaagagcgtcgcccggaagatacggcacgacacacatcataagggaagaaagaaggccatttcctgtgatgtacataaaccaaagggtgcccgccgcatagcaggcggccgttccaagcgccatagccgcagcaagcctaaatacggatggctttgcgatcctgaagatggtcttatttgcaggcaagtctgcggaaagcgcaattgcctctttcttctgcgataaagtgccgcagatggcggcgcagagcatatagccgattatataaccgccagtaggtccagcgataataccgaagccgcctgtaccgccgctgaacacgggagcaccgacagcgccgagcagtacatatactacctgcgatatggtgccgtaaacagggcccagtatgcagccggagagcattacggcaaaggtcgcgagatttacgggaaccggggt

SEQ ID NO: 2401 - DNA, 2434 bp, Unknown
  16S sequences of unknown bacteria
cgctgtcggttaaccgacagcggcaggttttggtatatgtgtgcttccgccgcccatcgttatttagccgtttttaacatctcaaaagccggctataagctttgtaagggtggaattatccgagtccgaagacccaaaaagcgccgtcataccgcggtttcgcaacactgttattatatgaccgaaaagtaaaaatgttaataccgaaattcaaaattcggcatagattcagaaatccttttcaaggctcattaaaagcttcgtgattatcggttgtttaactgcttcgtctattgaaatttcctttttgcatacctcaataaagattgtaaatgcagccataccgtcctcgggacgcggtaatttgagccgcgtttcgcagtattcgtgcgctttgtccgaataaatcgcgcgttctccgcagattcccgcgtacccgccctcggttatagatgagacggtaaagccgttttccgcaaaaacatccgatttgatataatccttgagactttgagtgacttcctctgtccggaccgtgattctgatcttacggtcatggcttaaaaaagcaaatccgttgggcatgtcgctttcatagtccgtatcgatcaaaatattctcgggcagagcaaagctcattcctccgaaatgaaaccgactgtttttataataaagcataattttcctcccaaggctcaaagccgaaatattcgccgagatttttgtgacggctcaatatatatcttcgggcgcaccgtttcctttgcggctttgccggacgaattatcgcagtacatatttttctccgtcaatttgataattatagcacagttgatacaccataatcaataatatcatagatattgcgcattttttgtcgaaaattgtaaattaaaatgcgttattgataatattgtgagtcgaaaaacgaatttaagcctttccgtcggtaatatatctgcccgggaattgtatgaaaaaacctcccaaagacattgggaggttatgatacgaaatgaaaaatattatgaaatgataaaattccgaattgcgtttattgtttattaagctcatcgggtaaagcgatttcgccgttttcagcctcaaactcttttatgcatcttcttatcagatacacaatctgcccgttggttgagcgcccctcgtattttgaaatgtaacgcaatttgaagtgtaaatcgggtgcaatctccatgcctaaatgtttattgtttttatttctcaattatatcacctcaatcttattttaagttgattttaagattatgttgtgatataatgttgaaagtatacttaaactaagtatactaaatttttaggagatgatttaatggaatgcgaaaattcactttgcatttatgaaagggacagaaagtgtattttagaaaaaatatccgtaaatatgcttggaatctgcgatgattgtatttacccgagtatagacgatgaagtattgaacagcttaaaagaaaaaaccttaaaaagacttgaggatgataatgaaatctgttaatcccttaattctcagtaagctttaattattagcgcgagcgagagaaatgcggttaaaatttccgccgcgcccatcataccgagacgaaagccgaaaataaaaacagggtctaaaattatgttggcaacagcgcccgcaagggttgagagcatggtgaatttcgggctgccgtttgcccgtattacggtgttcattgcctgaccgaatacataaaaggaaagcccgagggttatccaaaaaagcatttctttgaataattataggtttctttatttaccgttctgccgaaaacggttatgataccgtcggaaaaggcaagggatattgccgtgagtatcaaccccgacagtaaggaaagcaaaatagaattaccggcgcttttcgcagccgtatcaccgcggcttttaccgagtgaaatactcgaaaacacacagcattcgtcatctatcataacgcctatggcaagcgctgttaccgcaaacggagaaacaaccgtgtttgcggcgttgccgtaagagctgagataatacgcattggtaatgaaaatccggtcgactatattgtaaagcgcaccgaccaacagcgaaattacgcaggacagggagtatttaagcatcggcctgccggttccttcacttgaaagataagaattgttttgtttgttttccgttattcgagcctcccgctgcggcacaaaaaaacacgcaccctcaaaggatgcgtgttttttaagtgacacggtacttttcggggctgtcctcggtttcgtatcaggacaggaggagtccgtgtgtcgtgtcaacagcaatattattttttgatattataatgtattttttcgatttaatgcctgctgaacaattcaaaagtaccttaacccgagcatgttggtgtaaactt

SEQ ID NO: 2402 - DNA, 29887 bp, Unknown
  16S sequences of unknown bacteria
aaatcacatcctgctttctgttcaattatacaaatagtatagcaaaaaacaagtagatattcaatgaaaatccggtgatgaaggaaagcatttttattgaaataaaagcagtttttttatctctcattttgttatataatgaaagtcaatgagtcgagaggaggacatcatggagttacagaagggaagacctgcagatacagcgggcagaatggaaaaagagatccgcacctatgattttctggatgggttaggtgtggagtatgacagagtagatcatggtccggccatgaccatggaagactgcaaggaggcggatgaaattctgcaggcaacgatctgcaagaatctgtttttatgtaatcgtcagaagacggcattttatctgctgatgatcccagatacgaaggtatttcatacaaaggatctgtccgcacagatcggttccgcacggttgtcttttgcaagcccggaatatatggaagaattcctggacattactccgggctctgtcagtgtcatgggactgatgaatgataaggaacgtcgggtacagcttctgatcgatgaggatgtgctgggtggagaatatattggatgtcatccatgtatcaacacttccagtattcgtttaaagacaaaggatctggtggaaaaggtgattccggccatgaatcatccatttatgaaggtgaagctgtaatttggattaataatgacagcaatcaatagcaaagagttgacgatggagaatagaggagttagttatatggaacagacatcacattttgcccgggtgcttgctttcctggaggagaagggttggaaatatagtcactgtcgcgaagatgactgtggcagcattgattttgaatatcggggagttccctatcatatctgggaatttcatgatggagacgagtggggtgtggagaccaacatccgccatggcggccgttcagaggagctgacgggtgattatgagacagaattgttggagattatgaaggaatggcattgacaaaaaatctgatgagccagattccaaaggatttttaccggctctttggaagcaaatatatggagtactatatgacatttctggtggcgatctgtgaggaaagcagcagatcaggttccacactgggacttacagaacaggaatgtcggaccattatcaatgaaaagctgacagagactaccattgactggagcgaagaacgcttcgatgaagaaggaagccttctgacccgcagcaatatggcggcagtttgtctgaactattttgaagagtggggatggcttcggaaggactatgatgagacgctgaacagctatgtggtatcctttccggaatatagccagttgtatgtggaattatttcagaaattatataaggaagaggacagcagcgaacgtgagagcgtgctggctgtctatagttatctctttacttatagttcggatgcagagaagaataacgagattctggagagtgcccttcagacttccagacgattgtccagaatgcttggaaatatgagggaaggcatgcgagggtattttgatgagctgtccagacagcgggatttccgaggcattcaggaagtgcttgtcaaagagatcaacaacagcgacagcaaaaagtatgcgatcctgacaactacagacagtttttaccggtataaggaagcagtcaaggaactgatcgatcagaacctggcggaaaatgaattgcggcagcaggaactggagcagaagatcttttctatgtcaacagcagagcgggagacattggcgggtatccggcttcagagagcactgactcgttgtgaggaagccagtgacttgatcgttcagatcgagcgggaatttgatgcggtagagaagcgttataatcgactgatcgagcagaagaccatctttgccagccgtgcagcggcaaggatacgatatctgcttcaggaaggtgaccgaagagaggataagactctacagcttgtgaatctgttgagccgcagtgacaagaaggaagagatcatacaggatctggcagagaagatccaggtgacatcaccgttccgcgtgattacagagaaaagtctgtacactagaagagacagcgataaagaagcatttgcaccggcagcggtacagaagcctgtggaagagccagagaacggactggaagaatttgtattaaagccgctctatactcacagggagatcgaccggttccggaggcagcacatgaagcatggtattttcgaggcagatagcaaggatattcagtctgtagaggatctggaaaaactgttctttgtgtggcaggaagctaccgagctggcagaaggaaaacagaaaattgaagtcggagaagagctggtatctcagggagagacaggctttaaattctcacggctgaccatagaggagaagaattaagaatgacatcgtatctggaagaactctccatgacggaggctgataatgtaaagcgcacgatccgggatctgtttcggcagacctgtattctgcaggtgaagtatgatccggctacgctgatccgcagggacaatccccggtatgagacctgtgtgcgtcatcgggcatttattgaacaatatttgtcggtgttgggctgtgagctgacccatgatccgcaggaacatattttccggctgacaggagaaggagtagcaacggaacgtctgaatctgacgactactttgctgatcctgattctgaagcttatttaccgtgataagattatgggagaaggcttaaatgccaccgtgattacgctggaagagatgcgtgaatatggaaaaaataccaatctgatcaccagaaagctgacggatgcagagtggagagatgcgctgtatgtgatgagggtgcatcagatgatcgatgtgccgggagccgtcaaagatgtggaagataccacacctatctatatttacagtacgatcaatctgtactgtgcatcactggatattgacaagatcgtagaaaaatacagagaagaactgaaggaggaagaccttgaagcaggcgaagaagatcattacgaggatgctgatcaataattggggcggcatcagccatcgaatgatggaatttcatgaatatgtgaacctgttcagcggcaagagcggatcaggtaaatcaacggtaatggacgctgtgcaggtagtcctctatggaagtgtgtctgcatcttttctgaataaggcagcggatgatgcgaagaaccgaagaagcgtcatgagctatctgcgtggtgcacagaaggatggtacgtccaaccgagcggatcaggatttttattctacattggttctggaagtaaaggataccgggcttcataccaccacctgttttggcgcggtatttgagatcggcagaacggatatggatatcaatggaaaatatgcatttttcagccattcgggttccatcccggaggacggatatctgaatgcggatggcgtgccttattccaaagcacagatccgcaagctctgcgagacgagaaaacagtcgacggacaaccgaggacgagtggaactgaatcggatctatccgtccagagaggcttatgtagcaactctttatgacgtgatcctgggaggcgtggatccgactcgtcttatgactatggagaagagtgccattgcccttcggatgaccaatggtacaggacagtttatccgggattacatgttccccagaagtgaggagagtgccattgagaagatcagtgagcagcttggtgcttaccgggagattaaggaaaaagtagaggatctggaggaacgtatccacatgctggatacgattcatgagagccatacggcactggtcaatacccggtcagatatggttcgtgcagaagctattttgaaatacattgagatcgagagcacgaaagctcatctggaagcgagaagtcaggatctgcagggcttaaagacgaagattggatcgctggagacagagcagaaggaaaaagaaaaggaacagaaaatctgtcaggaagctctgatcgaggtcagttccagactgaaagccagtgattatggtcagaaggaaaaggaactgcaggcattaaaagacaagattgttctgctggcaggcaacagccgtcagtggcgcggtatcgtagaaggactatgcgcctgggaagaggatgaaaatgttaccggctatgtgagcaattttgccctgcagttgatcagtgaattccgcaaaggttctgtgacggaaaaacagtgtcaggagctggcaagacggctggaagaagcagcttccgccgtgtcagaagaatatgaggatctgggcaccagtcttcgggagacaggaaaagatctggcagagaaaaaagagatcctggaagatctgaaaaatgacaggaagcactatgaccagaatctgaaaaaggcgagaacccaactggaggcagcactcactaatctatatggaaagaaagtgccggtctctgtatttgcagatctgtttgatattacagatgaaaaatggaaaaatgcggtggaaggtcgcatgggtcgtgtgaaattcagtttgatcacaccaccggaatatgcgctggatgcggcgaaactgttccgtcggatgaagcagtatcaggagatcgacctgatcaatacggcggcgatcaagcgagatgagcccacggcacagtcgggaactttatatgagacagtgcggacagaagaagcttacgtggatctgtgtctgaagaggtatctgggacgcatcgtaaaatgcgagactgtagaagagctggaccaggttcgcgacggtgtgacgccggattgttattcttacagcacctatatgttccgtcatctgcgcgaggcagattatactaccagagcctgcattggaacaaaagtttccaaggaaaaactgcaggagctgacggatgaagtgttccgtctggagaaggagtatcaggagtccattcatctgcgtgacagcctgaagcgtgccatgggatttgaaaagcttggcatggatccggcgcagctggcagcattgtccaaggcagccgcacagctggaagatgcggcaaaagagcaggatcgactggaagaggaactgcgggaactgaaaaatggaaccctcatgtcagaactgacgacaaagcaggcagaacttcaggaacaggagagccagattaaggagcgtctggtgaagatccaaacagagctgctggatcagaccaaagcactgggaagtgcagagtcagatgtgaagggctatgaagaaaaactggccattcttcaggaaggctttgtggaaaatgaagaactgctggcagaagtgacagagaatctggagactctttcagaagccgcctatcggaacaagaagcggcaggaactggtgaagcttaccgaacaggaggaacaacagcgggaagaccggacccgtgcccggaatcattttaaccagaaatatccggtctatgattttgcagatccggataaagacaacgattgttacgaccaggtactggagaagtgccgcagagattttgaaccgcaatttaaagaagaatttgcaaagcagtgtgaactggtctatgcaagtctccgggacaacgtgatcgcggcaatccacggagagattaaggcagcataccgtcacgcgagagatatcaaccgtctgctgtcacgcattcgtttctctgacagtgtgtaccagatcgagatccttccggcgcagaatgagaacggacagttctatgagatgttgacggcaaaagaactggacagcaaggtcatggataatcaggggtatgaaggacagatgagccttctggaggatgatttctatcagaagtatgagcagaagattcagcttctgacggagaaattcatgccgccaagagaggaggatgcttccggtctggagaaacgtcgtcaggagatggagcgttacgctgattaccggaattatctgaccttcagtatgtatgagaaagtagaaaacccggatggttctatccggaagaatccggtagatgagatggcaggtcgtgattcaggtggtgagggacagaacccgaaatacgtagcactgctggctggttttgccatgctttatatgcagcagagcagccgggattccaaagtccgtctggtactgctggatgaggcattttccaagatggacaaggaacgaagcgaagtgtgcctgcgctatgcaagagagctggaactgcagcttatcgtctgcgtgccagatgagcgacttcaatccctgatccgcaacgtagactgcgtctatggattccgtcggtatcagaaccagatctccatgatgcacattgataaaggcagttatctggaaatgatcgcaggggagaaggaagatggcgatgaagcaggagcggacgaaacagaagatacagtcattgagtagatacatcattgagaaagccgaatgtgatagctatcgtgccggaacgcgaagtaagcaatggcatatagaagcagatcagaaactgcttgatgcggttggtggtcgttctgtgctgctcagacaggctgtcgagttggaaaagcttaccggtatttccggtaaaattatagtaaaatggaaagcagtcaggacagaaatcgagaagatcacagtcagtcctgacgcaatcccgctgctctgccaggtggagcagatcgaggatccaagggagcggcagttgtcacagatggaactggcagagagctggaaaagcctcgtagcgcaggcagactggctgattccctattatgatcatatactggaacgactgaacagcggaaagcttgtaaaggatgtgccaggtttggaagacccgctgtttttcttatttttaaacaagacagcagaagagaggaaaccgttatatcgcagagcattcagtgcacaggtctgtacaatatggaatgggattgcgcaaacgaagcagagcgagtcgaagattacaccaaccaaacgatttgagaagatctatcagtctgcggtattgagtgttctgaagcaatattctccgttatatgaagaaggaatgtctgacgaagaactgctgacagctcatggaattctgacttatgcacagacattggaatttaagggagctgtatcctatcgaatcgatgatggaccggcaattagcacagcagcgcagatatacggaacaatgttcaacaaacagacattagaaaatgcggttccgataagtatagtggggatccgacagattatgacgattgagaataaagcaaattatgaaaagatgcaatttcgaccggatacattgtatattttctgtcatggatttttcagcccgcctgagagaaagttcctttccagggtggttgcattagctggaacggataccgaatattttcactggggagacatggattacggcggaatccggattttcaaatttctgcagaagaacctgtttcccaagttgaagccttggaaaatggatgtgacagattataagatggctttacagatgggtgcaagtatttcgctggaaacagacaagcgagaaagatttgagcagatggatgcgggtgttctgactccactgaaagaagcaattctgaagaatggcaaggaaatcgaacaggaattgcttttattgtaaacagaatttcgcagggagacctgtgttgctgaaattttaggtgcatgacagagacaactgtggtaaaatagtcacattggagcagttacgaaaggagatattcttaatggtacgtaaagcagagataaaaacagtagaaggccttcgtggaggcaaaggcaagcttgagatgcatcacatcctgaaaccggaggaactgaacggtcacggaagaatgtatgcactggtgaagatggagccgcacagcagcattggtgtgcatgatcatattggtgagactgagccgtactatgtgctttccggtcatggaacgtttatcgatcatgatggttcccggattccggtaggaccggacgatgtctgtatcattgaatgtggacagcatcatggatttgaaaatgattctgatgaagagctggtcatgatggctttggtatataacgagtagagacaggagaacaaagatggcagcagatattatcgatttgaaagaccgcatgaaaaatacggcggataaaaagacagttgcagagaaggtgcaggatttaaaagaggcctatgcactgatctcacctctgacaaacctcccttatgttgagtgtgaacaggagaattttttcgatcaggttctgctgtatgagacgaaggaagatgcagaagcagcggcaaaagtatatggcgaaaaaggtattcgtgtacttgtgcgggatctaaagacgctggagctggagcttccggtgaaaccagaagaaccagatggagagaaacggaaagtatttctcaatcaggttcgacagcatctgggtattcttccgttcatgggagtgaatgcagtgtgctataaagccgcagatgctcctgcagaactgatcgaactggaaaatgtgctgcctgaggattttcagaaaaaagtggcagctaatgccctgtatcagccgaaccttcagctgactggcgtatatcttatgcaggaagcaagaaaaggcaaagatgccgtagaccggaaagtgcttcatgatctggatgaagaattttcttccaatctggtaaaagcaaaggtatttatgccggtgcttccaccgaaaggaaaggaaaaagacccgcagttaaatctgaaggagtgccagatcccatatctgaagcatcagaatggtgatttgttcttcccggtatttaccgatatctgggagttccagaaatatgcccagggaaaaggagctcttcgctctattcagataccatttacgcagctggaaaaatttgagggaaaacaggcaaaggcatatatgctgaatcccatgggattttctattccgctgacaaaagagatgattccaaagcttatgaagaaatttggatatgaaagctccggcatgtgaaggtggatctacggtaactcttcatccaggtgatttcgcagttacctttccggaggatgcccatatggcagggcttaccagtggagaagagaagacgatccgcaaggttcttgtaaaagtaccggtgtaaacagttgacgcaaacattgtagatgtgctatacttatctaagttatgtagaaaaatcattcaggaggaaacacggatgaaacatattaagactttgaatactcagactctgcagaacaccatgaaaaaaggcggatgtggcgagtgccagacttcctgccagtctgcatgcaagacttcctgtaccgtaggaaatcagacctgcgagcacagcaaataagaggagtttttcagtgaatgagtaagcagcggctcccgccgctgcttcttctttgtcatagagacaacatgaaaacagagaaaatattggatatacaacacagaacagaaaggaaaacatgcatggttcatcagtataagaacaatggttataatattctgctggatgtaaacagtggatctgtccatgtggtagatgatctgatctacgatatggttccttattacaaggaaaaaggactggatgagacagttgctcttctgaaagataagtacccggaatctgagatccgggaggcagcagaagatctggacgagctgatcaaagccggaaaactctatacagaggatatttatgaaaattatatccacgatattgtggaggcaaagaagccggtagttaaggcattgtgtctgcacattgcccatgattgtaatctggcctgtcgttactgctttgcagaagagggcgagtatcatggacgtcgtgctcttatgagctatgaggtaggtaagaaggcattggatttcctgatcgccaattccggaagcagacacaatctggaagtggatttcttcggtggcgaaccgttgatgaactggcaggttgtcaaagacctggttgcatacggaagagagcaggagaagcttcataataagagattccgttttactctgacaaccaatggcgttctgctgaacgatgaggtacaggagttcgtaaaccgtgagatggacaacgtggtcttgagtatcgatggacgtaaggaagttcacgaccgtatgagaccgttccgtaacggaaaaggaagctatgatctggttctgccgaagtttgaaaagttggcagagagccggaatcaggaaaaatattatgtgcgcggtacatttaccaagaacaacaaggatttctccaacgacgtgcttcatctggcagatctgggattcaagcagatctctgtggagccggtagtaggatctgatgaggaagattatgcactgcaggcagaggatctgccggagatctttgcagagtatgacaagctggcagccgagatggtgaacagatatcatacagacaaagatttcaatttcttccatttcatgctggatctgacaggcggaccctgtgtggcaaagagactgtccggatgtggttcaggaaccgaatatctggcagtgactccgtggggagacctctatccgtgtcatcagttcgtaggcgaagagaaatatctgatgggaaatgtggatgatggaatcacccgcccggacatcagagaagagttcaaagagtgtaacgtttactccaaggaaaaatgccggaactgttttgccaaattctactgcagcggcggttgtgcggcaaactcttataaattccacggctccatcaatgatgcatatgatgtgagttgtgagctggagcgcaaacgtgtagagtgcgcgatcatgattaaggccgctcaggcggagaaagacgaggaaagagcaaatgaagaaatctagagcagttgttaccctgcttctgacggttgtcctgactggtcttctgctgttcacttcagcagcaggctggggagcagacggactgggttctgcagataagatccatctgggtctggatctggcaggcggtgtgagtatcacctaccaggcagtgggcgatgaagcaccaagtgcagaagatatggcagacacgatctacaagctgcagaagcgtgtggaaaattacagtaccgaggctgaggtttatcaggaaggtgctgaccggatcaatatcgagatcccaggtgtgactgatgcaaatgcaattctggaagagcttggaaaaccaggttctctgcagttccagaccacagatggtgaagtagtactggaaggaactgatgtggccgaggcgcaggcaggttccaccacagacagttatcagaatcgtcagtatgtagtagaactggtgctgacggatgaaggtgcacagaaatttgctgaggcaacttctgcaaatattggaaagcagatcgcaattgtctatgatggcagcgtgatcagtgctccgactgtccagaatgcaattactgatggaagatgtcagatcaccggtaactttacatacgagcaggctgatcagcttgcatccaccatccgtatcggttctttgtccctggaacttcaggagctgcggtccaacgtggtaggtgctaagctgggtagcgaagcaatctccaccagccttgtggcaggtgctatcggattcgctattgtagttgtcctgatgatcattctgtaccgtatcatgggtctggctgcaggtattgcgcttacttcctatataggtattgtactggtacttctgaatatttttgagatgactctgaccctgccgggtattgcaggtatcgttctgtctatcggtatggccgtggatgccaacgttatcatcttctcccgtatccgcgaggagatcgcaaccggtaagactgtgaagtcttccattaagatcggattccagaaagcgctgtctgctattgtggatggtaacgtgacgactctgatcgccgctatcgtgcttggattcaagggatccggaagtgtcaaaggttttgcacagactctggcacttggtattatcgtatccatgttcaccgcactggtcgtgaccagacaggtactgaatgcgctgtatgcactgggactgcaggatgagaagtggtacggtacagtcaaagagagagcaccgatcaacttccttggcaagagaaaagtattctttacagcttcgctggcagtgatcgtggcaggacttatttatatgggaatcaatgccggatccggaaaaggaatcctggcatacagcctggaattccagggaggaactgcaacaactgttgaattcaatgaagatatgtctattgctgacattgatgaaaaagtcgttccggtagtatccgcagtgactggtgataatgatattcagacccagaaggttgcaggaactaatcaggttattatcaagaccaaggagttgagtctggatcagagacaggagctggataacagtctgacagaaacttttgagctgggagatacggcaatcacagcagagagtatcagcggtgccatcagccaggaagtaaagcatgatgcagtcgtatctgtgatcattgcgacgatctgtatgctgatctatatctgggttcgtttcaaggatatccgttttgcaaccagtgcagtagctgctctggtgcatgatgtactggttgttctggtattctatggagctgcaagaatttccgtaggaaatacctttatcgcatgtatgctgacgattgtcggctactccatcaatgcaaccatcgttatcttcgaccgtatccgtgagaatcttacagatatgaagaagaaagatactctggaggatgtggttaatgcaagtatcacacagacccttaccagaagtatctatacttccctgactactttcgttatggtagcagtgctgttcatcctgggtgttgcatccatccgtgaatttgcacttccactgatggttggtatcgtgtgcggtgcctactcttccgtatgcattaccggtgccctgtggtatgtaatgcgtacaaaactgggtgagaaaaaataacggacagagaggaaagccaatggcaaaatgggtagagatcagaaaaggagcagattttcagtcgatcggtgagaagtttggaatcagctccctgactgcccggctgatccgtaataaggatatcacagaagaatcagagatccgacagtacctgtatgggggactgtcggatctctgttctgcttctgtgatgaaagggatcattccggcagttgagattttacagaaaaaaataaaggaaagggcctccattcggatcatcggagactatgacattgatggggtatgttccacttacattcttctcaggggactgacaagagccggggcagaagtagatacagatattccggaccggaagaaggatggctatgggcttaatgaagatctggtaaagagggcatatgatgcaggtgtagatactatcgtgacctgtgacaacggaattgcagcagtgaaagagatcgcctatgccaaaagtctgggaatgacagtgatcattacggatcaccatgaactgcaggaagagattccgccagcagatgtggtagtcaatccccaccagaagaattgtccgtatccatataaaaatctatgtggagcaggtgtggcatggaagttggtcagtgctctgtgggagcagcttggagtgccagagcaggagctttatgaggatctgctgctgtttgcaggatttgccacagtgggagacgtgatggatctgaccggagaaaatcgaatcctggtgaaagaagcactgaagcttctgaagaccaccactcatccgggaatctcggcattgatagaagtcaacgagatctccagagagactatttcagcatttcatattggatttgtcttaggaccatgtatcaatgcaagcggacggctggatacggcaaagcgggcgctggagcttttaaagactacagattatgaaaaagcacttgtaaaagccgcagagttaaaagcactcaatgatgaacgaaaatccatgacggatgacggtgtgcagcaggctcttgaccagatcgaaaacagtgacatgaaaaaggatcgggtactggtaatctatctacccgactgtcatgagagtcttgcgggaattatcgctggacggatcagggaacgctattaccggccagtgtttgtgctgaccagatcgcaggatggagtaaaaggatccgggcgttctattgagacctactctatgtttgaagagatgagcaagtgtaaggagctctatacgaaatacggtggacatcctatggcggctggtgtgtctatgccggaggaacatgtggaaaagttcagggaaaggctcaatgaactgtgtacactgacggaaaaggatctgaccgaagtggttcggatcgacattgccatgccattttcctatgtatcagagcggctggtggaggaattatcgctgctggaaccttttggaaaaggaaatagtaagccggtatttgcagtgaaaggagtgcaggtgttagaaacccgtgttcttggcaagaatcagaatgtactaaggctgaagctgaaggatgaaagtgggaccacgatggatggaatctatttcagtgatcagatgaatgaagtgttaaagaccatgcagcaaaagccccgactggcatttttgtattatccggagatcaatgaattccgggggcagaggacattacagctgaggattctggactattgctgattgcatgaatttgtgctatatttattctgttatggtgttgtctgacacctgtttatagaggaaaagattatgccgaaggcatagcgatagagaaggagaagatagatgaaaaagttagaggattatgtagtaagtattccggattatccggaaccaggaatcattttcagagatgtgaccagcattctgcaggatgcagagggattgcagctggctattgatagtctgcagaagaagctggaaggtcttgattttgatgtgatcgcaggaacggagtccagaggattcatcttcggaatgccgatcgcatacaaccttcataaaccgtttgtactggtccgcaaaaaaggaaaacttccaagagagaccgtatctgtgagctatgacctggagtatggcagtgcagagatcgagatgcacaaggattccatcaaacctgggcagaaggtggtactgatcgacgatctgatcgcaaccggtggtaccattgaggcagcagcaaagctggtggagcagctgggcggtgaagtggttaaaatcatatttttgatggagctggcaggacttcatggtcgtgagaagctgagtaaatatgatgtagagagtgtaattcgttacgaaggcaaataaaagcagctgatgcaggacaaaagaatgtactgtatcgggaaaaaatagatagacagagaagtggtgattgatatgacggaagaacaggcaagagaagtgcaggaggatgacagaagtatcgttaagatggaagattttaccagccctgatgaattatatcaggaactggtgcagcgcgtgaccaaatatcatccatctgcggacatctccatgatcgaaaaagcataccaggtggcaaagaaggcccatgacggacaagtgcgtaaatccggtgagccgtatatcattcacccgctctgtgtagcaattattctggcagatctggagcttgataaggaaagtattgcagcgggtcttcttcatgatgtggtagaggatacaccgatgactacagaagacctggcaaaggaatttggcgatgaggtggcactgctggtagatggagtcaccaagctgggtcagctgagctattctgccgataaagtggatgaacaggcagagaacttaagaaaaatgttccttgcaatggcaaaagatatccgcgttatcctcatcaagttggcggaccggcttcacaatatgcgtacgctgaaatacatgaagccggaaaagcagaaggaaaaagcacgagagaccatggacatctatgcgcccattgcacagcgtcttggtatttcgaaagtaaagatcgagctggatgatctggcgctgaaatatctggagccggatgtctattatgatctggtatcccagatcgcagagaagaagagtacccgtgagaaatatgtacagtccatcgtggcggaagtcaaacagcacatggacaatgccaagatcgaggcagatgtacagggaagagtgaaacatttcttcagcatttataaaaagatggtcaaccaggataagacactggatcagatctatgatctgtttgctgtacgtattctggtggaatctgtcaaagactgttatgcggcactgggtgtgatccatgagatgtataagcctattccgggacgtttcaaagattatattgccatgccaaaagccaatatgtaccagtctttgcatactacgctgattggtccgaagggacagccttttgagatccagatccgtacttatgagatgcaccgtactgcagagtatggtatcgctgctcactggaaatacaaggagagcggcggaagcaatgagcagaacgttgaaggcaagaacagcgcggaggcaaagcttacctggctccgtcagatcctggagtggcagcgtgacatgtccgataaccgggaattcatgagtctcttaaagagtgatctggatctgttctccgagagtgtatactgctttacaccaggtggcgatgtgaagacactgcccaatggctccaataccattgactttgcatatagtatccacagtgcggtcggcaacaagatgattggtgccagagtcaacggaaagctggtgcctatcgagacggtgatcaagaatggtgaccggatcgagattattacatcccagaactccaaaggacccagccgtgactggctcaacaccgttaagagtacgcaggcaaaaaataagatcaaccagtggttcaagacagagttcaaggaaagcaatattacaaaaggaaaagaactgatcgcccagtattgtaagatgaagggcattcctgccgctcaggtggtaaagccggagtatcaggaaagtgttcttagaaaatatggattccgcgactgggaatctgtactggcagccatcggacatggcggactgaaagaaggtcaggtcgtcaacaagatggtggaagagtatgagaaggcaaagaagaaagaagtgaccgatgccaagatcatggagagcatgaaggaggcaaaggagcagaagcttcatgtgaccaaatccaagagcggcattattgtaaaaggtatcgatgatgtggcagtgcggttttcaaagtgttgtaatccggttccgggtgatgagatcgtgggctttgtgaccaggggaagaggtgtaacgattcaccggaccgactgcgtcaatatgctccatctggcggaatcagagagagaacggctgattgatgcagaatggcagggaggcgcacagaccagaagcagtgagaaatattcgacggagatcaagatctacggcaacaaccgtaccggccttctggtggatatttccaagactctcactgagagaaatattgacgtcacatctatgaatgtgcgtaccagcaaacaaggaaccgctaccatcactatcagctttgatatttccagcgtggaagagctgaacaagatcattgagaagctcagacagattgagagtgttctggatattgagaggtctgccagctaagggagaagataatgaacagtaaagttacacatatcaatgtgggaaatctggcagagaactgctggtttctggcaaatgaagatacaaaagaggctgttgtgatcgatccgggagcagaaccggatcggatctgtgcgacagctgagaagcatggatggaagatcactgcgatcctgctgacccatggacatatcgaccatatgggagcatgcgaatcccttcgcacagagttgggggtgaaggtatacgcactgacagaggaagaagaccttcttctggatgcaaagaagaatctgtctgtctttattgaacgcaaagttgtgacttttgagccggatgaactgctgcgtgacggacaggaactgacactggcaggcatgaagattcaggttatccatacaccgggacatacgccgggaggatgctcttactacgtggcagaggcaggctgcgtgttctcgggagataccctgttcgcagagtctgtgggcagaagcgattttccaggtggaagtacatctgcattagttcgtgcggtaaaagaaaaactctttttattgccagatgatacgctcgtctgtccaggacatggcgaagagaccacgatcggtcatgagaagaagtataattcatttgtgtaggaagaaaagaaaggctttttatgatagaagtaattgtaaaccggccgagtttcgaatatgatatccattcccttgtgaaatcttttttcccaagagaagatgtgcagatccatgtacaggatacatttaccgaagatacggctcttcgtatttctgtagagtttacagatgagactgtgtccatctgcctgatggagcagggcgaagaaaaagaatccggtgcgtccgtcatcaattatgcagaacggaaagagacgaaaaaccggctgaaacgccaattataccagttgctgtgtgcatacacgggacagactcttccatgggggaccctgacgggaatccgcccggcgaagatcgccatgggactgatcgagcagggcatgagcaatgtagagaccgcagaatatatgcggaatacctacctggcaagcaaggaaaaggtggcactgagcgtcatgatcgccaaccgggaacggtatgtgcttcgaaatattgactacaaagatggctacagcctctatgtggggattccgttctgtccaagcatctgcctttattgctccttctcatcctatccgttggagagatggaggaaacaggtggatcaatatctggatgctttatgtaaggaactggattatgtggcagaccggttccgggataaaaagcttaatacagtctatatcggcggtggtacaccgaccacattggagccttatcagctggaccgtctgctgaccaggatccagagtaagtttgatacggagcatctgcaggaatttaccgtggaagcgggcagaccggacagcatcaccagagagaagcttcaggtgctgctggatcacggcattgacaggatctccatcaatccccagaccatgaaccagaagacactggagatcatcggcagacgtcacaccgtagatcaggtaaaagaagcatttacgctggcccgcagcatgggatttgctcatatcaatatggatctgatcgtgggacttccgggagaatcctatgatgatgtggagcatactatgaaagagctggaagccatggcacctgacagtgtgacggtccactctctggcaatcaagcgtgccgcaagactcagtcttttcaaagataaatacgaggagatgggtctggaaaataatatgcagatcatggatatgactgccagatactgtgcagagatgggattgtcgccatattatctctatcgccagaaaaatatggccggtaactttgaaaacgtaggttacgcacagccggagaaggctggtatctacaatatcctcatcatggaagagaaacagaccatcgtggcgtgcggagccggggcttccaccaaacgtgtctggaatgaacagaacccggatggttcttatcgaatcgaacggtgcgagaatatcaaagatgtggcattgtatatagagaagatcgatgagatgatccagagaaaagaagaactgtttgcagaagaataaaattctatagaatcatgaaagaacgaatccatttgaaaaagatgggttcgtttttttgtaaaaaaattgctccaactgttttagtgacagttggagcagtgggcattatttattctgtgattcctgaagtaaatgttccagttcggcgatacgggcttgaagctgcttattttcagcttcagatttagaaagagaatgttcaaaaatttgtttttcggacttcagtttctcattttcagcctgcatccgttctacttgatatttaagggtattttcatccatctgcaataaagcttctgaccacatatcgaacacctcctcgggtctgcggcgcagtgcggcaatttcctgaaatatgggggacatccaagggtaatcctggatcagacgctctgcatcttccagcttttcagtggagagaagcagcaaccatgctgattgcgagcatttcttaatttcagaataagggatttcgcgaaaaacgtcaagagcaatgatgcagaagcgttctggcatatgtagatcgagaccggtattaaaagtggttttcccatgatggatgtaatcatgagattgaagcctaagttccgaagtggtatgttcaaaaatgacgatcacatagactggtttgatatcccgataggaaaaatcgtgtgcagaatgatcgggcatcttttttgctttgatgtattgacggagaagcaagtcagatgcatagcaggacattcgttgtccggggaaatcatatccttgcttctgaatctctacattgacgataaatccagcatgttcctttcttgtgtaaatatgaaattgtgttccattatcgggaatcgtgctcgaaataagcagggaaatgagaatggaaatgtttagttgctgaaatgaatgtagcatagagcgatggttaatgcaacagattttacgattaatagatgattctgatgtgaaaatattttacaaggacagatgatgtccctgttgcctgttataatggccacaaaaggattaattattgatatacgaatggggaaaaatgggatgaaaaaagaggttttgtataagatctggaacagtatctgggacgacagtataaacgcagaataccgatgctttcaggaacaatattggcaccgattcagcgttttggtccggacataaacatgaaaagtcttgaagccttactaaaaaggagaggagagagcctttcagagtgccttctgcggatgatcgataagagcggaagaacagatgcagatgtttataatgcggctcatattgaccggagagtgttttcaaaaatcagatcatcaaaagactatcagccgaagaaagaaacggcaatggcattttgtattggtttgcagcttaatatggatgatgcaaagcaattgcttgggagtgcaggatacgcttttaccaatggctccagacaggatctgatcgttcagttttttattgaacataaaaattatgatatgaatgaactgaatgcagcacttgatcattttggggaaaagatgctgaccatataaaaccgtattaagtatgttgagtgaatatctgaaatagaagtccggaagattagttgcagaactggtttttcggattttgttgttatttctgcattctaaatatgacgttttcataaagaatctaaacaatccgtaaacactaatgacacataaaattttctgtgatatgatagtagcatcaattcgagtcatgacatttcgtcatagatttcccaatgataacgataaaaaagagcatatagtatagcattttcatgcataaatgtgtgaaatatggttgcggatacggctctaaatgggtaaaatggaaggagaagacaaatgaaaactttgcaggaattaacgttgttcgacagattcttatttaatgagacgatggagatcccggaggcacatgaagcagtattacggatcattcttggagatgaaaaattaaagcttttatctcaggtacagacagaaaaagagatgcagacagcaccgtggcttcgatctatccgtctggacacgttttcaatggatcaggacaagacgatctacaatacggaatctcagaagcgtcgcaatacagatctgattaagagaagccgtttttaccagggagtgatagattcctcactgttagctccggggacgcgcagttttaatcttttgaatgacacctgcattattatgatcactccatttgatctgtttggaaaaggaagatattgctatacttttcatccatattgtgaggaagaaccagatttaagactggaagatggagcagtccgcattttcctgaacagtcatggaacgaatcgcaatgaagtatcagaagagctggttgcattgttggaatatatggagaccatggatgccgataaaataggcgacgacagtgagaacctgaagaaacttcatgaatatgtcgaacagatcaaggcgagtgaagaaatcggggtgaagtatatgcaaaaatgggaagaactggaatacgaacgcgaagatgcacgcgaagaaggccgtgaagaaggtcagataaccggaagaaaaatagaagaaatctctgttttgcgccggttactgaagaaaaagaacagaggcgaggagacagttgcggatgacttggatctgtccctggaatatgtccataaaataaatgagttgcttagtgcatatccaatggaaagtgatgaagagattgtaaaaaggattgttgactaattttatgcagatatttgtagatgcagatgcctgcccggtggtgggcatcgtagaagagcttgcaaaaaaatataagcttccggtgaccttgttatgtgacaccaaccatgtgctcaccgccgattacagcgaagttattgtggtgggagcaggtgcagatgcggtggattataagctgatcagcatgtgtcacaaaggagatatggtggtctcgcaggactacggagtggcagccatggcacttgggaagggtgcctatgcgatccatcagtctggaaaatggtacaccaacgaaaatattgatcagatgctcatggaacgccacctgaacaaaaaagccagaagagcctcacagaaaaatcacctgaagggtccgaagaaaagaactgcagaagacgatgaacacttcagggaatcctttgagaaaatgattttgaaagtaatagcttcttcttagtagatatgcttttttacagcacaaatcttgacacgccgaaccgcaaactttataatatctaatgtatgcctatatcgcagacaaatgcttgtctgcatgattatagaggagactaaggaacaagaaaggaatcaacaccatgcctttgaagaagaaaccagtgactggtatgaaagacatcctgcctgcagagatgcagatcagagattacgtgaccggtctgatcaaagagacatataaaagctttggattttcgcctattgagactccgtgtgtagaacatatcgagaacctgtgcagcaagcagggcggagacaatgagaagctgatcttcaagatcatgaagagaggcgagaagctgaatctggagactgcacagagcgaagcagatctgacagacagtggtctgcgctatgacctgactctgccgctgtccagattttattccaataatgcaaataatctgccgactccgttcaaagcactgcagatcggaagcgtatggagagcagacagaccacagagaggtcgtttccgtcagttcgtacagtgtgatattgatattttaggagaggcaagctgcctggcagagatcgagctgatcctggcaacgactacattgcttggaaaactgaatttcaagggattcaaggttcgcatcaatgagcgccggatcttaaaggcaatggctgagtactgcggattcccggaggatcagtttgatctggtattcatcattttggacaagatggataagattggatgggacggtgtgaaagcagaactgatcgaagctggattttccgctgacagcgtagcaaaatatgtagatatgtttggcgagatggaagcaagcgaagatccgcttggatatctggaggacaagctgaccggtgtactggcagcagatgtgatcgggaacctgcgtaccatccgccagagtgtggaagcaaccaaggcagcagattttgaactggtatttgacccgacgctggttcgtggaatgtcctattatacaggaaccatcttcgagatcgagatgccggagttcggaagctctgtggcaggcggtggccgctatgacaagatgatcggtaaatttaccggaaatgatacgccggcctgtggattttccatcggatttgagagaatcgttacgatccttctggagaacaatttccaggtgccgggtgcagcaggtaagaaagcattcctgatcgagaaaaatatgccggctgacaagctgtgtgaggtgctcaaagaggcaagagcagagcgcgagaacggtgcaacagtacaggtggcactgatgaacaaaaataaaaaattccagaaagagcagctttccaaagaaggctataccgagttcaaagaattttttaacagataagagaggtatataacatgcagggaagaacccataactgcggcgaacttcgtctttccaatgcaggtgagcaggtccgtctggtaggatggtatgaaaacatccgtaaagtcagcaaaaatttaggattcctgatcttaagagatttctacggaactacacagatcgttgtggagaccgaggagatcatggagcagctgtcagagcttaactatgagtccacgattcaggtagatggtgtggttcgcgagagaagcagtaagaacaacaagattccgactggtgatatcgaggtcgttccgagcaaggtagaagtgcttggaaagtgccgttataatgaactgccgttccagatcaaccattctaaagatgcagacgagaacatccgtctgaaatatcgttatctggatcttcgtaatccggaagtaaagagcaagatcgtgctgagaagtaagatcgtggctgatcttcgtcagagcatgactgctcatgatttcatggagatcactaccccgatcctgacctgttcttcaccggagggagcaagagattatctggtaccgtccagaaatcatcctggaaaattttatgcacttccacaggcaccgcagcagttcaaacagcttctgatggcttctggatttgaccgttatttccagatcgctccgtgtttccgtgatgaggatgccagagctgaccgttctccgggagagttctaccagctggatatggagatggctttcgcaagccaggaggatgtatttgcagtgctggaagatgtgcttccgccgatcttctcaaaatacggcatttacaatgaggcttccaagccgccatttaagagaattccatatcttgaggctatggataaatatggttccgataagccggatctgcgtatcaacctgttagtacaggatgcaaccgatgtactggctgactgtggcttcggaccgtttgaaggaaagaaagtaaaagcaatcgtggcaccggcatttaccggcaccagaaaagtgattgataaactgtgtgctgatgtagaagtgcagagcggacagaaagcatactggttccgtctggatgacaagatggagctggttggaggcatctccaagttcctgcaggataagaaagatgcagtagtggcagctcttggactgaaggctggagatttcgttggactgactgcaggcgacttgaagactgctcagaagactgcaggcgtgctcagaaagatgctgggtgcttcctctgatgcttacatgaagaaggactgctacgaattctgctggatcgtagacttcccgatgtatgagatcggtgaggagtctggcgagctggagttctgccataacccgttctccatgccgcagggcggactcagtgctcttgagaatcaggatccgctggagatccttgcatatcagtacgatctggtatgtaatggtgtggaactgtcttcaggtgctgttcgtaaccatgatccggagatcatggtcaaagcattcaatatcgttggtcttggtgaggatgatgtgaaagcaaaattcccggcaatgtacaatgcattctgctacggagcaccgccacatgctggtatcgctcctggcgtagaccgtatggttatgctgatcgcaggtgaggagagcatccgtgagatcattccgttcccgatgaacaagaacgcacaggatgtgatgatgggagcaccggctgaggttgaagaaaaacagcttcgcgatgttcatattcagatcatcaaggaagacctgaaaaaagaagagaaaagtgcagaataaataaatgcatatgggatcccgcgggggctggtaaacagacaggactcgcgggatttttttgacaaaatattttctggcgtggacgacagaagatgttgtcatctcttgtaggatttcgtataataaaaccagcagagtccgggaggataaaaatatgatcatatgtagagaatgcggtgcacggatagaagaactggcagaacgctgtccttattgcggtgccatcaatgagctgggtgcagaacataaatacatgcaggatatgtacagcctgaaggatgatctgaaagacgtgggaaatatcccaggagaagaaatcaaagcggaagtaaagtcgaatgtccattttacaggaaaggcagtcgcagtactgctggcactggttctgatccttgcagcggtgtttctgtttttgcggtattcaggggatattatttattccgtgtacaataaaatgaccgatactcgtatggcagatacccgggaacagatgcagtgggaaagggagaatttccccaagctggatgcctggtatgaggaaggtgactacgactcgatccttgcgttctgcaatgaaattgatgcggcaacaggcggtatttcttacagttatactaactgggagcactggaatattcttcctttttatgacacttatcaggagtgcatggagctgaagaagtacatccagcagggggaggagacctatctctatgagtatcaggcagcactctatgatgcgttgaccatgaattatgataaggaatggttccatcaggtggatgacaaggatgaaagtctggtggatggctggatcgaagagactatgaggtttgtcaaagacacctatcagatgggcgattcagagatcaaggatctggaacatcaggcagaaaaggatcattttctggattacaaagtgatctataaatatgtggaagaacacaaagaccgggttccggttacagattaaacgaacagggggaaacaaaaagtgaaatgtgatttttgcggggcaaatctgacgatcgatgatgaagtatgcccatactgccatactcccaatacccattatgtgaagcatcgggaagacatgcaccgctacgagcaggactatcagagtacgaagacagaagtgtatgagacggcgggaaagaccagtaaaaaagcgacgcagatcgcagtactggctgtgctgggactgctgtttctgggaagcattgtgatgaacaacagtatctggacgattgaacgggcattgttggttcagaaagcgcagaaaaatttgtcgattcatgtagaaaatctggacaaatatattgcaaatgaagactggaaatcatatgccgcgtacatagatgtgaatgaactttactattcgggcatcaatggatttgacgattaccggtatttccagaggatggtgacagattataattatatttatgacgcctgcatgcatctggtggatcatgaaaatattgacaatgaatatatgtactacacgccggaccgttgtatggaagagattgcggacaacctgaaggatatgtatgactttgtgaaggcagacgagtattccacatactatgaggtttaccagaatcacagtgactggtgtgacacggtgctgacacaggcagaagagctggtacaggcatatgcaggtgtggatccacaggtgattgaaagtggtgagatccgtaccatgtcaaagaccagactgatcgtattattggaagggagctatcggcagaatgaatcgtaaaatatatcgggcagttgtaatcgtgctggtcgttctgaccatcggacagatcataagatttggatttcagctctacggagatcagtaccattatcactatgatgaagacacttttctctattctattcaagatggacaatattctgaactgccggagaaaaagaaccgcaatgagatggagcatgtgaaagcagatgcgcagatgctggaatgttatgcagtggctgattactatgaggcagcatctctgtattatgcttatgaaaatatcggaaatgcagcaaaagcggcaattgcaaaggcagatatggaagaagcgaaaggccgcatgggagacttaagctactgtgcagaagaaatcgatggatattttgtgaaatattttgcttctgcagactctcaaagtcagtctacagacgttgaggggcagtctacagaagctgaataacgataaaaattaagccgtcagtttgtggatccaacgataacttcggaaccgaaggaagattggaagccctttgaaaatctggtcacattgtactgctacgactaccagttccaccggccatttccagacgaaagcagccaggaaggacagcggcataacaatgagccaggtggagatcagattcaggcggagagtaaatttcgtatcgccggaactctgaatgatgcccatagagactggcatctggtaagacatgcccaccatgataacactcatgatgatcataaagtgatcagccaggatcatggcttcgttgctgagccggtacatggacagcagtggggtgcggcacacaaacaaaatagctgcgagaatcaatccaatcagaatatcaatgacagacagggtgcgggcatcagaccgcacccttttcaggtctctggctccgatactgttgccaatcataactgcagaggcagaagacagcgcaatcactaccactttcagatactgatagaaagtagaagatacggagttagctgcaattgcatcagaggacagatgtcctagaatcgcagtctgcatggggacggagaccgcccacaacaaggatgtgatcataatcggaatgccgactttcaaaaaggatcgcacttgttcgctgcttccggagaacagagagctggagaacaggcggatctttgtgtccatttttgccacatagaacagcaggatcagaagttctgcgatacgggaaatcagtgttccgattgcagcacccttgatacccatttccggaaatccaaagtgaccgaagatcaatgtatagttgatgcagccgttgacgatcagggacactacggacacgataaacgagatccgcactgttcccacacttcgcagcatggcgatgagcagattgctgaaaataaaaagcacgaaggtccatttcaggatagagagatagatcagtccttctgcaatgatctcatcggaagtggtaaaaattctcaatagctgcacaggaaagacagtgcacaccaccataaccaacacagagaccagcagacagaacttcagagcaattccagtcagctcccggatcggttgtgtctgcttctggccccagtactgagaagcaagagctaccagtgcatttccaatgggaagggcagtctgctgtaccatgaagaagacctggttcacagtggctgctccagacagagcattctgactgtaacttcccagcataatattgtccagcatgttcacactgtaggcaatcagattctgaagggtgatggtcaggatcagaccaaataacgtcttataaaagagagtatctttcgtgaaaaaagactctctggtggataattctgtgttcatagattctattctcctcg

SEQ ID NO: 2403 - DNA, 8659 bp, Unknown
  16S sequences of unknown bacteria
ggaaaacggaacaagaggccaaaagaaaacgcagagagtggaaaaagaatgtcaattcttctgctgttttgggaaatgacagaattaccgttggtcaaccgatgaaaaggtatcagaaaattttggtgaggcgaaacagggccgggcgcaaggcaaaacggggccgggcgcaaggcaaaacggggccgggcgcaaggcaaagcagggccgggcgcaaggcaaagcagggccgggcgcaaggcaaaacagggccagatgcagacaccgggattacaggcaaagatccccttcgacggaaaacggccaaaaatgccgctgaaagcctttttccttatttgatggtactttcctgtattgctcaatacagagcttaaaacggggattttgaccggtttacggagaagcagagggtattatgacatacccttatcaaaagtgacaacagaaaagcgccctgccggcattgacagggcgcttttctgttgaacagaggggatcatgaagttaagaaacgtagcaggtttcggtatgggtttcgccgtctgcggtaaaggtaaacacaaccttgtcgtttaccttcaggttgtaatcttcaactaacattagaaaatcacgatttgtcgcagtttctgtgaattttaccgatctcatataatcgtccgccgcgctgctgtatttataaacctgtgcggtaatttttaaacttgccggccgctgagtgcctaaagtcccttgaatacgtgtggttgttgcgcttgcggaaacatcgtcaatcacagagaagcgcatggttgccgcaaaagcgaccaaggtcaaagagcagagcatgagcaccgcgagaaggacagagactacttttttcatttttttaccaccttttataaaattttgacatcgtacgacatatgaatcgagataaaaaatattacacgtaccgtcaaacaaccatttctaagctttcagcgattcggatgatttcttttttagaaaggtcattgccttttattttgtaatagttgttattgtcaaaaaaatgcaacgtatggataccatcttttactttataaaaaccagcatattcatttacagtgacctcttccagagcagtatcttcagaatccaaagcaaatttactattatatccatttatagggtactgaataatagaaatgtagcttttttcattcttcagagttaatatcagataccgtgaaaaaagttccatatctgttattgcgtacccctccggtacatacttcgggaaatacacctgcatatccatgctgctcgtcttgtcttccatcagttcctcccgaacctgctcggttaactgaatgccggtatgcgtttgatgggtctgaaacaacaaatcaaaaatctcaccgttgttcgcctgtgccacaaataacgcgcagatgataaccgataacgaaacggcaacctgcggaatccctttccgggtaaaaaattttttcgcactgccgattcttgcctgccgccgggattgacgaagcagcttatccatgtcttttttgaaatgttccgacggctgataatcgtccggaacagccttgcgcgcagcggctaatacctggtccggatcaaacgcttcttgcggtatgttatgatgcatgaattgttcaaaaagctctttttcatccatctcttagtcctcctgttccagcagtttgcgaagtcttacacgaaaccggaaaattttaaccgaaatgttggtttccgtcaagccgtatttctttgacagttccttgtagtgatagcccagaacaacggcgtctataaacaggttacgatttctctcggataatccttctaaaaagatcattaattttttcttaatttcgttcacgctgaaagtgtcccagaccatgtccagcggatcgctttgaatcgcttcatactctgtaaggtcctcggcgggaacaaatttcagcagatagtcgtaacaggtattgcgaacggtgatgaccagataacgtttggtacgggccgaagcgggctcttcgatgtcttcgatccgtttcaaaatttttacgtatgcgtcgtggacgagttcctcggctgcagagtgggatttcacgatggaaattgcatagcggagcaggtcttgataatatagctcgtacagctgaatgaatttctcatggttatccaggcaattcgttgtcatatgatgtcgtccttcgctgtcgatttttatagctctattataccaaatgatagaaaaataggaaagttcaatatattgtgtaatttttttttgaatttggttggcgttttacaccgcaatcatgctataatcatttcaacaactcaggataattggggggatatgcaaatgaaatatcaaaagctgggaaaaaccgacctagaggcttccgtagtatcttttggcggatggggcattggcgggggatcggtatggtctgacaaatccgtaaacgtggcagatcttgaaaagctgttggatctggccgctgagcttggaatcaattatattgatacagcgccggtatacggcacaggcgccagcgagcagctgctggggaaggcgctgaaaaaagggcgccgctccaaattccttttgcagacaaagtgttctcttaactggcgcaacgacggcggaaatttccactatgaaagggacggctatacggtcaataacgataccagcgcccgcgccatccgaaaggatgtggaggattctttaattcgtatgcagacggattatattgatgtgctggtggttcactatgtatgcaaaagctggccggtggaggaaaccatgggcgccctgcaggaactgatccgggaaggaaaaatccgtgcggtcggcatttccaactccaagccgcaggatctggaggagtatgaaaaatacggaacagtggcgctggtgcaggagcagttcagcctgctggctccttatcacggcgtggattatttcccgatggccaatcagcaccagacaacctttcaggtatacggcgcgctggaagaaggatttttgacggacccgtgctatgtggaccgcactttccccaaaggggatgtccgcggaaagctcccctggattcatgagccaatcaaaggttctattcataagctttttgatgttatgaaaccgcttacggaaaaatatcattgttcctattcgaatcttgtgcaggcgtggacgctgctgcaaaatcccggaatcaatcttttgacaggctttacccgcccggaaaccatgataaacacctgtgaatccctgcgtgtttgtttgtcgccagaggatgcggccctcatggaagaggctgcaaagccggcgcaggtaagggaactggataaataatgaaagcgcctttgggcgttttggaacttttactgatctgttcattttttgttaggatttcctgaggtttcaccaaaaaaggccccttattggtttcgttagatatgttagcattaccccactgtgacgatataggatggtggaggtagaaacatatgaaaatgaatgaaacattggcatgcaagctctcaatcatgagaaaattgtacggaaaatctttggtggaatttgccgaggagattgatgtcagtaagaccacgctgcagaatattgaagccgggaaagcgaatttgactttgaatatggtggaaaccatttcaaatcgcttggggatttctccgatggctttgatttcggatgaatatgacgccagacacttatacacggcaaagttgtttttggaatttctcaagtccttccgaaatctttcgatggaagatcagacagaagccattattctctttgaccgcttggttcggattctctccaggagaaaggtgggcgaatagccttttttaaaatggaacagacagcattaggaaaaccgtcctgatagaaatatgggacggttttctttatcccaaatgagctttgctgtagcggtagtatggtaataaaaatcgagtaccaaagtagatcctttgcgtaggccgtaggaggatgtcaatttttgtgattgtctatatttttacggctgacgatgttttttagtgatatattcgattgcccagaaatagaaaagtttcaagtgccatgtagtttttcatagaaacattggttttctttatcataaggttatgttttggttttatcactctaaaaaccaggatgggaaaattccaatctgcttgcggtttgcaaaaagcaagatgaaatgattttctcaaaaaatataaaaaaccacaatacttatactgaaaagaggagattctattacaatttttaaagagtgattttttatttcagaaggtctaacggtgaaacgcccaaggctttggcaaccaactccacggtgttcaagctgggatttgctctgaaacgctcaatcgctctgatttctgtcaggcttatcccggataaattggccagctgctcttgcgtcatccactctgcctttctgtattttttcacatttattccaagcctctcattcagcatagtgtcctcctcatatctagtgtatgggagaagagcatatcttttcaacatcattatagtgacgaaaataatatattgtattcggtagtaaaaaacaagcagattttaaacggagagaacgccaaaagcgggagtttagcctccataatcaggtgaatcggaaagagtcagtttgtccttttttccttaatctttacttgttttattgatcctcactatgatgggggagaaagtcaaaccctatatgccgattgtacactttggaaagccctttttgtagtggagattcattcgccatgtggccgcaaagagagctaaaaggggctgttgcttaagggatcagcaggtaaaaggcattttgacggaattacgaataaagtagattttaatgaaaggaaattttttgccgcgatatatctgtcctgcagaatcgatcgaaaaaagaggccgatgttttcacaaaaaaggggcagattttttctgccccttttgtcattccatgaaaaatgtaaatagccccgtaccttgtacggagaatcaatacaatttattatttgagaagttcaattggtgaaatttctaaagcatcggcgagtaaatcaacagtatcaaggcttgcgtttgttctttggcgttcgatatttctgatttctgtcaggctgacacctgatttgtcggataattgtttttgtgtcatccagacgctttttctgtgattttttaattttgcagaaagattttgatttagcatagtaacctccttgacatcattagcgtatgggggattgctatataaattcaacgtcattataatgatgatttatagagatatagacaaatcagtgtttccaaaaattttgtgatttgtgccgcatgatcaaattttcccaaaaataaaacaccctttcaagggtgttttatttactgtatagtgggttgcttttttctgcgccaggtagagggactgaaaagaatcaaaagagggaaaaattccaatcttcctaaaagcatatcgagtgaaagcaccaatttgcttagattagagaaaccaccaaaattcccagtggggccgaccagttccaaaccagggccaatattattcagacaggaaacgaccgctgtaaaattagtaatcatgccaaaattatcaagagaaatcaccaaaaaggaaattgcggcagtaaaaaagtaaacagtcataaagacgtttacgccgcgaatcacacgagtatccagcgtttttcggctcatgcggatgacccgaaccgccttaggatgcagcatacggctgatttctttcgccgccgatttaaagcagatcagcagtcgggaaactttcataccgccaccggtagaaccagccgaagcgccaataaacattaaaataatcaggattgttcgggagaattccggccaggcattaaagtcagcagaggcataaccggtagtagtcatgatggaagatacctgaaaagcggcgtgatgaaaggcctgactccaagattgatactgggaataaatgttgaaggcaatcagtacaacagagctgaccataattcccagatagcagcgcagttcttcgtcatgcagaacctgggaaaaatcgcgcatgaaaagcaaaaagaatatagaaaaattaacgccaaacagcgccataaagatagtaacaacattttgcagataagcgctgggatatgcagccatactggcatttttgattgagaatcctccggtgccggcggtaccgaacatcgtgcataggctatcaaacagcggcatgccgccgcataaaagcagaataacttctattatgctcaaagcgatatagatgacatacaaagtcaaagcgccctggcgcaatttcggggtgattttaccgacatccggccccggactttccgcccgcagcagatgcagagaatggccttctcctccgccaaaagaagtaatggccaataaaaataccagcactcccatgccgcccagccagtgggtaaaactacgccaatacaaaagccccatagggagtatttcaacatcggacaatatgctggctcctgttgtggtaaagccggaaacgacctcaaaaaaagcatccacagggttggtaatagcgccgctgaggtaaaaagggagtgctccgaacagcgaaataaccagccaagacaatgcagtgacaacaaagccttccgcaacataaaaagctcttacctttggcttggtgctgcacagcagaaagccgactactgccagaatgatcatggtcatgacaaaagcttttaccgcttctgtttcctgatggtacaatgaaatggcagtgggtggggcaagcgtaatcaattctatcagcaagatttttccaagcagagtggaaatcatacgtaaattcatgataggtcaaaaatccttttccaatttatccgattgatcaaagaaaaatatcatttaattcatagaagcggccgctctctgttgttacaatcagcacccgatcccctaactggatacagtcactgccggtggggaagattgttcgatcatcccgtcggatggaagcgatcagcaaattcggacgcatgggaactttggaaaaaggtacgcccagaaagtgggtatcctttccagccagaaattcaatggcctcaacctgattgccgattagtcgatacagcgtgagcatggagccttctccgctgttgccgactgcccgcacataacgcagcacatcattacagatcagatttttgggactgataaaggattcttccgtgaagcttttgaagacgttcatatattcaatgcgatctattttagcaatgactttgggaactccaagctttttggcatacatcgagattaccaagttgacttcatcaatatttaaaagcgaaatcacagcgtcggccttaccgcatacttcctcgttcagcaatttttgctggcaaccatccccgttgataatcagtgctttgggcagcaattctgaaagttgcaggcagcgttcataatcaatttcaatgattttaaccttaacacctgattgaatcagcatattcgccaaataatagcccaatcggcttcctccgacaatgacaacatcccgcattttaggaagaggaatgcccaaataatggatcaacttagtcaggtcccttgtttcagcagtaacatgaatcttatccccttcctcgattttaaagttaccggaaggaatgtaaacctgttctccccgttccacagcacagaccaggactttgacttttgcattttcatgcagctcgtgcaaatactttccaatgattgtacagcctttttcgacctttaattctacaatttctactcggcccttggcaaaacggtcacggtttaaaaaagaaggaaactgtaaaatctgaaacatttcccgcgcggcagtcgcttccgggttaatgaccatgcttagtcccagttcgtctttcaagaataccagctgccctgcatattctggattgcgcacccgcgcgatcgtatgggtacatccgagtttttttgcggtcaaacagcatagcaggttgatttcatcggcagaagtagcagcgataaccagatctgcatcctgcgcgccagcttcgagcaagacctgacggctggcaccgtttcctggaaccaccattacatcaaatgtttcctgtgagttttgcaataccgtagggtttttgtcgatgacgacgatatcgtgttcttctttggagagctgctcggttagggttagtcctactttaccgtctccgactacgatgattttcattttgaattcctcaaaagcttataatttttattttatctttatatttgtaagattgattatagcattttcataggaaaaggcaagcaagattctgagtattttcgcgggggaatagagatacagaaaagaaatcggttgcagaaaatgattccttctcttataatgaaggcgttagttttgcacaacaaaacgggagaagggacagaaaatgggaccatatgaatatttattgatccggattgacggagattatgctttactgcaaaggatcgaccaagaagataaagatgttctgccgattgcgcgggcgctgctgccgccagaagcagaagaaggcagccgactgcattatgagaact

SEQ ID NO: 2404 - DNA, 7579 bp, Unknown
  16S sequences of unknown bacteria
ctcggaggccgtgttgcggttaatgaacacttccggcacatactgcgacagctcctctgccagccgctccgtcgtcacgatcgccgcatcgcacagctgcagcgtgcggcccatgcggcgcacgccgtcgtcatacagcgcgcgctcctgttcgttcatcgttgccagatatttgatggtgtcggtgtattttgtatccaccaccagatcgtcgatgtcaaaaaacacctttttgttcagctgcttggccttttcgataaaggcgccgatcatatcggtataggggcagcgaaagaaaacaaacgaacgataatggcgcacctgatccagctgcaattcggtataaaatacctcgttggattctatgccaaaggccaacagctgctccctttggtgcgtcacccggtatctgggcgggtgcggtacgcttttatcgcagccattgataaacaaaacatccataaacgccttgtccttgctcttttgcccgtggccgccaaggctcgctcccacataattttttgtcttttccagcaaacggcccacgccttcttcccgcagcgtggataccgttttctttgccaactccgaaacgctcatgtccttttcctcctatggccccttacagcagccccagttttttcaaattcggatgataatacgggtccggctccccggcctgcttgctccaacgctgcaaaaacgccccggcatcccggcacgggcccgcggccggcgcttcggccagcttgcactctgcaaacggggtccaaacgttccaaagcccctgctttacgccccccaggcagaattccaccgtttcataaccgtcggccgccgcatgaaagccgcccagcgcctgccaggtctgcttctttaccaaaaagcatgccccgtccagcgccgtcacattccttacatagcgcagcatggcctcaaagccctgctggtccctgtgtatcccgcggcacagcgctgcgatgagatccggcttgtcgccatccagcgccaggcccgcacacagcacattgtcgctctcgtcatagcattttgcgcccaccgcgcatacatccggccgctggcaaagcatcgccatctcctccagccaatgctcgtcctccggctgcagcgcagaggcaaacaggcagaggtacttgcccccggccgcccgcgccatctcatccaagctgtccgccagccgctcctgttttggcaccggcttgagcgccacgccctccgggcagcgcctgggcaccgcctgttcatagcataccaattccaacggccgccaagccgtgctctggatcagcctgtccacacagcgctgcgcctgctccggcgacactgcatcatatagcaagacagacaccagctctttgtccacctcgtagcggatgcggtagatggtctggtacggcaggttgctgcgcacttggcctttctcccccgccctttgcagctgctcggctacggcgtggatggccgcatccacggcatactgcttggtgctaagatccatcgagacggactgctcatgcacccgccagtaatacagcaccttggggatgtgcacaatacaccgcgccctttccgtcagccgcagcacaatgtcatggtcctggctgccgtcaaacgccgggcggtaccatgcccccgtgctttccagcagcgctcggctatagcaggtgaaatggcagatgtagttatggctccgcaattcatccttgccaaagcccggcttaaaattaaaatcgctggccttttcaacgtcgccgtcaaacttcacctcgtcggtatagataaagtccgcgcccttttcctcaatggcgcgcatcacctcgtacagcgcgctttcgtgcaaaatgtcgtcatgatccagcagcccgaaatacgcgccggacgccaaccggatacaggcgtttgtattgtccgaaatgccgccgttttcctccagatggctatatacgatgcgcgggtccttttccgcctcttcccggcagatgcgccccacatatgcatgcgcatcgtcgctgccgtccgccgcgcacagctcccagttgggataggtctgcgccttgagcgacgctatcagcgcccgcaaaaacggctccggcgtattgtacagcggcgttaaaatactgattttcaccgggtttgcaaactgcgcgcttttctggcgcgcccgctcctcgtcagagatcatgtgcagcgccgccatctggcggcaggcctgcatgcgctgcgtcttttcacgggtcagccgccacgccgttttcggcccctttgtcaccgccagctttacgccctttaggcccatgcgcagcgcctgtttgaagtttgccatgctattctccctttatgccgtgataaaatacggccccgttcgggccgtttcggcattttatgcgttcgataggtataattagatacgataaagtatatccgattcaccgctaaaaatcaatgcaagcagtgtgcctgtgccgatgtatgcttttgtgcgcttcgtccatactactaatgagaaaggatgtgtatagcatgaaagcaaccattgaacgggaaggctgcatcagctgcggcctgtgcgcagaaacctgcccggccgttttctacatcgcggacgacggccgggcggatatcaagcaggaccccaccccggaaactctggaagcctgcgtggacgcagaacagggctgccccgtcaacgtcatccaggtaactgcccaggcctgaacgaaaaaaacacacatttccaaaaaagcagcccgcttggcgcgggctgcttttcatttcaccggaatggccctcagcgcatcgtccagcgccaaaagctgcgccttggtcagcttttccgggtagtattcgttgtattttcttaggtaaaacgtccgggcaaagtccgcatacagcgggtcctccagcttgggcatcatcgccagcaccgtctgccgtaccgcctcgtttttccacatgctgtccagcagcacatcgatgctgtataccccggcctcctgcgccgtcgggatcttattttccaggtctgccgggaaggggtggaactgcgtttccagccacttgatgcacagcgggaaccaagccgccacgctgtcgttgatgttgtcctggtagccggccgagcaaaactgtttggccagcgccagcccatgcttgcccttttggaagatatgcatttcaaacggcacgccgtgatcgctcagtgcctgccccatcttgatggtgttttccaccggcaccagctggtcgtcatacgtggcaaacaaaaaggcaggcaccgtatgttcgtccaccttatcgcatagccccgggatgggatagggcagccccgcgcccttatgcggcgttgtcacaggatagcccaaaatcatcgcgttgggccgctctttgcccatagtgcccatggccccggacaaatgcccgcccgcagaaaacccgatggaggcgatcttgccggggtcggtgttccaatcctccgccttttggcggatcagcgccatggcctggtccgcatcctccagcgggtggggaaattcggcatgctccatcaccgaatagttcaaaatatacgcgttatacccctctgccaaaaacgccatcgccaccggctccgcctcgcggttagagcagcgcatgtacgccccgccgggcagcaccagcacagccggccttttgtctatgttttcatagtctgccggcgtatccaataagtacgccctcagcgtcacgtttctttcccgattgagcaccacggtttccagcttcattgtcttgcccccgcttccttttcttgttccttacacacaattgtgttcttattttacgttaccacaatccccgcctttttcctagcccttgcatgcagaatgcgcgcggctttttatcggcatccgcccggcgccgcgtttccatacggcccgccggggtccctttgccgatggccgggcgttctgtccatttttccgtttcagcaaaagggcagaacgggaagacgataaaaagcccttggccaatggcgtgcaaaataggaacggaaaaagcaaccctcctaaacagcgccatcgccccgctattctttgggccctttgccgcgcgcagcgcatagaaaagcccggagggatgcccccgggccctgggcctggtttatgcttatgaaatgacagcgcggatcttttccatcgtctttttgacggactttttcggaatcgcccccaccacgccggtcaggtcgcgttccttgccgcctgcggaccctacgccgatctgcacccagccgtatagccgcagcgtctggccggcatactccgtcttgataaagtgcatcgcggtcgcaaggccggtgcccatcttccaaaccgtttccccgttgtagtcgatctccttatacttatccgccaccaaaacgccgcgcaccgccgtttccaccgtctgctggtcgccagcaaacggaatttccatcatcgtccttgccataaagataccccctttgttattttcccgctttacagcgcctctacgatcaaatcgcccattttttggcagcccacctgcgttttgccggggctcatgatatcgccggtgcggtagcccgccgccagcaccttggataccgcgttttcgatctcttcgctttcctggtccatatcaaacgaatatttcagcatcatcgccgctgccaaaatcgtgccgatggggttggccaggtctttgcccgcaatgtccggcgcgctgccgtggatgggctcatacaggccgtttttcgtttcccccaagctggaggacgggatcatcccgatagagccggtaatcatgcttgcctcgtcgcttaaaatatcgccaaacatgttttccgtcacgatgacgtcaaactgcgaagggtcgcgtaccagctgcatggccgcgttgtccaccagcatatccaccagctccacgtccgggtagttctttgccacgcggtgtaccacgtcgcgccacagccgagaagaggacagcacgttcatcttgtcgatgctcgtcacctttttccgccgcttttgcgccgtttcaaacgccgtgcgcgcaatgcgctcgatttcgtgctcgctgtaccgcatcacatcatacgcgctcttttcgccgtctatctcttctacgcccttgtcgccaaagtagatgccgccgatcagctcgcgcaccaccaccatgtcgatgccgcggcccgccacctcacagctcagcggcgaagcgccggccagctctgaaaacagcttggcgggccgcatgttggcatacaagcccattgccttgcggatgcccaaaagcgccttttccgggcggatggcctggtccacctggtcccatttcgggccgcccactgcgcccagcagcacgctgtcggcgtttaggcaggcctccaggctttcctccggcaggggtttgcccaccgcgtcgatggcgcagccgcctgccaatatttccgtataatgaaaggtatgcccgtgcttttccgcaattttatccagcacgcgcatcgcctgggacacaatctccgggccgatgccgtcgcccttgatgacggtaatgttcttttccatgttactgcccctctttaatggatttcaacaggccgttggcggcaatgatcttcttgataaattcagggaacgcctgcgcctggtaggtctggtttttcgtaatgttggtgatcacgccgctatcaaaatcaatggatacctcgtcgcccgcttcgatgccgtcggacgcggccgggcattccaaaatcggcagcccgatgttgatggcgttgcggtaaaagattctggcaaaggtcttggcgatcacacagctgatccccgcctccttgatggcaatgggcgcgtgctcgcgcgaagagccgcagccgaaattgaacccgcccacgaggatgtcgcccggcctcacctttttaataaactccttatcaatatcctccatgcagtgcgcagccagctccttgtggtccgccgtattcaggtaccgcgccgggatgatgacgtcggtatccacattgtctccatacttatgtaccctgccctgtgctttcatctgctctttcctccttacagctcttccgggcccgcgattttgcccagcaccgcgctggccgccgccactgccgggctggccaggtatacctcgctgttcacatggcccatgcggcctacaaagttgcggttggttgtggccacggcgcgctcaccgtctgccaaaatgcccatatagccgcccaggcacggcccacaggtcggcgtggataccgcgcagcccgcctcgataaacgtttccaagtaccccagcttcatcgcgtccatatagattttctgcgtcgccgggatgacgatggcgcgcacatgctttgccaccttgcggccctttaggatctccgccgccgctttcaggtcgctcagccgcccgtttgtacacgagccgatgaccacctggtcgatctttatatcccccacctcatcgatggtcttggtgttttccggcaggtgcgggaacgccaccgtcggccggatggcggacaggtcgatgtcgatcaccctgtcatacaccgcgtcctcgtccgcttcatacaccgtaaacgggcggtttacccggccctttacatactcgagcgtaatctcatccaccgcaaaaatgccgtttttcgcgcccgcctcaatcgccatgttggccatacacagccggtcctccatcgaaaggctctttaacccctcgccggaaaactccatcgactggtacagcgcgccgtccacgccgatttggccgatgatgtgcaaaatcacatccttgccggatacgtattggctcagctggcccgtcagattaaacttgatggcgcccggcaccttgaaccacgcctcgccggtggccatgccggccgccatgtccgtagagcctacgccggtggaaaacgcgcccagcgctccgtacgtgcaggtgtgcgagtccgcgccgatgatgcattcgccggggcccaccagccccttttccggcagcagcgcgtgctccacgcccatatcgccagtatcgtaaaaattaacgatgcccatcttctccgcaaaatcacggcactgctttgcctgctcggccgctttgatatctttattcggcacaaagtgatccatcaccaaggaaatcttttccttatcaaatacgccggtaaagcccgccttttcaaattcattgatcgccaccggcgaggtgatgtcgttgcccagcaccatatccagcttggcgttgatgagctgccccgcctccacatggtctaggcccgcatgcgccgccaggatcttctgcgtcattgtcatacccatagttcgtctcttcctttccctgcttttgccggtcttattgtaccgtatatatcttatttatgccattgacatacgccaatatcgaagcctcgatgatgttggtggaaagcccgcggcccgtcacggtgtgcccgtccttatacaaacgcaccacaacctcgcccagcgcgtcctccccttcggtgatggcctggatgctgtacgttttcagctccacatccgac

SEQ ID NO: 2405 - DNA, 32759 bp, Unknown
  16S sequences of unknown bacteria
cgatagccgcggcgctccttgcggataaggggcttacctattaaatgctcgagctttgcgaacagctcggcgtcgatttcggtctcgatctcctcacggctcagggtgcccgcccctttaaagcagagcaccagcgccgtgcgcccctctgcggccagccccgcgcccgaaagcatcatcataaaccccgccccgtcggtattgaagcccgtccgcgtcgcggaaatcaccgtattcaccgagccgaattccgccgcgtccccctcgatgcttttcaaatactgaaatatctcccgcttgtagggaatagtgacgttgaagccgtccgtctcccgaagcaggcgttttaccgcggggacaaactcctccgcgcccgcggaaacgttttcgtaatcgcaggctacaccctgcgcggataggataaaacggtgcatacgttcgctttccgagcccgacacgtccctgccgaggagaccgagttttaattttttcatcgcgctttcctcatatcccgagttttttgaaaaaatcggggaaggaaatggcgcagcagtcgggccgatcgatactgccgccgcgttcggacgccaaaagcccgacggcagccgtcatggcgatgcggtgatctagataactgcgcacgtccccgcccgcgagcgacgaccgtcccctgataaaaaacccgtcctccgtctcgacgcaaattccgccgagcgccgcgatcatctccgtcgtcgaacggatacggtcgctctccttgacgcgcagctcccttgcgcccgaaattcggctttccccgtccgcaaacgcgcagagcagagccacgaggggaagctcgtctatcatggagggcacgtcctccgcggcgagcgtaatcccccgcatgggcgatttttccacgagaatatccgccgtttcttcgccgcccgaaacgcgcctgttcaacaaggaataggtcacgcccaaacggtcgaacgcggtcaatattcccgtccgcgtgggattgattcccacatttttggaaagcgtccgccctttcagcgcgcccagcgccataaaatacgccgccgaggagatgtccgcgggcacgcacacgtccgccgctttgagacggctttttttcacccgcacggcgttgccgtccgtcgagatatccgcgcccatcgcggccagcatccgttcggtatggtcgcgcgtcctttgcggctccctcacgcaggtttccccgtctgcggacaggcccgccagtaaaaccgcgctctttacctgcgcggaagcgatgcttaaaactacctccgtcccccgcagcggggcgggcgatacatgtacgggcgcgtgtccgtccgtcgtgcggatatcggcgcccagcagggacaggggagcggccacccgcgccatgggacgggaggaaagagattcgtctcccaacagctccgcggcaatgttttttcccgccgcaaatcccgtcagaagtctcatcgtcgtgcccgaattgccgcagttcagccgcacgcccgtccgaaaatgcggggtgccgcgcacgcgcagcgtcgttccgtcgatttcgatttcggcgcccaaagcgcgcatgcactgacatgtggaaaggcaatccccgcccatcagggcattggtgatcaccgcttccccctccgcgccgccgttgaacataatcgcgcggtgggtcaccgatttatccccgggcagctcaaattccccctcgaaaacgcccgccggctcaatttttttcatttgcgtatcctcctcgttcccgttccgcttcccgcgccgcttccgcaagctcctcgcggtacttttcaaacggcagggaaaacagcgcccattttccctttgcggccgcgaccgacatgcagatcccgccgccctccgcgttcttcttgtccgcccgcgccttttccgcgtccgaacggatattcgaaaagtcgatcttaccgacgggcggaacgtcgagcgccttattcaccagtgcagtcagttcctcaccgtatttcctttcgcagacgccgtacttcatcgcgagcctcgtctcgagcagcataccccaaagcacgctttccccgtgcgaaaggcccgacgccagctctaaggcgtgccccgtcgtgtgcccgacgttgagggacttccgctcccccgtttccttttcgtcctcttccaccaccttcgccttatgctttacgctcggcaaaatcaaagaaaacagaaattcccgctcggaaagcttgtccgcgttcgccttcaacagctcgaaaataccgccgtccagagcggcatatttcaccaattcgcccagcccgcatttgatttcccgcggcgggagggtggagagaaacatcggatcgacgatcacctcgcagggctgataaaaggccccgaccacgtttttcacgccgccgagatccacggcggttttcccgcccacgccgctgtccgcctgcgcgagaagggtggtgggtacctgaacgcaggaaatgccccgcatatacagcgccgccgccaggccgccgatgtcccccacgacgccgccgcccacggcgaacagccgggaagtacggtgcaatcccgcctccgtcatgcgcttcaaaatctcgaaaagccgctgaaaatttttattttcttctcccgcgggcagcacgaaaacctcgccgtccccgaagtattctcttaaaaattccccatacaacgcaaatacgttggaatcggtgacgacgaaatttttccgttctttcaccaaggacggcagacggagcgccgcggcgccctcgccgatcgtgatacggccctcgagagagggcgttttcaaaaaaacctcttccattttttctcccgttaagctcaaggcaggcgggcatatctgtccgcgacctccgccatcgtatccccgcccagccgctcggccaccgcctccgccagcacttcggccacggccgcttccgcgataatctccagggcgaaaatcgcgcatacgtcgctgcgctcggaagcggcgacggcttcctcgcgcgtcgcaacgtccaccgttttcagccccttcattaaagtgggaataggcttcatggcgacgcggagaacgatttcttctccgttggacatgccgccctcgatcccgcccgcgcggttggtgcggcgagcgaagccgccgtcgtaaaaaatttcgtcgtgcacgtccttcccgctcaaagacgccgaagcaaaccccaggcccgtctccacgccctttaccgcctgaatactcatcaaagcgcgcgccagccgcgcgtccagcttccccgcataggtcatggggcttccgaagccgcttttcagcccacgcaccctgatttccgcgacgccgcccgccgtatcgcccgcctttttcaacgcggcgattttttcctcggctctgtgttccgccccttcgtccaacatgcccaaaggggtcgatttcgcgcgcttcagatcgtcgaacgcatattcgccctcgtcctttacgccgcatacctctctgacgaagccgccgatctccacgcccagcgcggaaagatagcttttaaatacgccgcccgcggccacgcggatggcggtttcgcgcgcggaagcccgttcgagaatgtttctcgcgtcgctttggccgaatttcagcattcccgaaaggtcggcatggccgggccgcaccctcgtcaccgtgcgcgcggagacgtcgcacgctccgtccgacatatacggccgccaattttcgtaatccttattgtaaatgcacagcgtgacgggactgcccagcgtttcgccgtttctcacccccgtcaaaatctccgcccgatcggcttctatcttctgccgcgcgcccctgccgaagccgctctggcgaagcgcaagctcgcggtcgatttgcccgacgtcgatttcaagatgcgcgggcagtccctcgatcaccgcaatcagcgcctttccgtgcgattcgcccgccgtcgtcaatttcatacccgcctcctctttttccgtcgatatacttctttatgctatctattttaccgcaaacaatcgagaaagtaaatcgtttagcgggaaaaaatcacataaagcgcgaaaaaagctcgttttcggccccgtcggggcaaaaaaacgccgccgcgctccgtccctgaagacgtaagccgcggcgggcatgtttgtttttcggtctcatctcgcggcaaacgcaaacgcgccgccgataaaatccaccgttacgcgctgaccgtttttcacgtttcccagcaaaatctcctcggacaatctgtcctctatccgcctttgaatggtgcgcttgagcggacgcgcgccgtattgattgtcgtacccctcctttaccagctgctcgagggcggcgttcgtcaccgaaagcacgattccccgttgttcgaacagccgtttcgacagcgcatcgacgatcttgacgccgatcttcgcggtatcgctttgggaaaggcggtgaaaaacgatgatatcgtccaatcggttgagaaattcggggcggaatctctctttcaacgccttggtgatattctctttcatttgttcgtactgccgttcgccgtcggcgtccgcctgtttatcggccgaaagctcgccgccgaacccgtaggaaacggctcgctccgcttccgccgcgcccacgttggaggtgaggatgaccaccgcgtttttgaaactgatcgtccgtcccttgttgtccgtcagccgcccgtcgtctataagctgcaaaagcagattaaacacgtcggggtgcgccttttctatctcgtcgaaaagaatgacgcagtacggcttggtgcgcaccttgtcggtaagctgccccgtctgcatgtcgtcgtagcccacatagcccgggggcgcgccgatcagcttggaaaccgactgcttttccatgtactcgctcatatcgaggcggatcatctgatcctcggagccgaacaaagcttccgccagcgccttggtgaggtcggtttttcccacgcccgtggggccgacgaaaataaacgaaccgatggggcgggaagggtctttcaagcccgcgcgggcgcggcggatcgccttggctacggcggatacggcctcgttctgccccacgatccgcctgtgcagctcctcctcgaggtgcatcagcttttcgccctcctcctgcgtaatcttcagcagggggattttcgtgcgggaactgacgatcgcggcaacctgttccttgccgagcgcataccgcccgtccgccagccgctccatgcagtgcgcgcggcgcaccgcctcgatccttccctccagcttctttctttcgttgagggcggccatcgcctcggtatattccccccgcgcgcggcggagccgttcctcttcgtcgagggcttccgcgtccgccaaaaggcttttaatttcgtcgtcgtcctcggccatgatccgcgcacgcgcggcggcctcgtcgatgaggtctatcgccttatcgggcaaaaaacggtcggtgatatagcgggcggaaagcttcaccgccgcttcgatcgcggcgtcggtgatcgctatgccgtggtgttcctcgtatttggaacgcaggcctttcaaaatttccaccgtgtccgtttcggagggctcctccacgtaaacgggcgtaaaccgccgctccaacgcgctgtccttttcgatatactttctgtattcctcgattgtcgtcgcgccgatcacctgcaaatccccgcgcgccagcatgggctttaagatattcgccgcgtccatggtattgtcggccgagcttcctgcgcccacgatcgtgtggatttcgtcgataaacaaaataatgtctccgtccttcatcaccgcgtcgatgagatccttgagacgctcctcgaagtccccgcgatagcgcgcccccgccagcatgccggggatatccaccgaaaacaccgtcttattgtaaagctgttcgggcacgttttcgtctatgatcagctgcgaaagcccttcggcgatcgcgcttttgcccacgcccggctcgccgatgaggacgggattgttcttcgtgcgccgcgacagcacctgaattaccttttcaatctcctttttccgtccgataacggggtcgatccttcccttttttgcgcgttcggtcatgtctatgccgtactgaagcaatttttctctcgccccgtccgcttttttcgccgcggaccttttcttttcggcaaacccgtaatttttcgtctgcgtccccggcttttccgcccccttctcccgctccttatcggactccgcttcccacgaagaagcctcgtccccgtcctcgtcgtccgccgcgccctcgttgtcgaaatcgtcgtatccaagctccttgcgatgcttctgcgcgcgcagtacctgctccgtcttttccttcatgctctcgacgtccgcgcccagccttttaagaatcttcaccgcgtaacagctgtcgctctccagcacggacagtaaaaggtgcgccgtccccgcgagcgtgcccgtctgcacggcaaacttgattgcgcggtcgaacatctgcgtcgtgcgcgcggtaaaaccgggtgtggtgatattcgtgtcgatacagcggaaaaatacgtcctggtactcgcttttggcaatcccctcgctcgcgagtatgccgtaagccgaacaggcgggcaggcttaaaaagccgtagatgacgtgttcgctgcccacatatacggcgccgtgctcgatcgtcgcctgattggcgatcttcaaagcctccttcagattttcggaaaatttagataaatagtccatacggccgctcctcgccttttctctgcctttctccgcgcgataacattatatattatatgctccaaagcccgcgcgccgtcccttttcccgcggcggaatccgcgcaccggcccgtaaaattattctcccgcctcgtccgcgcgccgcaccaggtcgggcagaatcttgcgcacgattttagcgcgcagcaaatcgcacgtccgctcgtccttggcgtcggggcagttccccattttgaaggaaacggggcgcatgttggcgataaaatcgtttaatcgcaccatatcgggcgcgcggaaaaatcccagcgccacgcccagcttcaccttcaccatgcccgcggtgagttccttgacgggcaaaagcgcgcagttggtcagcgcgccgtacgcgcgcagacacatgtcgcggtagcccgtttcgtcctcctccagcatccgctcccgcgcgtggatctccagctccgcaagattgagcgtcacctcgtccatgtgcgaaagaatatccgcctcggaatatcccagcgtgcgttcgttgctgatctggtaggaatacccctccgccgccgtgccctcgccgaacacgccgcgcacggtgaggccgtttaccttcagggaaggcagaagctcctccagctttttatacttcgcaagcccggggaggaacatcatgacggacgcgcgcatgcccgtgccgagattactcggacaggccgtgagataccccagcttttcgtcgtaagcgaaactgacggaacgcgcgattccgtcgtcgatcccgctgattctctcgtacgccttatacaggtcgtaccccttgagaatatattgctcgcgcaggtgatcctcctcgttgaccatcacggaaacgtccttatccgaggaaatgaacgccgcggacacctccttacgcctgatcaaatcggggctgatgagatgcttttcctgcaaaagggtcgcttcctccgcgccgatttttccgatgtcgtattcggtaaactcgtcgaggtggttgagctcgtaccccaccatgcggaccacttcctttgcctgcgccgggttcagcttgtcgggaaagggaaagccgaataaattccgcgccagacggacgcgcgtcgaagtcaccgtcgtttcgataaacgcggcggaatccgcttcaatcatcgctttcctccctgtacaaaaaattattcagccgcttgagctcctccgaacagattttcgccgcctcaaaatttttgtccttgataaattcctccacgcggtttttcaggagattgcggcgccgcaccgtctcctcgcggtctcccgaatttttcggtttcttgccgcagtggatttcgtttccctgcaagcgtatcaccacggggatcaccgtgggcgccagcgactgataacactgcgcgcagcccaccagcccgcgcgcgcggaagtcctcctccgacgttccgcaatacggacacatggcaatctgccgcccccgcgccttgggcggggacggctcgacgtcgatagaaataaacagacggtgataacagtccagacaataatactccgtctgctttttcccgtctgtaaacttctcgtacgttttcgtcgcctgattttttttgcaatgacagcacagcatgtccgacgtttccttttttatgcctccggagtctttttctcctttttatctttcttttccccgcctcggctcttgaacagcgaccaacggaagaagcaccacagcgtctccagcgcctgaagcggcacgcccagcaaaaacagcagccacagcctgctgtaatcctcgtgtccgagacggaccatcaccactctcgaggtgacatatacggcgacgagcgccgtccagatgagcagggatacggccacgaaattggtgattttatatttccacgccgcagccagcgaggtaatgacgatcgcgttgatgggcacggcgtaaagaaacgccagccaccattccccttttttcggaaacacgatattgagaaacacaaacacgacggtggcgaccagccacacgatgccgctggaaagcagcatgatgaggatgtgtctccacttcgacattcttttcggcggcgccgcggacgaacgttcgctgacgaggtcgttgacggtaatcccatataattccgccaatttgagaaggatatagatatcggggacgccgtttcccgattcccacttcgaaacggacttgtcggaatagtttatcttctgtgcaagctctgcctgagtcagatttgccgcctttctataatagattaaatttttggcaatccgctgattggtcgtttctaagttttccataccgctatgatagcatttttttttgctttcgtcaagcaggtgcggcccgtatttaacgaaaagcgcgcttttttattcatttctaccctcggtagagtgatttttgtcctctctattttccaaaacgtggaaatagaacgcaaaaagccgcgatagaggcgcggcggtttttaagtagaattaagtatcggaaaggatagagagaagcgcggcggcgagtagagcgttttatgttttgaataggttgaaatcggtcaataatacatatacaataagtatatcatatatagacggaagggtacgggcgggaaacgaagaaccaaaagggcggtttccctcacaatataattaaggattattttttaaggagtttcaaaaggatttatggaaagaacgtttgattttatcaccgatacttgctgcggcatgccgcaggaatacatcgaagcgcacggcgtcaccgttttgcctttgggctacaccatcgcgggggaaacttacggagggatcgagggcaaacagctgccgcccaaggagttctaccgacttctgcgcgaaggaaacgtctgtcacacctttcaggtgacggcggaacaggcaaaaccgtccgtcgaagcctctttcaaggcggggcgggacgtggtgatcgtcaccttttcctccgcgctttcggggaccgcctcctcgtttacgattgcggccaacgaactgatggaaaagtatcccgcgcgcaaaacgtttatcgtcgattccctcggcggctcgcttggcgaaggtatgcttttggaatatctcgtcaaaaaagccgatgcgggcgcctccatcgaagaagtttatgcctacggagattggctgagacaccgcatcgcctacctctttacggtggacgatctcgactgtctgcggcgcggcggcagaatttcgggcgcggtggcggtcgtggggaagctcctcaaaatcaagcctctgctccacgccaacccgaaaggccttttgatgcctatcgccaagatcgtcggcagaaagcgctcgttggaggcgctggcggacgaagcggcgaaacgctccgacctctcgcccgaagatcccatctatatcagtcacggcgactgcgaagaagacgccgtaaaattggccgccctgatgaaagagcgtctgggcgaacacccgacgatgatcaacttcgtcgatcccgtcatgggcgcgcacggagggccgggcgtcttggcggtatttttgaaatgtaaggtgcgcgagtgacgttcgccgcaaccctgccccctacaaaaataaaattttctgtcaataaaacgataaggagcaagaaattatggaaaaaacattcaaaattctgaacgacagcacctcggctggcgagctggaaagcgcgttaaaatcgggcagcgatctcgtaatcgtcagttccccttccgaatatttcgaaggctatgcggcgcaaaacgccatcggtctgatgaaaaaatatcccgagcggaaaattttcgtcaccagccgcgtctccacctctattttggaaaaggtcctcgccaaggcggaatcgggagcggggcttttggacacctacgcttacgcagagggtctttcccgcgagcagcgcgtctgacgcgcttttgatacgagcctgccgcaaaagacggcgacgttttgcgcggcacttttactatgcccacacttcaccataatcctaaaaggaaaaaccgagaagctgtcttctcggttttttctttataatcgttgcctttaatccgacaattccactcctccctacgctgccttgcagccgtttgcgccgtaggcttacctgtcaataagcgcgggcaaaaatgacgacgtgctccgcttttttgccgcacaccgcgcaggtttttgccgtctctccctcggcataaacgcgggcgctggccgcggtccgttccttaatcttatcctcgcacgcacggcagccgcaccagcccgctttgacgaagtttccgccttccacgcccgcgagaatttcgtccgtatccttcgcatagacgatccgctgatcgcggcgtgccctggcgttttccagcatctctttctgcaccgttttcaaaagcgcctccacgcccttcacggcgccgtccaaaggcagctccgtcttttccagcgtgtcgcggcgggcgcagaggatcttgcccgcttccagatcgcgcgggccgatctcgatccgtacgggcacccctttcatctcccactcgttaaacttccagccggggctgttttcgctgtcgtcgaatacgacgcgaagattcgcggcttcgagctccgctttcagcttcgcgcacgcttccaaaacgcctccctttttggcggcgatgggcacgatgacgcactgcacgggcgcgacgacgggcggaaataccagcccgcgcttgtctccgtgcgtcatgataatggcgccgatcaaacgggtggaaacgccccacgacgtcgtataggccactttgcgcgcgccgtccttgtcgaggtaccggatatcgaacgccgacgcaaaattctgtccgagataatgggaggtgcccgcctgcaggcttttgccgtcgtgcatcatcgcctccataccgtaggtggccaccgcgcccgcaaacttttccttttccgtctttttgcccgtaatcacggggatcgccaggcagttttcggcaaattccttatagacctccagcatgcgctgcgtctcttcctccgcctcttcggcgctcgaatgggcggtatgcccctcctgccagagaaattcgctggtgcgaagaaacggccgcgtcgtcttttcccagcgcatgacgttgcaccactgattgattttaagcggcagatcgcggtaggattgtatccatttggaatacatcgtcccgaaaatcgtctcggaagtgggacggatcgccaaaggctcggcaagcttttctccgcccgcgacggtcaccacggcgatctcgggggcaaacccttcgacgtgttccgcctccttggtgaaaaagctcatggggatcagcaggggaaaataggcgttttccacgccctgagccttaaaccgcctgtcgagctccctctgaatattttcccagatcgcatacccgtagggacggatgatcatcgtgcccttgacggggccgtaatcgaccagcttggtctttaataccacatcggtgtaccattggggaaaatcctgttcgatatccgcgatctgttcgacgaattgagtctctttagccatactttataacctctttgcgtcgggccgtgcccgatttttgtctatactttaatcattatacagcaaacgcgcgcaattttcaatcgttttgcgcgcgtttttttctttttatcaaattgaaacaacggaaaatttctcaaaagagcctcaggccggtaaatcgtaaaagagcctcaagacggtaagtcgtcgccaaaagcgccgcgcggggcttaaaagcccgtcagctcctttctcgtcttgacgctcaaccagccgcaggataccgacccggggccgacgtgggcgccgatgacgggccccatgatgacgatcttcggccttacgccccattttgcctcaaccatatcggccagctcgtttgcgcccgcttcgttgtccgtgtgcaccactacgaccagctttttttcgtccatgggcgccttttcctgcgattccagcacgtaattgaaggcttttttcatgccgcggcatttatccactaccttcagctttccctcggtgtcgaaaatgagcataggcttgatattgagcgcagtgccgaacacggcggacacggcggacacgcggccgccctttttgagataaaacaaatcgttggggacgatgcagtgctgaatcctcaatctcgcgtccatgagataatcgtaagtctcctgcgcggtctttccctcgtccctcatatcgcacgcgagggctaccagcaagccctgtccgatcgtggcggtaagggggtccaccgaaaggagattaaagtcggggaactcctttttcacttcgtccgcggcctgctttgccaccgtgacggtgcgcgccaatcccgaggagatgctgaaatgcaaaacgtcctttacgcccgcggaagccatttttctgaaatgctccacgtgcgcctgataattgagcatagatgtgcggggaaacgcccctccctccactttcttataaaagtcgaggtaatcctgataacaggaaaactcgtccacgctctcctcctgcttcccgtccttgtcgagggtaaaggtgagcggcgcaaaccagatatgacgtttttcgatataatctttatataaatcgcaggtcgaatcgctggacacgtcaaaattaatcatgtttatttctccaaaagtattaatcgtcataataatttatgacaaaattattataacatataaaaggccgtctgtcaacgatatggggaaaaatatatttaagttaatttcacagtcctttgtcatatcgcattttcggccttcctatgcttaccataataacactttcggaggctccgacgtctaacgcagtcttttttcttccttacggttttgtaagcttcaggagagcgtgaagctttgcgatttgaaggcgcagtaatgcctgcccttttccgcggtaaaacgcaaaacgcagtaatcggggtcggcgacgccctctttataatacagagtgtcccccgcccgccgaattttctcctttgtctccgcgtcctccagcacctccattgtgccgatcggcataacgccctcgtaacggaagcggcccttgttgtaaaaatagacgctcgctttgggatttgcgcgatattgcgcgacgcgcagggaggaggtgtttgtcgtgaaataaatcctgttcccgtcgatttttctcggggcgagcatggccttcatgttgggaaacccctcctcgtccaccgaggcgataaacgacgtcttttgttttgaaataaactcaaaaatcctttctttgcttatcattttcttttttcctgatatttattttttattataaagtcatcggccgtctttgcgcggacgcagaggtaaagttctattgctcgaaaacgaatttcccctcaagcagtcttacccgaacataaggctcgtccttttcagccccttcaaaacttccccacgataaataaatacgcaataattcaggcaaaatacgccccgtaaacgtctcctgaagcgtctcgctgtattcttctttatcgatcggataaagagaaaggcaggttactttatcgtatgcatattcaaatctatataaagctgccgccagatgttcgccccgatattttttatattcgcttcttcgcttataaaaataatccgcgtttttgtattttcccgtttccgataactctctcttgcagaaacgcacgtttatatcaaaccccgcaaagagttcggcggcctcttttttggtgcacaaaaaacattcgtggggattgatacgctctcctgtaattttcattttttcgttctcctgtaaaattttgctttttttatctcaccaaaaacttcgaatttttcaaaagaattttctcaggcgcgccgtactccgtttcttcctttataaaagcaaaatgatcgcaaagcaaaaccgactgtcccaaattatcgaacgctctttccagcaactcttttccgttttcgctttcataggcttgattatcgacgattaaaacgaatttatcgggaatttttccgttttcgtaaatcatcttaagtatttgattgcttttcaggcgatttccttgcaaaacgatcatatcccgattgaaaaatcgttgagtatcgtgcgcaaatctgtcaaaaaacttgtctctctttttaggcgcgtcaatctcatataacaaccgttctcttctttccctcctcacaaaacaaaaaacgaaggagcttaaaatttcaatttccatcgacaacctccgccccgaccgccgtcactcctttttcggggatatccccgatttcttccgcacgccatcgaaaccgttcgtaaaaatccttgaaacaacgggagcatatccaagaaaaacaatctttcgtgcaataaaattctccttttctgtccgtcgtgatttcctcaaaacaaaacccgcattttctttcccataattccgccgcgcgcgccccttgtagatattcttcgctcacgcctgttttttccgccagctgtttcgcctccgaaaagacataacgaaaaaaacgatttttttccaaaactgctttttcccaaaattcagggaacttcattttcaagagttcggcgccgtaaaattcgtcatacaaaatttcgtcccgtccctcgattttacaatctttcattttcgccccctttatacgctttcattataagcgcgcgtcggggatttgtcaatacttttgtgaaaaaacgataaatatacggaaatcaaaatttttacaagaattttcccgaaaagacttgaaaaatacgccgaaaaccgttataatagaaacaaatataaaatcgtgcggatttaacgcttaaaacggacggggtttacatttttttcacgggagtttacataaaaacacaatgactttacaggactatctgaaactgaaaaacggtacggacgtgcgcgggatcgcggcggagggcgtcgcgggcgaagaggtgaacctcacccccgaagccgcggaacggatcgccgaggccttttgcgcctggctttcccgccgtacgggcaaaacggccctgcgcatagcggtggggcacgattcccgcatttccgcgcccgcgctttcggaaagcgtgctcggcggaatcgaaaagacgggcaacacggcggtgtttacgggcctttcctccaccccctccatgttcatgctgttgaaggacgaacgctgggcgtgcgacggctccgtgatgatcacggccagccatctccccttcaaccgcaacgggctgaagttctttaccgggcagggcgggctggaatcggaggacgtcaaggaaattctcactttggccgcggagggcgctcccctttctcccacgcgcggcgttcgggaaagcaagccctacctcgacgcctacgccgccggcctcgtggaaaaggtaagaagcgcgacgggcgaaacgcagcccttacaaggcaaacgtatcctcgtcgatgcgggtaacggcgccggcggattttatgtcgataaggtgctgaagcctttgggcgcggacacgacgggctcgcagtttctcgatcccgacggccgttttcccaaccatatccccaaccccgaaaacgaaacggccatggcctccgtctgcgaggcggtgaagaaatacggcgccgatttcgggattattttcgatacggacgtggacagggcgggcgctgtagataaaaacggcgaggaaatcaaccgcaaccgcctcattgccctcatttccgccgttcttctctccgaacgggcggggacgatcgtcaccgactcggtcacttcggacgggctggcggcgtttatcgcggcgcgcggcggaaagcactgccgctttaagcggggctataaaaacgtcatcaacgaagcgatacgcctcaacgaggcgggcgaatacgcgcccctcgccatcgagacgagcggacacgcggccttaaaggaaaactatttcctcgacgacggcgcgtacctcgtgacgcggcttttgatcgcgcttgcgaaagcggcgaagtcgggcggggaaatcacggacatcatcaaagatctgcccatgccgaaagaagcggcggagctccgtcccactttcgcgcggggcagcgattttgcggcgctcggcaaaggagtgctcgccgatctcgaaaaatttgtttcgggtctttcctatgcggcgcccgcgcccgataaccgcgaaggcgtccgcgtcaacttcgacaaagagcacggcgacggctgggcgctggtccgcatgagcctgcacgagccgattctgcccgtcaatatagaaagcgatacggagggcggcgtcaaaaaaatcgccgcgcagttatataaatttttgcaggcttatccctttctcgagctgtcggcgttcgatgcccttctttcgtaaaaaacaaaaaataaaaaattaggagatattaagatggacgtacaacagaccactatcaacgcggtacggattttatccgcggaagcaattcaaaaggcgaaatcggggcatcccgggcttcctatgggcagtgcgccgatcggctacacgcttttccagaattttctgaaattcaatccgagagatcccgggtgggacgaccgcgacagatttattctctccgcgggccatggctccatgctcgattattctcttttgtacctctacggctacgacctgaaaaaggaagatctgatgaacttccgtcagctcggctccaagacccccggtcaccccgaatacggccataccgcaggcgtggaaacgacgacgggccctctcggccagggcatcgccaacggcgtgggcatggcgctcgcagaggcgcatctggccgcaaaatacaataagcccggcttccccgtggtggatcactatacgtacgtgctgtgcggcgacggctgtctcgaggaagggatttcctacgaggcctgctcctttgcgggcacgcacgcgctgggcaagctcattctcatctacgacgacaacgacatcaccatcgagggcgacacggacgtcaccttcaaggaaaacgtgggcgcgcggttcgcggcgcagaattggcaggtgctccacgtcgatctcgtcaccgatcccgacaacgtcgaagcggtgtccgacgcgatagaaaaggcgaaagcccgcgccgataagccctcgatcatcatctgccataccaagatcggctacggctcccccctcgaaggcagcgaaaagtgccacggcgcgcctctcggcgaggaaaacctgcaaaagaccaaagaaaaactcggctggccctgcgaagaggctttcgactgcccgaaggaagtgtttgagcactgtcagatcgcggcaggtgcgggcgcggaaaaggaaatgcagtggaaaaagatgttcgcggaatacgaatatgcgtatcccgagcttgccgaggaatataaggcggccatggcgggcaaaaagcccgagctggagacgatggaggaattgtttgcgttcgataagcccatggctacccgccagacctccgcgatcgtcttaaacaagctcgcggcggtcatgccccagctgatgggcggcagcgccgacctcgccccctccaacctttcggatatgaaggatacggacgagatcaaatacggcacgttcgcgcccgattcctatgagggcagaaatattcacttcggcatccgcgagcacgcgatggcggcgattgccaacggcatgcagctccacggcggtattcaggcctactgcgccaccttcttcgtcttttccgattactgcaagcccgccatgcggctggcggcgctcatgaatattcccgtcacgtacatcatgacgcacgattccatcggtgtcggcgaggacggccccacgcacgagcctgtcgaacagctgatctccctgcgttcgatccccggcatgaaagtttaccgtcccgcggacggcaaggaaacggcggcggcgtggatttccgcgctcaacggcacccggcccaccgcgctggtgcttacccgtcagaacctgccccaatacgaagccagcggccttgccgcgctcaagggcggctacgttctcgaggactgcgaaggaacgcccgacgttcttctcatcggctcgggctccgaggtggagctgtgcgtaaaggcgaaggccgcgctcgccgaaaggaatatcaacgcccgcgtcgtctccatgccctgcatcgaggaatttgaaaaccagacggagacgtacaaggaaagcgttcttcccgcggcggtcaaggcgcgcgtctgcgtggaggccggctccccttacagctggtataaatacgcgggcacggacggagaaatcgtcggcatgacgacgttcggcgcttccgcccccgccgcgcagctgttcgaaaagttcggcttcaccgcggaaaacgtcgtcgaaaaggcgctttcgtccattgcgaaagcgggaaaataatttttccgcacacagacacggcggagcgcttcccgcgttccgccgtttttattcggcaaacaatccctttgcgcgtctgacgcgcgaagttatccacaccattccacaccatttatttttcgggagataaacaaaatgacggtttctcaactcaaggagctctatctcgcccgacaaagctgtcgggaattttctgcgaagcccgttgcaaaggaacagctcgaagagatctgcgcccttgcgggtctcgcgccctccgcgtgcaacctccagccgtggaagattttggcggtgacgggcaaaaaattgtccgaagttatcgattgcctgaaaaagcgcggcaaagccccctttatcgacaacgtgcccgccatgctcgtcgtcgcggaggatacaagcggctcggagggctcaaatccgcccctgtcctatttcgcgccttacgacgtgggcgaatttacttcgcatctggtgctcgccgccgcggccgcgggtttagcctcctgtattttgggctggcgggacggcgcaacgttaaaggaggttctctctttgcccgaaaaactttccgttccctatgtcgtggcgttgggctatgcggcggacggttacgaaacccgccccaaaaaacgtaaacctctcgaggagatactcgaatttatcgactgaatttttttcatcaaccgacgcaaaaagagctttggaaatatccaaagctctttttcaaacggcggccgcatagccccgcgttattcgatatcgagatcgggcgggacgtccagctcctccgagacgtattttccgttctttttgcgctgtctcacgcattcggacaacaggtattctatctgtccgttgacggagcggaaatcgtcttccgcccaggcggcgagggcgtcgtacagcttcggggaaaggcggagcggcacctgctttttttggttttcgttcacgttaatagagacttcccgagtttactacgggctgggcgtcgtggttgtcgcagagcaccacgaggagattggacaccatggccgctttcctttcgttgtccaattccaccacgtcgttttcgctcagccgctccagagccatttccaccatgccgaccgcgccgtccacgatcattttccgcgcgtcgatgatggcggaggcctgctgccgctgaagcatgacggcggcgatttcgggcgcgtaggccagataggtgatgcgcgcttcgataatctcgatccccgcttcgtttacgcgcgattgaatctcgtcgcggatacgcgccgcgaccacctcgctcgaaccgcgcaggcttccctcgtcggcgacgccgtcccccgtcgtatccacgttgggcgcgacgtcgtagggatatacgcggacgatgttccgcagcgcgctgtcgcattgcagggacaaatattccttatagttatccacattaaacgcggccttcgccgtatctaccaccctccacatcaccgctatgccgatttccacgggattgcccagacaatcgttgatcttctggcggttgttgttcagcgtcatgatcttgagggaaattttgttgctgagcgtctccgagctgcccgtggccgactttaacgtcagcggccccgaatggctgtcaacgtccccgctctgattgagcttcgtctttgccgcggggttgacggcggtgcagaagggattgacgaaataaaacccctctcccttcagcgtgcccacgtatttcccgaacagcgtcagcaccaaggcctcctggggcttaagtaccttcagccccatgggaacccacataaatataaccaacgctgcaacggaaacgatcgtcaccgccgcatagccgctcgccgcgcccgcgatcacgcccgcaatcgcaagtatatatacagcgatcgtgatcagcagaaccgacatgccgtgcttcttgttcttcaaaataatttcttccataaacctctccttctattttctatttgatattaaaatgatatcatattgatttaagtttgtcaagaggttttaattaaattttcaaaaaatttaacggagcgggccgttgggcgggccgctccgtcgataaagttgttttattttgcggcagaaatcgagttccatgcctccaaaatttccgcgtcgccgtcgtaattttccgcgacggtatgcgcgccgtcctcgggaagtacgccgcggccgtggatacagttttccgtcagcggccacaaaatgcgcgcggtggtcagcttgatggcgtcgggcttgccgaacagcgaggaggcgaacgtgcgctgcatgattcccttgccgtaggtcttggtttcgccgcttcgcgaggagagatagatatcggaatagcttatcgcgccgtagtccatcatacagccgatcaggcactcggaggcggaggcggtgccgttgtccgcaagcacggaaatgcggctgtcgggcgcgaagtattgcgcatacttattcgccgtcgcctcaaattccgacctttggttgtcgggataatcggcgatcgccaccaacggcgtcccgtccgtcgcgcccttgcagaaataacctgcgatatcctgtaaaatgttcagatatcccccgccgttggagcgcaggtcgagaatgagatttttcttcttctcctccttgaaaatatccatcacggcagcgaattcctgcgcggcctgtccgttgaactgcgtgagacggatatacgccgtctcctcgtcgagcgcggacaaaacgttttcgctttccgtcaataccgtggcgttttcgcccgtaaagatataagcagaggcgcgggaacggtaaaacacatagttttcgataaaggcttccttggccacctctttataaaaagcttccccgcccttttgccccgtcatcttcaggataaatttttcgccctcggcccgctcctttaagaatacggaaagctcctcataggaaacgctttccgcaatttcgctttccgtgacgccgaacccgacgacggccatgccgggcaaaatccccgccgcctcggcgggcgaatttcccgacacgcgggtaacgagcagctgctcattgtcctcgccgtcctttacggagaaggtgacgcccaggccgctccatttccccgtcgcttcctctatcatatccgcgtactcgtcgggcgtcagatatcccgagtagggatcgagcaagccgttgacgccgtcgaaaacggcattgtaaaaatcctcgtccgttatctcctggtaatagtgctcctgaatctgtttttttgcccagatcagcgagcgcatctctttgtcgagcgctcccgcgtaggtataatagccgccgagaaagcccatgcccgcgacgagcaaggcccccagacaatagcccgcgattctccagccgttcgccttctttgctcgtttcggcgcgggaggtacgcccaccgacggctcccgcagctcccgaggctcccgttcggggccgttgccgaaaaattcttcccgttcgtcttttttgttttcgtccatgttaaactccttataaaactcactgcgctgtttgtgcgcgcatagctctttattttggccggcttttttcgcccgaagggataattcccccacccggccgcatactattatatgtccccgcctgtcccgcctcaccgctccagcaatttatagagcacggtaagcacccgaaaggacacggcgtcgggaaactggcgtatgttcagccccgtcgccttttctattttgtccaatctgtataggagagtattcctgtgcatatataagtttctcgaagtttcgctgacgttgaggctgttcctcaaaaattcctcggcggtgttcaccatttcctcgtcctcgaaaatctctttcgcgctctcgtcggtcatctccgcgagatactccgccagcttgctttcgggcacgtcctccagcatcttcaccagcatgtattccttgtacgaatgtacgtttcccttgctggaaaacacgcccgcgtaacgcagcgcgcccgccgcctgcgcataggaaacggcgacgtccttcagccctttcactctcgagccgacgcccaccgtcacgtctatgcccaattcttccttcagcgactgcgcgagaaaatccgcgtaatcggcgggcgaggaatattcgctctcctcttcccccagatatttcacgagaacgcagttgtgacggtcggtagtcaccacggtgtcgaggctgttgccgccgtactgcgcgacgagcgccaccgtctccttcatcagcttgggcacgtacagcgccaacgcgaaacaggcggatttgcccacggaaaatttcgtcatgtatttatacacgcccgccgaggagcattcgcccagaagaatgcgcttgagatattccgttttggacaggtcggcttccttgtccgaaaagctctcgatataggcgggcagcatggccgcatacgtgctttccgcctttcccgcgcccttcagcacgccgatatagcccgtgtttttatacagaaagcgaaaaaaggtattgttcccgtcgtccgccacgccgtcgaagggcctgtcgcacacgggcagcccctccccgccgcttccctccctgtaatagctcacttcgagacgcgtcttttcctttatttccgcaaatatcttttctatctcggtcatgtcaccctcccccggcccgcggccggatttttccactcctctattatagccgaaaccaataaaaaattcaagggtttttccgcccgactttcccgctttcttttttaagtttattacaacaaatacggaaaaatttacaaaaaaatgtttttttagtattgacatatcggacgggaagtgatataataaaggtaagtcaaaatttatatattttcgccttaaacacctttcggggaaatacgcgacgaaaccaagaaaataaactttcaggagatattttatgagcaacaccagcaccaattatgccgagctcaacgtgaccaacgacgacatgaaagaagtgctcgccgagggcccgcaggaacctgtcgcggcggaagccgctcccaaaaagaagaggaatgcgctctatcgtatcctcgcgctccttctcgcggcggcccccatcgtctgcctctgcctgctgaaggtaaatctgcttgtcagtacctctgcgggatatgcggtctatggcgaaaagactttcctcgacgccttcctcgcgctcttcaaaaaggacgggctcgccgatttctataaggcgatcgcgggcgctcccgccgatttcggggcgtataaatttatgggcctcaccgtcctcgcctcgggcacggtcggcaagctcatgagccttttcctctacgtcattcccgccgcgatggtcgttacggtggttttgatgatcgtcgccctctgctctggcaaggcggcccccgccatgacccgcgcgatcgtctttatcaatttctgggtgtatgcggcgtatgcggctgcgatgctggccgtttccctgtattacggaaatatcgaaaggacgtttgatatcgtcatgctggcgattgcgggcgcaagcttcctgttctacctgatcttctcgtttatcaaggcggggaaaggcacctggatgacctttgtgctcttccttctcaccgccgcgtttgcgggcgtctgcgtctatgggatcacgcaatccgcgcaggccttcaagacgctgttcgcgtccaaggacaacagcatcatcaacagccttacgaaaggtgacttttataaatatgcgatcgtcgccctcgcgggcatcgcgggactcgcttccgtgatctcctcgatccgcatgacgacgaagaagggctacaccttcgacctcatccgctatctcttccacgttcttctcgccgccgcgctcgtctatttggcgtttacggaaaaggcgttcgacggaaccaagttctacctctatgcgtttatcgctctggcgatcgccgccgtacaggtactcctcgtaatcgtcgtgctctgcgctaagaagaaggcaaagaagcttgccgcacaggaaacgaaagaagcgcccgccgaagagacggaagcccccgcggaaacaaaggaagaagcggccgaagaaacgacggcggttgaaacgacggttgccgaagaaacgcctgccgaaacgcaggaagaagaaacggaagaagcgggcgtatatgcggaagcggtgcgctacgaaggccctacggcggaaacggccgcacccgaagcggaagagctggctcagcccgccgaagaaaccgcacagcccgaagcggaacccgcgcctcagcccgcgcccgtctataactataacttcgcggcgcccgcggcccctcagtccggcgcaggaaatacggcggattacgatttctacaacagcagaagcttcgatccgtttatcgcttcgctcaacggggacgaaagagaacagtttacggaaatctttattctcaaatacaagggcgatacgaaaaatctgcccgattatcaggtgggcggagacaataccgaattcttccgcaaggtatttatctatctcggacagtacagagacaggattcccgattctctgctggcaaagatgtaccagtttgcaatcagaaaataactcattgaaagcggacggccgaccttttgaaaaggtcggccgtttttgtttaacttttttattgccgagcgttacggctcggtttgacaattcactttattcttcgtttaagcccattcaaaattttcttttcccgcgccctgctcgaagtggtatctgacgatccccagatctaacgcggcacaggcgccctgcttttccaaccgcacgcggccgtcctccaaaagcacgatgttaaaattctgccgattgagcgcggtgggcgccagcgcggcggcttccacccctttaacaaaccattcgggcgcttttcccgccgcggagcacagctcaaacagctccgtcaaaggtttactctcgtgcggcacgccccgcgtttcgccgtagccgagggcgattgcacacgccagcttttcgtccttttccagcccgcacgctttcctgcacgcccctttggaataggtcgcggccacccagcagctgttgagccccaaagcctgcgccttcaacacgatccgttccccgtaatatcccagcttttcctccgtctcctcgcttccgtcgcccgtcagaacgagatagttcctcacgccgcggaattttccgagccttgccatcagcccgccgaaagtccttttttcgttcgtcacaagccggacattgatgccgccctcgcggctgcacgcctcaatttcctcgttgagcgcctcgacaacggccgttgccagctccttatccacataacttctcaccgagtgtcttttttcgatcgccttcaaaacgtccataaccaccgcctcccgaaattattttttacctcttttcccgccgaaagagcaaaaaagcgcgcgtttcccagaaacggcgccttcagtcctcgtcgggcagagaggccctgcccgaaatttttatcaacactttgatcccgccgtcctccgtaaacgaacgctccgtgcatacgttatccacaataaacagcccgcggccgctttccgcatagacctccgaacagcggctttcctcgggcgggcagaaccgcaccgaagaacgtaccttcagctcgataaactcgccgcggatttcgctttccagcgaagctaccccgtcggaatgctgcaacacgttgctgaccagctcgctgacgaccagcttgctgtcgaacacgctgtcttcgggcacgtcgctttcggcgaggaaatcgcaaagctccttcatcgcctccttcaacgcttcgaaatttttcacttccatgaacatgcttcgccctccgaatcgtccgtgctctttttcgcagcttcacacggaatctttaaggttttctttcagcctggccagcagcttccgctccattctcgacacaaacatctgcgagacgcccagccgccgcgccgtctcgctctgagagagctcgtcaacatagcggaatctcaaaaccgcccgttccgtctccgacaaatccttcattgccgaacgcagggcgtcctgtatttccagccgttcgtaacggtcgtcgttgtcgggcagcagcgcgtaaagggaatgctcgccgtcgtcctcgcccgaactcgccacgccgtcgagggaaacggtgcctcccacctccagcgcgcgcactacgtcctcctcggacagcttcagccgttccgcgatttccctgatgctcggcttcacgccgtttttcccctcgtactctgcggtaaacgcgcgcacggccgcgctgatttcgctcagccggcgggggagcttgacaatcctcgatttatcgcggaaatagtttttgatttctcccgtcaccgtaggggtgataaatgtggtaaactgcatgcccatagccggatcgaaacggtcgatgcccttgagcagggcgagagaggccacctgcctgagatcgtcgtattccacgccccgccccacaaactttttggcgaggatctcggctatgtagagatacttttccgcgatcttgttccgcaccgccgtgtcgcccgtttcgcggtacctcttaaataattcgttgatattttcttctgccataatggaaatcccgctccgctttccgcttacgcttcgaaagcgatggtctgcaccagccccgcggcgttctttttgaactccgcattgccgatcagcgcgtttaacagcgcgtaagaaatctcgtcgtccgcgcccttttccccgggccttcccccgtcttgccccgatacggtgcaggagagcttttctcccaccccgaaagagatctccgccgcctgaaagccgttccgctttaagatcagcaggctttcggtgacgcacaccttaaaatcctccgcggagtccacgtcgaacccgcagagcgcgcacagcccgcccgtagcgagccgcaccgtcgtgagatattcgtttgacaaaggcatagaaacggaaaacttttccatcttcattcgatctccattatcgtgttcaacgagcagatgagaaacagctttctgatcttctgctgcaaatttttcagcgtcattttatatccgtccgttttaacgtttttcaaaatcttgacaaacgtccccagcgtcgtggaatcgatgaaattgagttccccgcactcgaacacgacgtcggcgggatttgccctgtacgcctcgatcacctcggcgtaaaaagcgtccgcgttgcccgaatcgatgtctccgcggagcgcgatcgtcagcttgccgccctccgtgccctttacttccacttccttcatggtaaaaccctccctgatactcttacaatatatatgtaccgcagttttgcggcctttcaaacagctttcggattttttccgttttttatttccgttctccgcggtgcgtccgtagtatttcaaacggtttttcgctctttttcctcaaagatacgccgacaactcgttgatggaggtcaaaacgacgtcgggacggtcgggcgaacgtgcaagcgtctccgccgtcgtctcccccgaaagcaccaaaacggcggaaaagccgctgttgttggcaaagcggatatccgtatgcaggcggtcgcccaccatggcgatctcctccttttccgcgccgagcaggccgctcaacgcctctcccataatcgtatgcggcttgccgcatatcgcgtcgggcagccgtcccgacgaagcctccagcaatttgataaaagagcccacgtcgggtttggggcagggcagagcgggacagacgacgtcggggtgagtggccacgtaaaagctgcccccgacgaggaattcgtttaatttgaccagcttttcaaacgtcagcgcggtgtcgtaggcgaggacacagacgtcgggcttttcctccgtcaggcgtatcccccgcgcggcgaaatcctccttcagcgcctcccgtcccgcgagataaacggattttcccgcgtgatgttttttgagatattccgcggcggcgatccccgaggtatatacaaaatccccttctccccaaagcccgattcgctccagctttgcgcggtattcttcgggggtcttggacgaattgttggtacagtaaaccaacctttttcccgccccgcgcaggcgcgccagcgtctctctggcggccccgatcggaatatcgtcgatatacagcgtaccgtccatgtcgaggagaaacaggttcgtctttttcaacagcgcttcaatcgtcataagtattcctttttcaacaacgtttcactcgtcataaatatcccttttcgaaagcgtttcacgcattcggcgcgacgcccacacccatgcccataccgagccgtcataggccttccttttcaacggcgctttaatcgtcatacgtatcccttttcgcctttttccgaatatcgccgccttagcgtaaccgaggcgcccgcgctgcaattttcttttcgcgaccaaaattcaaagcagggaaaaatcccgcatcagcgaaacgatcccgtatgtatcgacggaaaattcgggcagcaggaaaaggctcctcgaaagcttatcccgcccctcgtcggaaggaagcaggccgaaatcggcgcagaaagcctttattttttcctccagcgcgcacgcttcgcggcagagctccgcctgcaaatcggcaaatttttccgcgcatttcgtcaattgctctacgggcggcacaaaaatttccttcaccgacagccgcgtcccctcggcgagcgccgcagcttccccgaagcgggcgttgtaatccacctttccgccgcggtaaaaaccactttcgaaaaacagcgcgtacagcttcaaaagggaaagcacgcaggaaaacgcaagctcgttttcctctctttcgccctttatccctccgacgagctcctttgcggcctcgatcaggcgaaaaatttccccttcgggaaagcccgagcgaaagcaatattccgccgccgatacggctcgaaaaatcgtttccgccgcccttctccgatcggaagaatcgacggaaaaggcgagttccggcgcggcggaaaagtaaccctccaaatcgttttgcgcggccgcacagggcagggaaagcctgcgcgaagcgcggaatgaaaagacggaaagcgcgcacgccgacaaaaagcaggccgcccgcgccataccccgctcgtccgtctgcatggcggacagagcggcaaaaacgaaatcgggcggaggtacgggatacgtcgtttcgctttccccaacgcgtaccgtaaccctgccgcgcagcagcccctgcggcgcgcaggaaagacacgccccgacaaacggcagcgagcgcgccgccgcgaaatatctcgccgcggccgccgccccgcccgcgcccacgacgcaggtaatcccgtcgggcaggccgaacaaaggcagaaggtcgtccccccgcgccaaaacgagcaatatctttttcggtatcttctttaaggcgtttccaagcgcgagcgcgctttcctcatccgtgagtacgagaaactttccgaagggaaagcgggaggtgagaagggcgggaaattccgcaagctccccctcccgcagttcgcagccgaaaagaatatccgcgattttcgtcatggttttttatctttttattttttaagcataggcgggaaaaacggcgttgacggcaaaccccaccaaaacggcgacgacgtaagcggcagcgatcagcgccagattgcgtttccattcctttgtgtttttcagcaatacgacaaatcccagccccgcatttgcgcacagccccgccgcgcaggagccgaaagaaatcccgccctgcaaaaagctttccgtaatcaccacgctggaggcgcagttgggaatcagccccactagggaggcgatcagcggctgaacggccagattgcccttcataaacgccataaaccgttcttccgtcacataataaatgatgacgcccaatacgatattgacggcgaggataaaggccgctatctttaaggaatgcaaaaacggcgacagaaaataggttttccagggcttgttttcgtcgtgctcgcggccgcaggaggtacattcaaattccttttcgcccgcctttttgagaaaaagctcccgcgcggcctcgcggggcctctcctccgtctcgccctcttcaggcgcgccgtcgcgtccgcattgcttctccgaattttcgccttgtccatggccgtattgcttttccgcacttttcccatggccgtgtccgcattcgttttccgcgcctttcccgtgttcgtgtcctcgccgctgttccgcgcgcgccgcgtcgagcgcctctcccgcggacgaacggacgcgcacccgtctgcttccgaccagcttcaaaacgccgtccacggcatagcccaccgcgatgcccaccgcgatcttgagggcgatgagcggcagcagccacaccgcgcccctgcccgacgagaggaggagaataaacgcctcgtcgctggtggagacgaaaatagcgagcagcgtccctaccgtgatgtatttctgttcaaacagcttggccgccataacggaaaaaccgcactgcggaacgaggcccgtcgccgacccgatcaaagggccgagcctgccgctcaggcggttgtgcgagcccgtgagctttgttttgtgctcgatgagttctatcacgatatagatgagcagcagccacggaaaaagttttaaggtgtccaaaagggcatcgagcaatacttctgtcataatttcctaatcgtccttacaggcagcttcgcaagggaatggaagccttggcgttgagatcgagccccgcaaaattgccgaggcggtactgaatcagcccctcggacgcgatcatggccgcgttgtccgtgcagcggcgcttttcgggcagaaccaggcggaagcccttctccgcgcaggcggatttcaggctttcccgcaaataggtattcgccgcgacgccgccgcccgccgtcaccgtcgtcacgcccttcgccttcgcggcgaggacggttttctccaccagtacgtctatcgccgcgcattggaaggaggccgccacgtccgctttcgaatattcctcccccttctgctccttggtatgacaataattgatgaccgccgttttaagcccgctgtacgaaaagtcgaacccgccgccccccttcagcattttcggcatgggcacgatcggccttccgcccctcgcgcaggcttcgatattcggccccccgggataacgcagccccagcacgcgggccaccttgtcaaacgcctctcccgccgcgtcgtcgagcgtcgaaccgagaatctcgaactccgcttccgattttgcgtataaaatcgcggtgtgcccgccgctggccaaaagcgtgacgaaggggggacgaagcccgggctcgtcgagataggcggccgccatatgtccgcggatatgattgacggcgatcagcggc
